United States Patent Application Publication US 2019/0348154 A1 - sequence listing, part 36

SEQ ID NO: 133153 - DNA, 474 bp, Enterobacter cloacae
atggctgcattaaaacctgatgtgaaagccttcatcattcagtcgcttgcgtgctatgacacgccatcgcaggtggtcgaggctgtccaaaaagaattcgggattaagatcacccgtcagcaggctgaatctcacgaccccacgaaggccagcggtaagacgctcgccaaaaagtggatcgagatgttccacgcgacgcgcgaacgattcctgaccgaaaccagcgacattccgatcgcgaacaaatcctatcgcctccgcgtacttgaccgcatggcaaccaaaaccgaggggatgaaaaacttctccctgactgcgcagttgattgagcaggccgcgaaagaggttggcgacgcttacaccaataagctgaaggttgagagcactggcaaggatggcggcccgatcaagaccgagacgaccaacctcaccgcagatcaggccgcagagctttaccgcaagatgatggggtga

SEQ ID NO: 133154 - DNA, 1623 bp, Enterobacter cloacae
atgcctctcccgtttgaattcgacttcagaaaccctgattaccagatggtttttgaatggcggatggagcgcttacagcgcattcgccagaaccccgaaatgctgccagcgctaaagcagttttaccgcaccaacccggcacagttcatcatcgactggggtatgactactgacccgcgtaacatcgattatggcctgccggtcaccatcccttttctgctgttcccgaaacaggaagagtggattcactggatcatggagcggcgcgaacggctggagaacggcatcaccgaaaagagccgcgaaatggggctcagctggacggcgatcgggctggcttgctcgctctgcctcttcaacaaagaaatggtcatcggcttcggctcccgtaaagaggaatacgtcgacagcaccggtgacccgaaggcgctgttctggaaggcgcgcaaattcgtggaaacgctgcccgtcgagtttcgcggttcgtgggacgagaagaagcacgcaccgtacatgcgcgttgagtttcccgatacgggcgcggtcatcaaaggcgaagctggcgacaatatcggacgtggtgaccgtaccacgctctacctggtggatgaggctgcattcctccagcgtcccctgctgattgacgcagcactgtcgcaaaccacccgctgccgtatcgacctgagttcggttaacggcatggcgaacccgttcgcgcagaagcgtcacggcgggaagataccggtattcacattccactggcgaaatgacccgcgcaaggatgaagagtggtatcgcagggaatgcgagaaaatcgacaatccagtggtggtggcgcaggaacttgacctgaactacagcgcatctgcggaaggcgtcctgatcccgtccgactgggtacaggctgctgtcgacgcgcatatcaagctgggcatccagcccacaggaaaacggctgggcgcgatggacgtcgccgacgaaggccgggataaaaacgccttttcgacccgccacggctttctcctggagaacgtgcgggaatggtccggcgtgggcagcgacatttaccagtccgttgagaaggtcttcggcttttgcgaacaggacaacctcgaagagtttcgcttcgacgaggacggcctgggcgctggcgttcgcggcgatgcgcgcgccatcaacgaactgcgtaatgctgcacgccgaccgtcaatactcgccacaccgtttcgcggtagcggcgcggtgtttgatccggacgacgaagcggtgcgcggcgacaacggacaggcagcccgcctgaacaaggacttcttcgctaacgccaaggcccagagctggtggcggttacgcaagcttttccagaacacctatcgcgccgtggttgagggcatggcctacaacccggacgaaatcatctcaatcagcagcggcatggcgagcaaagacaaactcatcatcgagctgtcgcagccgacctactccattaacggcgtggggaaaatcgttgttgacaaacagcctgacggcaccaagtcgccgaacctcgccgactcggtgatgatcagctacgcgccaatgaattcagccctgaacatctgggagctgctagggagacaggcctga

SEQ ID NO: 133155 - DNA, 1470 bp, Enterobacter cloacae
atggcacgaaacaagcaagcctctcagcgaacggcgcaggccaccgctgatggctatgagaactttgtcgcccgcgtggggatgcagacgcctaaccagcattcagcatcgacctaccgggcgaacttcaccagccgcaaccgcatgctggtggaatggtcatatcgcggttcgtgggttatcggcgaagcggtcgacgctatcccggacgatatgacccgcaaaggcattcgcatcacctcggagattgacgccaaagaccgtggcaccctcgaagcgcagctggatgagttgcagatctgggatgcgctgaacgacgtgctgaaatggtcgcgcctctacggcggcgcggttggcttcatcatgattgaggggcaggcaccaatgaccccgctgcggctcgaaaccattggagaaggcaagtttaagggcattctcccgctcgaccgctggatgattaacccggtgctgacccgccgcattaaagagatggggccggatctcggcaaacctgagttttacgacgtggtgaccactgcaacgggcattccatcctggcgcatccatcacagccgcctgattcgcttcgacggggtgacactgccattccagcagaagatgaccgaaaacgaatggggaatgtcggttgtagagcgtatctgggatcggcttactgcgttcgacagcgccactgtcggcgcggctcagctggtctacaaagcgcatctgcgcacctacagcgtggagaagctgcgcgagcttatcgcgcttggtggcccggcgttcgaggcgctgctgaagaacatcgacctgatccgccagttccagagcaatgaaggcatgacgcttatggactcgcgggataagttcgaaacccaccagtacagcttcagcggtctggatgacattctttcgcagttcgctgagcagatcagcggtgccgtcggcatcccgctggtacgcctgttcggtcaatccccgaaaggcttctctactggtgatgctgacctcgccaactattacgaccgggtgagctcattgcaggagcgccgcttacggctgccgatgcgccggatactggacattatgcaccgctcggaactcggtaagccgctgccggacgatttcacgtttgagtttaacccgctatggcaaatgtctgacgttgaccgctcaacggtggccgtaaacaccaccaccgcgatcagcaccgcgctgggcgacggattgattacgcgtaaggctgcgatgaccgacctgcgcgaaaactctgacgtcaccggcatcggggcatccattaccgacgaggatatcgagaatgccgaagacgaagcgccgccaggcatcggcgaacttagcgacaaaccgccagagccgccaggcggagatccgatatcgaacgagcctacggcagatagcgcgggcggtcggggatatcgtaaatgggcgctacgatggttcaaacgatag

SEQ ID NO: 133156 - DNA, 609 bp, Enterobacter cloacae
atggatgcgctggagcgctacagcgaaatcatcaccccctgggcgacgaaggtggctgagaacttcaccgcagacatagcgcgccagaatgaaaagcagtggcgtcaacacagccggaacatcagcgcagagctgcgcaacatggttgaccgcgccccggtaggccaggtgatgaaatccatcgtcgccgagcaaattaagtacatcaagtcactgcctcttgaggccgccgatcgggtgtatgacattcagaacaaggccatcgaggccgttgtgactggtggccgcgctgagccattcgcgaaagagatagctgcatcaggtgacgtgtcacgctcacgagcgaaccttatcgcccgtaccgagcttggacgtgcaaccggtgcgctcgatcaggcgcgtgcgctgtcaattggttcgaatggttatatctggcgaacagctgaagatggcgacgtccggcattctcatcgtgagatggagggcaagtttgtcgaatggggccgacctccaacgcttgacggcatgaccggtcatgctggcgagctcccgaactgccgctgttacaaagagatcgtcttccccaaccctcattcttatctcgcctga

SEQ ID NO: 133157 - DNA, 1233 bp, Enterobacter cloacae
atgaaatattttttcaatacccggctgggggaaacccgctatcagctggctgacggctctctgttgtgtaaagacgtgccgataggtcgaacgggtaaacagctctacggcgctgccgatctgccaaacctcaaacccgacaagctcggcgagatagtcgtaacgcgctctcctgagcaggtattccatccggccacgctcgcctcattcgaagggatgagcatcacgatcctgcatcctgaagatgaaaacgggaatgtgcggctggtaaatcccgagaactggaaagagcttgctgtcgggcacctccagaatgtccggcgcgggacgggtgagcagtctgatttgatgctggctgaccttatcgtcaaagacgaaaacgccattcagcttatcgaagatggcctgcgtgaagtgtcgtgcggctatgacgcggagtacgagcagaccgagccaggtaaagccgagcaggtcgatattaccggaaaccatgtggctcttgtccctaaaggcagagccggaaatcgttgtgcaattggagacagagacacaatggcaaatcaaaagaaaagctggtggacccgcatgcgcacggccatcaaaacgggtgacgctgacaccatgaacgaactgctggactctgcgccagcggcggtaacgggtgacgaaggggatctgccgagcggcgttaacctcaacattaacctttcaccgcagcaaccattgccggacaaaaagccggaaatgggcggagagccaaccggcgacggcgaggacgatatcaaaaccttgctcaaagccctgctggctaagctggaaggaaatgcgacttgcgataacgacaataagcctgatgaaaaagacaaaaaagatccgacctgcgacggcgagggcgacgaagtggaaaccacgattaccggtgactctgcctggcgtgccgaggttatcgtcccgggtatcgatctgagccgtaaggtgaaaccgaccgcgttcaaacgtgatgtgctggctgccgctgacaaaacactggttcgccaggttgtcggtgatgcggatatccgcaaattgcccaagcaatcggtagatatggcgtttaacgccgtgtctgagattgcaaaagggcgaaacacccgcagcaccacgggcgatgcacaccgtccaaatatgggcatgaccagcatcgcttccctgaacaaacaaaacgccgacttctggtctaaccgcaaaggataa

SEQ ID NO: 133158 - DNA, 504 bp, Enterobacter cloacae
atgactgcatatctgtaccggatgcctgttggcattgccggggctatctctcgcccgcaggacttaaccgtcgaaccggtgatccttaaatccgctaacgccttcgctgcctatggtctggctggcaaatacgacgctgacggctttttcgtgccgctggcggacggtgacaccgccgacaaggtgaaggggatctacgttcgtccgtatccgaccacatcgcagccagacatgattcgccaggtggggacggataagaatttcccgggcgacgccatgaagcgtggctacatgaccgttaacctcggatctggcttcgatgccagcaccatcaaaaaaggcgcacctgtctatgtggttgtttcgctcgactcaaccattgacgtgccgctgggcggtttcatgtccacgtctgtcagtggcaaaaacgtggcgctgaccaacgccgaattcacaggggccggtgacgctaacggcaatgtagaaatctcctggaagatttaa

SEQ ID NO: 133159 - DNA, 942 bp, Enterobacter cloacae
atgattacttttgatcaggcaaccgttgatggctctggtgcctttctcatcggggagctggagcgactcgaccagacgttgaacctgccgctggtgggttacacctggacccgcgatattcagctgcgtgaagacgtttctatcgcagatgacatttccagctggactaacaccagttttggcgctgcgggtactggcgcaaatccgaacggtaaaaactgggtaggcaaagactccaccgctattgctggcgtgaacgtggatatcagcaaagacggcaatccactgaacctctggggtatggaactgggctggaccgttgtagagctggcagctgctcagcaggtaggccgcccgattgatacccagaagtacgacgggatgcagctcaaatggcagatggacaacgacgagcaggtttacatcggtgatgacgcactcggcctgaaaggtctggcaaacctcgtcggtgtgacgctgaacaacgcgccgaagacctgggcgaactcaaccaacgacgagatcctcgatagcgtgaacagcattctgtctaatgcctgggcagcatccggttattccatcgtgccttctgatctgcgcattccgccagagcagtattcactgctggcgagccgtaaggtttccgaagcgggtaaccagtcactgctgacctatctggctgtgaacactatcgctttccaccagaacggcgttccgcttgaaatcaaagcggtcaaatggctgaaagggcgtggggttggcggtaaagaccgtatgatcgcctacaccaacgacaagaaatacgtgcgctatccgctggtgccgttgcagagcgttcctgtccagtatcgcggtctgtatcagattgcgacctactacggcaagctcggtgcggttgagccagtgtacaaagaaaccctgtcctacgtggacggtatctga

SEQ ID NO: 133160 - DNA, 390 bp, Enterobacter cloacae
atggcgaaagaaaagctggttaccatccatgttcacaccccgtttacgctgacgctcggcgatcagtcaaaaagggagtttggccggggacggcataacgtaccggaagaggtcgcgtcgcactggttcacccaggcgcactccgagctttccgaaagcgtgattagcgacaccgatgatctgcaacccattatcgacagcctgcaagctcagattgccgacaaagataagcagattatcgataaagatcagttgattgccgatctgcgagaagcgctgctcaagctgcaagagcagaacgacagcctgcaagcgcagattgctgccgcccagactggcggtaatggggcgaaagatgccaaagaatcaaagcctgccaacagtaagtga

SEQ ID NO: 133161 - DNA, 408 bp, Enterobacter cloacae
atgccaaagaatcaaagcctgccaacagtaagtgattttcgccgcgacttcccgcagtttgctgaccctgccaaatatcccgaagcgcaaatccagtttcgtctgaatctggccgatgtgctgctgagcgaaaacgtcaccggaaaagagttgtttccgtactttgccgagttgttcgtggctcactacatgacgctctgggcggcagatagccgggcgatgctggttggcggtccgggtggttcaaccaatggtgtgcagtcctccaaatccgttgacaaggtaagcgtcagctatgacaccagcatgacgctgaatcctgacgcgggcttctggaataacacccgatatggcgctgaattctatcagctgatcacgatgttcggcgctggcggccgccagctatga

SEQ ID NO: 133162 - DNA, 549 bp, Enterobacter cloacae
atgaaaagcggcgtaaccacgcgggttgataatgctcagtccattctcgaagcactcaagtctttaaccaaaaaggatgtactggtcggcattccttcggaagacagcgatcgtgaagatgttccgtttggtaatgccgggatcggttatgtcaatgaatacggctcaccggcgcaaaacatccccccacgcccgcacctgatccccggcgttaaatcggtagaggaacagactgtgccgcagctcaaagcagcggcgcaggctgcgcttgatggtaatacagatggcgcggaaagagccctcaaccaggctggcatgctggccgctaatggtgtcaggcgttatatgaccattaccggctttacgccgcttgctgatagcaccgttgaagcacgcgcgcgtcgcgggcgtaaaggggctaaagcggagcttgcccgccgcgctgctggcgagccgcccggaaccgatctggtaaaaccactaatcgacaccgggcagtaccgcagagccattacccacgttgtgagggataaagatgccgactcttga

SEQ ID NO: 133163 - DNA, 390 bp, Enterobacter cloacae
atgccgactcttgatgtaacagatgtgctttttgaccccgatttttgcgacttcaacctgtgggtaacgcgtcgcgcacaaacggtggacgaggacgggatcggcagcgacagcgaagttaaaacgcagtttgcaggggttgttaccgttgaccgctctcttgaaaaccgccgcatgcaggccgggcaggttatcagcggggcgattcttatcgtgacgactgagcgactcacgcaggggcatactggccgtgatgccgatatcgtgacgtatcagaaccgtgattatcgtgtgacgttcgtcgacccgtataccgcttacggtgctggcttcgtccaggcacattgtgaactgttgccgtttgatgggggtaatcccgttgagcaataa

SEQ ID NO: 133164 - DNA, 564 bp, Enterobacter cloacae
atgggggtaatcccgttgagcaataacaccagcacagagcgcggatggctgacacccaccagcggcgatccggattatgacgaagcgctcgacaggctattaagccagtgggtgcgcaacgtttccggcttgcctgttggggtggttcgcccgcgctggcagaaagaccagccgccaatgctgcctgttgaaacgaactggtgcgcgtttggcatcatcgaatggcccattgataacagccctgcattcacacaacagaccgataccggaacacagctctggcggcacgaggattttgtcgcgatggcgtcgttctacggcccgggaggaatgcaatttgcttcgcgattccgtgacggaatatcggttgagcaaaacaacgccgagctgaaccagtcggctctctcgctcgttgactatggcgatattgtccctttccccgagcttattaaccaacagtgggtacgccgttacgacatgaaagtgcggctgcgccggaaagtggttcgagagtacaacatcctggcgctgcaagatgcgcccgtttcattcttcggagagtaa

SEQ ID NO: 133165 - DNA, 810 bp, Enterobacter cloacae
atgtttttaatcaatggccttgagcaggacacgctgcctgccagcgacagggcgatacagttcggtgatggttgctttacgacggcgcgcattctggacggcgatgtctgcttgctggaggcgcacattcgacgcctgcagcatggctgtgaaaagctcatgatcccctttacgcactgggacacgctgcgtcaggaaatgtgcgagctgggaaccgggaaggacagcggcgtactcaaagtcatcatcagccgcggcagtggtggccggggttacagcgctgcatcgtgcctcaacccaacgcgtatcctctccgtttctgcttatcccgcgcattattctcgctggcgagaagacggcgtcacgctgacgctgagccctgtacgactgggacgaaacccgatgctggccgggcttaagcatctcaaccgcctcgagcaggtgctcattcgtactcatcttgaacagacggacgccgatgaggcgctggttcttgacagcgaagggttcattacggaatgctgtgcggctaatttactctggcggcagggggaaaaggtgttcactccgtcgctggaatacgctggcgtaaatgggttaatgcgtcagttttgtctgcaacagctggcacgctctggctttcgcgttgtcgaagttagcgcaggagaagcggcgctacggaccgcagatgaagtcatcatctgcaatgcgctgatgcctgttgtacccgtccgtgcgtatggccaacaacgctggtcttcgcgcgagctgtttcagtttttagccccgatatgtgagcaaaccagatag

SEQ ID NO: 133166 - DNA, 867 bp, Enterobacter cloacae
atgtcagacaacacgtatcagccaccaaaagtgtgggaatggaaaaagaacggcggcggcgcgttcgccaatattaaccgcccgatttccggcgcgacccatgagaaagatctgcccgtgggctcccacccgctgcagctttattctctcgggacaccgaacggtcagaaagtgacgatcatgctcgaagagctgctggcgctgggcgtgacgggcgcggagtatgacgcatggttgatccgcatcggcgagggcgatcagttctccagcgggtttgttgaggtgaacccgaactcgaaaattccggcgcttcgtgaccactccacgaacccgccaacgcgcgtatttgagtccggcaatatcctgctttatctggcagagaaattcggccacttcctgccgaaagatccggcggggcgcaccgagaccctgaactggctgttctggctgcagggtgcggcgccgttcctcggcggcggcttcggccacttctacaactacgcgccggtaaaaattgagtacgcaattgaccgctttaccatggaagccaaacgcctgttcgacgtgctggataaacagctggcgcgcggtcgctacgtggcgggtgaggagtacaccatcgcggatatggcaatctggccatggttcggctgcgtggcgctgggcagcgtgtacaacgccgccgagttcctggatgcagagaagtacaccaacgtccagcgctgggcgaaagacgtggcgaatcgccatgccgttaagcgcggacgcatcgttaaccgcaccagcggcgagctgaacgagcagctccacgagcgccatgcggcgagcgacttcgagaccaatacggaagataagcgtcaggcgtaa

SEQ ID NO: 133167 - DNA, 876 bp, Enterobacter cloacae
atgagcaaactccgccgcagcatgctgttcctgccgggcgccaacgccgccatgctttccaccgcatttatctaccgtcccgactccatcatgtttgatcttgaggacgccgttgccctgcgcgagaaggataccgcgcgcatgctggtgttccatgccctgcagcacccgatgtatcaggatatcgaaaccgtagtgcgcattaacccgctcagcacgccgtttggcctgctggatctggaggccgccgtgcgggccggcgtggacgtgatccgcctgccgaaaaccgacacgccggacgatatctacgagctggaaggccacctcgagcgtattgagcaggagtgcggccgcgaggtcggctccacccgcgtgatggcggcgattgaatcggccattggcgtcatcaacgccgtggcgattgcccgcagctctgtgcgcctcatcggcatcgcgctggccgcctttgactacgtgatggacatgcagaccgagcgcggcgacggcaccgagctcttctacgcccgctgcgccgtgctgcacgccgcccgcgcggcgggtatcgacgccttcgacgtagtgtggtcagacgttaacgacgaggccggattcctgcgcgaggtcgatctgatccgcaagatgggctttaacggcaaatcgctgatcaacccgcgccagattgatctgctgcacaacgcctacgccccgactcaggaagaggtggatcacgccaaaagggtgattgaggcggcagaagagggcgagcgtaacggcctgggcgtggtatcgctcaacggcaaaatggtggatgcaccgattattaaccacgcgcaggtggtgctggagcgcgcggcggcctccggcgtgcgtcggtaa

SEQ ID NO: 133168 - DNA, 1524 bp, Enterobacter cloacae
atgaatcagactgaacttcttcacgtgtattttccccatctgcgggacttaaaaccctttgataccgcccacagcgccacgccgtggctggcggacagcgacgcgaagcacagccgcaagctctgcgcctctgttgaagaggcggttaagcgctgcggcctgcaggacggcatgaccatctccttccaccacgcgtttcgcgaaggcgaccgggtgatcaacaccgttgtggcgctgctggcgcgaatgggcttcaaaaacctgacgctggcctccagctcgctgatgacctgcaacgacgcgctgatcgagcatatcgaaagcggcgtcatcacccggatatacacctcgggcatgcgcggcaggctggcggacgcgatctcccacgggttgatggacgagccggtgcaaatccactcccacggcggtcgcgtgaagctgctgcaggacggcgagctcaatattgacgtggcgtttctcggcgtgccgtgcagcgatgagtttggcaacgccaacgggacgcacggcaaatcgtgctgcggctccctgggctacgccatggtggacgcgcactttgcccgcaaggtagtgctgctgaccgaagaactggtgccgtttccgaatatgcccgccagcctggtgcaggaccaggtggactacatcgtgcaggttgagagcgtgggcgacccggcgaaaatcagcgtcggcgcggcgcgcgtcaccagcaacccgcgcgagttgatgatcgcccgctatgcggcggacgtcattgaacactccggctacttcaaaccgggcttctcgatgcagaccggctccggcgcggcggcgaccgcctgcacgcgctttatggaagagaagatggagcgcagcggcgtgaaggcgcgctttgcgcttggcggcatcaccggcagcctggtggatctgcacgagaaggggctcatcgaaaagctgctcgacacccagtgctttgacggccaggcggcggcctcgctggcgcgcaacccgaaccacgtggagatttccactaacgtctacgccaaccccggcagcaaggcggcaagctgcgaccagctcgacgtggtgatcctcagcgcgctggaaatcgacgtcgattttaacgtcaacgtcatcaccggctccgatggcgtgatgcgcggcgcgtccggcgggcactgcgacgtggccgccgcggcgaacctgaccattgtggtcgcgccgctgctgcgaagccgtattccgacggtcgtgaagcgggtgaccacgcgcctcacgccgggcgagagcatcgacgtgctggtcacagaccacggcattgcggtcaatccggcgcgcccggagatccgcgaacgactgatggaagcaggactgaaggttgtagacattagcgcgctttacgagcgggcgatttccctgaccggcgtaccgaaaccgattgaatttaccgacaaaatcgtcggggtgatccgctaccgcgacggcagcgtgatcgacaccgtacgacaggtgaaggaggaagtgtga

SEQ ID NO: 133169 - DNA, 540 bp, Enterobacter cloacae
gtgattttagcgacacccgtgcggacgggtgtcagtctggacgaactgctggcggcgaaagagcgccgcgcagcgcgccaggctgacatgctcgagcactatcaacaaccggtgatttccctcacgctggtcacgccaggggaaatcaaagacagtctgcgctatcgaaacaccatgggcgtggcgctgcagatgtgcgaccagctgctgtgggaaaaccgctggcgggtgctggaccgccaggttctatggctcccgaccgggccggaggccctgtggtgcgtggcccatcccgctgtggaaatcaaagcgcactgcgcggagctggagcagacgcacccgctcggcaggctgtgggatctggacgtgatctgccctcagcacggccacgtcgggcgtcagtcgctgggcgcaaatttaaggcgttgtctgatctgcgacgagcccgctcatgcctgttcccgttcgcgcgctcatcctgtggagcaggtggtctcccgcgtggagaagatgatcgatgactggtttgctcgcgactaa

SEQ ID NO: 133170 - DNA, 291 bp, Enterobacter cloacae
atgcaattctatcagttggcaacgatatgttttgttacctcccgcaaaaaaatgcaatccacattaatttgcagtttggattgtgatgcaaataacattttcgtatgggtggtgttggataggtgcggcctgatgcctcaccctgaccctctcccacagggagaggggaaacagaacaccttctcccagaggggagaaggtgtgccgatcaccggcgacgatagtttttctgcgccgtattcaccttatacaggtaccggcgggattccgcagacgggtggcgggtggtga

SEQ ID NO: 133171 - DNA, 981 bp, Enterobacter cloacae
atgagcattaagagactcgatgatggtcgatacgaagtggacatcaggccgcgcgggcgcgaaggacgtcgcattcgccggaagtttgaaaggaaagccgaagcgttagcatttgaacgctatacgctggcgaacgctaataccaaagagtgggctggtcagcgggcagacaggcgaacgttaaaagaattgctggatgtatggtggaagtattacgggcaaaacctggagcgcggaacgaaggagtttaatcacctggttaaaaccatggacgacatcggagatctacccgtcaccagattaaacaaacggatcttgatggattaccgctccgcgaggttgcgcgacggtgtgagcgcatcaacgattaaccgtgacctgtaccgtttatctggcatgttctccaagttgatgcaactggacgagtttgccggtccgcaccccgttcgtggcctgccgcctttggcggaagcaaatcaggaaatggcgttcctggacaaagccgagatttcactgctgctgaattcctgcacaggggatgatctgctcgtcgcgcttctcggactcagtacgggcggaagatggacggaactcgttacactgaaaccgacgcagttggttaacgcgcgggtcacgttcctgaaaactaagaacgggaaaaaacgcacggtgccaatctctgccgaactggaaaagatgatcaaggaaaaggccagcgggaagttttttaacgtcgattatgtgagtttttgcaagatactgaagatggtcaagcccgacatcccaccaaatcaggcaacgcatattctgcggcataccttcgcaagtcatttcgtgatgaatgggggcaacatcattgcactacagagaatactgggccatgcgaacatccagcaaactatgacgtatgcgcacctttcgccggagtacctccaaaatgcggttgctttgaatccgcttgccggaggcatatcgctgtaa

SEQ ID NO: 133172 - DNA, 294 bp, Enterobacter cloacae
atgaaaacatcggagaaactccgtgctattcgtaaagccgaagggctgacacaagcgaagttttgcgaaatcagcggcgtagcgcttagttctttaaaaaactatgaaggtggtcataaggaaccaggcttacaaattgtgaagcagatcgtaaacgccccgttgttcaaaaaatacacgctttggattatgactgacgagacagcccccgaatccggacaaattagcccggtcgtcgcacactgtgggcaagaagaaacaacctcgtcaccctcaggccgcaaaactggttaa

SEQ ID NO: 133173 - DNA, 225 bp, Enterobacter cloacae
atgactacgctgacgacaagcccttctttcgcaagcctgttaaccaaaagccagcaggtaacacaccgcgcccacacccgtggctggattgaaaccccggacggtcgcttcttccagccaaaggcaactgacgtgcagttcatcaaacagtcacgtttgccgtttatgtctcgcccgcgcaataagcgccgctggttcgcccgcctgatgggcatcttcgcttag

SEQ ID NO: 133174 - DNA, 390 bp, Enterobacter cloacae
atgttcatggataaaacaggacagcaaccgggccgccgcagttttctggaacaacgcgcccgactgcaagccagtttgaacgccaaccgcgtgaacgatacggcaacccgcttcaatcgcttggatgaaactcgcaagaaagtggttttcatcctggcgaatgatgcggccagccgtgtggccggtttaccacaactgacccgccgccacctgaatttagcttttgctgatctgaccgaagcggaacaaacctgcctgatgatggggattaagcgcctttcagagttcgccgcgtcaatgccgtgggaatttgaggactacgccgcgccccgcgctgaaatgcaggctttacgtgacaagccgccagagccagacaaaccaaccaattaa

SEQ ID NO: 133175 - DNA, 984 bp, Enterobacter cloacae
atgattcgttcgcttgtgaaatggcctggtggtaaaagccgcgtaattcccgatctgctgcccgtactgcctaaagcggattgcctggttgaaccgttcgtcggcggtgcttctgttttcctcaatactgaatatcgccgttatatcctgggtgatattaatcccgacctgattaacctttaccgccagataacgcgctggccggatgcggtgattaacgccgcccgcccgttgtttaaggtgtatggcgataaagacggttatcagtgggtccgggatgatttcaacgcccgtgccagagataatctttcttcgcgtgaagttttcgaaaacggcccggacgcgggcaagatccttcgcgctgcgcaattcctttatctgaatcgccacggctacaacggcgttgtgcgctacaaccgccagggcggatataacgttccctttggtaagcataaaaccccgccttacttccccgaagaacagatccgcttgttctctgaaaaggccaacgacacgaaagccgttttcgtttgttgcgactaccagagcacattaaaaatcatgattggcagtgatgccgttatctactgcgatccgccgtacctgccagcaagcgaaacagccaattttacccagtaccacaccgccccgtttggtgagaaacaacaccgccagttagctgcggccctactggctgccaaccgcctgactggttcgccggtgatcctgtcaaacagtgatacccccgccacccgcgatatttacagcgctttcaaattccaggaaatcagcgttaaccgttcagtgagtgcgaacgccattaccaggggagccgccagcgaggtgatcggcgtcctcaaagtgtgcgacggctgcgggcgtgccggtggcggacgctgccctgattgtgggcctgtatgtggcgatgcttcttacaatgcgatggttgcttctggctcatttgattatgcggatgatttctga

SEQ ID NO: 133176 - DNA, 921 bp, Enterobacter cloacae
atggcggcctattacaacgaaatagaaccatttgcggcccagtggctacgcaaccttattgctgctggtcttatcgcccccggcattgttgacgaacggagcattgaagatgtcacaccaaacgacttacgcggatttactcaggtccatttcttcgcagggattggtatttggtcatatgccctgcgccgtgctggctggccggactcccgcccagtctggacagggtcttgtccatgccagcctttcagcgcggcaggcaaaggagaagggtttgctgacgagcggcacttatggcccgccctgcattggctggctgggcagtgccgccctctcgttatctttggcgagcaatctgcgagcgctgacgcaaacgactggatcgaccttgtacaagctgacgtggaaggaatgggttatgccttcggggcgtgcgcgtttccgtctgcgagcgtcggcgcaccgcatatccgggacagggcttactgggtggccgacgccgaccgcaagcaatacgaaaaatgcctaccaggacgcggagaaagtgattgcacgaaagcttgctggtcgccagtcgaacttgcaggacttcgcctgtctggcggggtggccgacaccagcggcaagagatcacaaggggggttatcagggcgggaggatgcgcaacgggaaattatccacggacacactggacgtggtagcccagatagcggatgcggcccggttaacggcttctggggatctgctgactggctgttttgcagggatgaaaagtggcggccagttgaacccgaacttatcccgctggttgatggggattccgcaagagtgggaaaaatccgcgcctacggaaacgccgtcaacgctgaagcggcaacggcgttcgtaaaagcttacatgatgggggcgtccgatgtctga

SEQ ID NO: 133177 - DNA, 2655 bp, Enterobacter cloacae
atgtctgacgtcttcgcatgggattggaacaagccccgccccgctatcggggcgtttacctttgaatctgcaaagctcgccccgctcgccggggcggtggcgcatcaccctgccgttgaaaagcatatcgaccggcttatcaaacgcgccggttataacccggctgaggtccgcaatcgtggagcgctgatccatgcgctggacaaatacgagccgcgcggcctgccgtttgccgtacatcaagaaatggtcagaaaagatatggccgccgcaaaggccgccgcagccgcatgggccagcacgccggaaggtgtggaggcccgtttgttgtctgagccgttttttatccgcgaagtctggcgcaaaaaaatcgactggttacgcgccaaccgtgaagcccgacacattaatgattttcttatggggaccgtgaaaaaatcattactgcgtcttgatgtcgtgcgcagcaaacaaggcgttgcgacagacgttaacagcgaactggccgcctactggcatggccgctggcaacgcctggcagatttcaccaaacgggaagcgttaagcgccgcgcatgagattgccaaccgcctggcggaaatgcttgaaaccgaatgcgccgctttgggcctgaccgccgagggcatgagcgttgaggaactggactggatttattgccacctgggccgcgaaatgctggcccttcgcgttgtgccgcccgcatggaccgcgccgtgggaacgtgatcggatctttaccgccattctgcgtatgtgctcgccggactggtggggccgtaaaatttggcgtcttcgctgtgactggcgtgaaaaccagttgcgtgcagtcggcgcagttcatcgcaaggcccacgcctatgtaagcgcatcaagcctggttgagtggcaggaacagcgccggaagaaccgcgaatttttcaagagtcatgagcttgtagacgaagacggcaacgtttcatcgcttgaagatatgataaacaagtccacgtccaatccggcgatccgccgccatgagttaatggcgcgtatggctggcgtggagcttgtcgcacaacagcgcggcgatgtgggcatattcctgaccatcacttgcccgtccaaatatcacagcaatgtcgaatccggtcaccataacagcaaatggaatcacaccaccgttgcccaggcgcagcggtatttatgccgcgtctggaaccgagcaaccgccaaactgaagcgtgaagatttgcgcccttatggcttccgtgtcgcagagccacaccacgacggcacgccgcactggcacgccctgttattcatgccgcaggcggaagtaaaagccaccgtcgcgatccttcgcgcttacttcattgcggaggaccgcgacgaactgggccgcaataccggtgctcgcttcaaatccaaaaaaatggacccgcgcaaggggtcagcaacggcctacatcgcgaaatatatttcgaagaatatcgacggccacgcgctggccggtgagctggacgacgagacgggcaagccgctgaatgaaacggccagatatgcaatggcgtgggcatcgcttcaccgcatccgccagtttcagccgctgggccagccgcccgtgtccgtttatcgcgaactgcgcaaactgagcaaccagctaaccaaccagagaaaaatcgcgaataccttcaaacgtggcgcggcaatgctggccgatcccgaaatggatgcggtctgcgccgctgccgatgtgggttgcttcgccacatacattttgcgccagggcggtgtgttgatcccgcgtgaaaactatgtcgtccgcctcgcctatcagccagccgatgaaatgaacgcctactgtgagatcccggaaaaggtcttcggggtctggtcgccacgtctgggcgaagggtcgcgcatttgcacgcgtctggttaagtggacaatccgcgccaaatccaaagccgccaccggggccaaaagcgcccctggtttgggggttgacgttttgccgtcgccacccggcgacgcttggagttctgtcaataactctacggaagacgaaaaaaacaccgacttttcccccctgggtggtgcttcagcagggtcagaaatgaccgtgccagctgacgtggagggaatgacagacgatccagaggaagaaatggtcgattttgaaaatatggatgcggcagcacggcgcaagctggttcgccggttacgagaaacgcccgtcagaagggtaaaaacagattcaccgtatgacccaggcagtgaactggatgtcgcctggcgggcagcagtagagaaaatcaattcaaaatccgctgaggaaaacgccagacgggccgcacttgcgccagcggttgccagtttgctggccgatgcctccctttatgcgctggatatttccgaagcccaggcaatttcactgatgaaaggcagcaggctggaaattaacgggcaggttttccgcgccagttcagacggcgagttaatcacgcgtcagcaatacgacgaatccggcacggtaaacaaattatgggaacggctgcgagataaccacggcgttgatgtgtcgcggttgcgattcgatccggtcggtgagtacagaaagatggtggccgccgctgagagtcagccaccgaaacgataa

SEQ ID NO: 133178 - DNA, 675 bp, Enterobacter cloacae
atgtcatatctgggaagcaaggccgccagcggcgtctaccaaaaaatcattgcggaaatgccgccgcacgacacctacattgaaacccatctcggaggcggggcggtgatgctgcgtaaaccaccggcgatgtgcaacatcgggatcgatgttgacgggcaaactcttgaagatttcgcgcgtgaacataatcggctttacattgatctggttcgggctgatgcggtggattatctgaaccattacgatttttaccgtgcagggcgcgtcctgatttatgtcgatccgccttacatgcctgaaactcgcaccagtcgcgcccgctatcgctatgaatattcggttgcagatcatgagcggttattatcctgcctggtcagcctgccgcgaaatgtgtctgttattctttctggctacccatcgcagctttatgacgaacggttaacaggctggcgcagcaaagaatttcaggcaatgacgcgcggcggagtgcgaacagaaaaaatctggatgaactacccagaagggcaagcatattcgcacgcctttgccggtaaagattacaacgacagggccaggataaaacgaaaggttgctcgctggcgggaaaagttcgccgccctgcctcctgctgaacggctggcgatcatgaccgccctttgtgaagttgaatga

SEQ ID NO: 133179 - DNA, 327 bp, Enterobacter cloacae
atgaacgtaattagtttaaaatcatccccattgttagcaatggcgtgcggggtggtgaacatgcgagtttttaaaattaaatgtcctgaatgcggtcaaccggccatcattcgtaaatcagactggaaagataaaaaactggcggatttatactgcgcgtgcaccgaagttgaatgcggccacacgtttgtttttaacgcctcgttttctcacactctcagccccagcgggctgaccggtaacaagctggtcaaattcctgattgaccggctcaagccagaagaacgccagttcgcgctggacctgctcaacggccagaccgcataa

SEQ ID NO: 133180 - DNA, 1065 bp, Enterobacter cloacae
atgacgacaaagaaacagcgtaaagcgaaaaaattcagggcaatgaccggcaataacgttgaaacgttcacgccggggcgcggcagcgtgatcacgtttggcgaaccggaacccatcctgacgaccggcaccgattatcacaatatctggtatgacaacgaggcggatcactggcggctcccgattgaccgcctggcgctggctcagttgccaaaccttaacggccagcatggtggcgtattgtatgcgcggcgcaacatggttgccggtggctatatcggcggcggcctgacgcctgaccaggtagaacaagcggtctttgattatctgctgtttggcgacgtcgcaatcctgaaaattcgcaacgtattcggggaggtgatcgacctgctgccgctgccgtcgctttatctgcgctgccgtaaagacggaacgttcgccgttctccaggaagggccagcgctgatttatgacccggaagacattgtcttctttaaaatgtatgacccgcgtcagcaggtctacggcctgcctgattatatcggcgggatccattccgttttacttaacagcgaagcaaccatcttccgtcgccgctactacaacaacggtgcgcatatgggctttattctgtataccagcgacccaaatttaacgctggaaatggaaaacgaaatcaaagacaagattgcgcagtccaaagggctgggcaacttccgcaacatgtttatcaacatcccgaaaggcgacccggacggggtcaaaatcctgccggtgggtgaagtcagcgcaaaggatgaattccagaacatcaaagggatcaccgcgcaggatatctttaccgctcatcgcttccccgcagggctggcgggcatcataccgactaacggcgcggtaatgggtaaccctgaaactgcccgcacgacctaccggaaagacgaagttatcccgttacagcgtaaatttatgaatggggttaacaatgacccggaaatcccgccgcgcttacaccttaattttgacgttgaattgccggtaattaccgccgataagggcgaaaaatga

SEQ ID NO: 133181 - DNA, 1818 bp, Enterobacter cloacae
atggctaaatatcccgatgaattaaaagaagcggcccgcacgctttacattaaaagctggacgccgaaagaaattgcgcaggaattgaatattccaccgcgcaccatataccactgggctgacgtcggggagtgggcatcactgctgcccgtcgaatcagtggaaaacgtcatcgcccgccgcattgaccagctttcccgccgcgagaaaaaaacggcgctggaactggaagaactccgcgatctgattgcccatcacgtcaagcttatggcgcagcgcaataagcacgccgaaaaactggccgaaattcaggccaaaaaagcatcctatgacggtgaaggttactgcctcagtagtgcaggcggggaacctggggaaagagaaggaaagcgccggtataagaaaaacgacgtttccgggctgacgcctgaaatgctcgatacctgggcgcgggaacatcttttcgaatatcagctacattgccgcgagcataaaggcgaagactggcgcttcattctgaaaagccgccaggtcggcatgacctactattttgcatgggaagcctttgaaggcgcggtaatcagcggtgataaccaggtctttttctccgcatcccgcgcacagtctgaaatcttccgcgaatacatagtccagattgcgcagaaccatttcggcattacgctgaccggcaaaaatatccgcctcagcaacggcgcaatcctgcgctttctgtccacgaacgccagcaccgcgcagggctttaacggccacctgtatggtgacgaagtcttctggatcccgaaattcacgcgcctgcacgaagttgccagcgcaatggcaacgcacaacaaatacagaacgacctacttttcaacccccagcgcgaagacgcaccaggcctacccggtatggactggcgaagaatggcgcggcgacgatccgaagcgcaaagggattgagtttccaaaagaaaacgccatgcgccagggcgtcatttgcccggacgggatctggcgatacatcatcacgatggaagacgccatcaaaggcgggctgggtgcgctcgtcgatattgagcggctccgcaacaagtacaaccctaccgcgttcgccatgctctacatgtgccagttcgttgacagcaaagacgcggtcttcaaattctcggcgctggtcggctgcgaagtggaccgggcaacctggggcgactatgacccgaccgccgcgcggccatttggtaaccgcgaagtgtgggcaggctttgacccgtcgcgctccggcgacaactccacttttgtgattatcgcgccccccattcacgacggtgaacgcttccgcgtgctggcctgctggcaatggcagggcttcaactttagctggcaggccgaccagatacgccagcttatgcgccgctttaatattacctacatcgggatcgacacaaccggcatcgggaaaggagtgtatgacctcgtcagcaagtttgccccgcgcgaagcgaacgccattctttacagcgtcgaaagtaaaaaccgcctggtaatgaagatgatcgacgtcgtggaacgtaagcgcatcgaatgggcaaaagacgccatagacgaaaccaacaaagagcgcgtcgaaatccccgcgtcgtttatggctatccggcgtaccacaactaacagcggcaacgcattaacgttcgttgctgaacgttccgacgcaaccggccacgcggatgttttctttgctatctcgcacgccgtaataaacgaacctatcgatcacgaatttgaccgcccatcgacctgggcttttgggaatgcagcatga

SEQ ID NO: 133182 - DNA, 1062 bp, Enterobacter cloacae
atgacgcaacccagttatcgaactgattggctatgcatcgccacatccgggcaggccgtggacggtcgcaccattgaagcgcaatggttaattgacgctgcggaaacctattcccgcaaaacctacacggcaatgatttggccgcatcatccgcaatacgatattggcgagcgtgaatttacctgcaacctgggcgaagtggatgcgctaaaagttgagacggaaggtgatgtcaccaaactatatgcccagttaatccctaaccagttcctaattgatgccaaccgcatggggcaaaagctgtttacgtctgccgaatttgtcactgattttgcaggtagcggacgggaatatcttttcgggctggccgttacggatattccggcaagtctgggaactgaaaagcttaaatttattctggctggagaagaaaaggacgcagagcgcggaagcctggaaacattcagtctggggaaattgcagaccagcaggccagataaaaaagattctttctggtcgaaattattttcgactcgtaaagattttacgccaacaccagaacctaacaccgacaagcccaatgagggcgaggaacagaaaatggaagagttaaaagccctcatccagcaactgctggatttagtcaaaagcggtaaagaggccgccaacggcgacgctgataacgtcaatacgcctgaacaggccgccgacgaggtagcagacatcgccgctgatatcgccgaagccgcggcagaagttgccgatcttgccgaggaagtggcagagaacccggaagacgaagtcaaggcggaggaattcagcgttgcaaaagccaacctggctaaagcaatgaaagcgttcaacgtgaccccgtccaaacgccctcgccgcagccgtcgccgtgagttttcagcgcgtcgccagtcaggcggtaaccagatggacacgctgaccacgcaactgaccaccgtcctgacgaagctgtcagcgatggaaaacggcagcacgcagcgcccgaataatgcgccaggcggcagcaacaagccgtttgacttctgttaa

SEQ ID NO: 133183 - DNA, 1023 bp, Enterobacter cloacae
atgcaattaaccccaaaagcagagcagatgttgcgtaagtacgccgcaggcctggcgaaagccaacggccaggtggacacttcgcgatacttctcgctgaccaacccgaaagaaactcagttgcgcaatgcgctgctggaaagctctgaattcctgcgcctgctgcctaacgtgctggatgtgaaccagatcaccggacaggtggtaactaccggccagaaaggtatttatacaggccgtaaaaaagacgggcgtttctcgcgcgtccttggtgtggagggtaacgagtacaaactggtagaaacagattccggttcgtatctgccttactccctgctggttgtctgggctaatgcgggcagtgaggaagaattcttccagcgcatccaggctttcagcaatgaatcattcgcactggatatgctgcgcgtggcgtttaacggtacaagcgttgccgaagataccgacccggaagccaacccgaacggcgaagacgtcaacatcggctggcacaaaattgttaaggaccgttcagccgagcaaatcattaccggcgacgtcactatcggcggtgcgaatgctgattttatggggctggacgcggcggtcaccgatctggtgcatagctgcatttatgagccttatcgcaatgacccgcgcctggttgtgctggcatccgctgaccttatcggcgcagacgtcaccacgctgatgaataagatagatcgcccgactgaaaaagttgcggcgcagttgattggtcgccagatcgcgggccgcacggtgtacaccccgccattcatgccggaaggtcgcctgatcgtcaccacgctggacaacctgcatatctacacccagcagggaacccgcaagcgcaaggccgaatggaacgacgaccgcaagcgctttgaaaataactacctgcgtatggaagggtacgccgtcgagcatgacgagctttacgccgcatacgacaaaattaccctggcaaccgacgcgccagcttcagacgggggcgaataa

SEQ ID NO: 133184 - DNA, 705 bp, Enterobacter cloacae
atggctctttccctgtgtcagcgacaccgcgcacgcattaagaccgcaaagacgctggataaacgcgaagccctggcgtcgtcgccggtcagcttccacctgcaaatgctggaactggcaaaagatgttgagcaactccgcagcctgccgcgcaccgaagaccgcatcgaatttaaacgcgatgtgttgttgccgcgctggatgccgaccgttgagtcctatcttgccggtgatgcccgcttcgctaatccggccctggtctactgcgtgatctggttgttcgacacgggggaaatgagccaggcgctggactgggccgacgtggctatcactgaaaaccaggcgatgccggaaaacttcaaaagtaccatgcccgcctttgtggccgatacggtgctggagtgggcaacgagccaggcggaagccggtcacagcatcgagccgtatttcagccgcacgtttgaaaacatccgcgaaaagtggcgtttgcacgaagacattaacgcgaaatggttcaagttcgcggggctttatctgctgcgcgacgaacggggtcgcccgcgtgccactgccgtggatgatgtggaaacgcttgaacaggccgatgccctgctggcccaggcgcacgcctttaacaataactctggcgtcaggaccgcacgcgacaagattcgcgcccggattaacagcctgacaaagcaataa

SEQ ID NO: 133185 - DNA, 474 bp, Enterobacter cloacae
atgagtggtccaagtttcagcattagcggcaagccgttaacggtgacgccaactgcgatcaccaatggcgtgacgttctggcctgatctggatctggctgaatttcagacgtcgcgcaccctgcccgcagacctgccgccagacaccgcaggcgttgccctgctggccgccatagcggaggtaaacacgacgctggccgacgtggtggcctactggaacgggaaaggatgcgagcgggccgccgatgtaccgggcgcaaagctgggagacgaaaaccagttaacagcccagtacaaaaaagcagtttatgcgcgggcaaaagccgatttgctgggcgagttcgccaccatcgggcgacgtgagtcgcacccgggccaggaaagcctggacacccgcgccaatctgctggccgaagcggccaacgtgatgcgcaacatgctgcaacagccacgcgtgggggtgcatctgatatga

SEQ ID NO: 133186 - DNA, 477 bp, Enterobacter cloacae
atgagccagcttgaaagcctgacggcgtttatcacggcgaatttgccgcccgacgccatgcagatgttttccagttcaatggacgattgcgaactggtccgcagcgccaaagcgctggggaacaatcaacgccgcatcggcgtgctgacgtatagcgcccgcttgtcgtgggataacttcccgtttcgcatttattcgccggggctgatttatgccctggtgctggcctgggtggatgaacatgccaacgagctgcgcgacgagctgaaattacccgatcccacagtggacccggagttcgacgacgaaggaagctgcattcttgatgtggtggtcgggctggctgatccggtgattatccgcgaagtggaagacggtccgatcccgttcaggggcaaagcgtgggacatcgtcaacccggaaatctgggtcgcggaggaagcggaattcattgtccagcatggtgatgcgtcgtga

SEQ ID NO: 133187 - DNA, 696 bp, Enterobacter cloacae
gtgatccgtggggagttaaaccagcaacagctaaagcaaatgcgcgaagcgctggcaaaagctgacctgccaccacggaagcgccagcgccttttgtggcgtgtcgcaaagctgggaattattgtggccgccaaacgtcaccagcgccagcaggcggccccggacggcacgccgtgggaaccgcgtaagcgcggcaaaggaaagatgttaaagggattgcccaggctgctggccgtccgggaaatgcccgaaattcagggcgtccgggtttatctcaaaggcggcaattatcgcaacggaaataagcccgtcgcggcgggtctggtcggtgcggtccagcaggacggtgcgcggatccagatgaaagccagtaacgccccgcgtaaaccgcaggcgaatcagccagcgctgcctcgccaggcaaagcgactgcgggcgctggggtacaaggtccgcaagggcaagcgctgggtgaagccgtccagcaaacaaatcatggaaaccatgagcatggcgcaggccgggctggttatccgcaagctgaaaggcacaccggccaaacgcacatggaccatagacataccgggccgcgtttttctgggtgtcagtaacgacgaatttaaccaaatcatagcgcggcaaatgcaggcaatcggcttcggctgggacgtcaacgcgcaggatatcagggggtaa

SEQ ID NO: 133188 - DNA, 1149 bp, Enterobacter cloacae
atgacgtggccgaatgtcacagttagtcagaaaaaccgctacaacggcacgacgaacgatatcgaacgcgttgtcctgtatgtcggttacggtgacaccaacaccgacaaaacccaggcggtcaacaccggcaccgatctggataaggcgctgggcgataccgacagcctgttaaagcggattgtggccgctgccgccaataacgccggtcagaactggtttgcttatgtgcatgtcatgcctgagccagatccagacaatgcggattacaaattcgatgatgcgtggatgaaagccgtcacggctgcccagtccgtcgcatccgttgaaggggttgtcctggcggttgatgtgactgaaaaagcgaccatcaaccgcgccacagaaatgcgaacgaccttacaggctaaattcgggcgctttgtctggtttgtgctgtctgtgggtggcccggaggaagacgaatcctgggcggattaccagacgcgcatggctgcgcttgaaaacggtatcgcatcgcctggcgtccagcttgtgccgcgactgtggggcaacgaaccgggcgttctcgccggtcgcctgtgcaaccgtgcggtgaccgtcgcagacagtccggcccgtgtggcaaccggcgcggtcactgcgctgggcagtgacgacctgccgaaagacggaaccgggcaagaaattgatctggccgtcttgcagggattgcaggcaaaccgcttcagcgtgccgatgtggtatcacgactatgacgggatttactggtcagacggtcgcacgctggatgttgagggcggcgattatcaggtcattgaaaacgtccgcgtcgtggataaggcatcccgccgcgtccgtttacgcgccattccaaaaatcgcggatcgctcgcttaacagcacaccgggcagcattgcggcgcatgaaacctatttcggcaagccgctgcgcgaaatgtcgattgcaacgcagatcaacggcgtggagttccccggtgaagtgaaaccgccaaaagatggcgacgtcactatcacctggaccagtagcgttgcggtgcagatttatttgattgtccgcccgtatgagagcgcgaaggaaatcggcgtcagcatcgaactggatacatcactggagaatcaggcatga

SEQ ID NO: 133189 - DNA, 459 bp, Enterobacter cloacae
atgagcggagaacgcattagcggcggttcgttcgatgtgaactatgacggcgtcatgattcacgtcgaaaacgcaaccgtcaccattacggataacagcgccgtggcgcaaacgcgtggcgttccgaacggccacacaaagggatcggtgtcggcggatgtggaaatcgaagtcgattcccagaattttaaaaaattcaccgccgtggcccgcgctgccggttcgtggcgcggcatccccgcaaaggactttttgttctatgcgaacgccggagacgacgaagaaaaaatcgaggtgtttggctgcgttcccgcgttgtctgacatcgtcaacatcaaccccaacgaggccagcaaaaccacgaagaaaattaaattcatggtgaccagccccgactttgtggcgattgacggcgttccgtacctgtcagcccgcgacacccgcgatctgaaaggttaa

SEQ ID NO: 133190 - DNA, 312 bp, Enterobacter cloacae
atgccaaatggagaaacatcactgctggcaaagctgctgctgatcggggccgtgatcggcctggggcaactgatggtcagcagtgagcagatcacaacccgcctgctggtcgggcggatgattctgggggctgcggtggccccgctcgccgcaatcccgctgctgaaatttcccgatatgccggaactggttgtcgtgggcattgcctgcgccctgggcatcctggggagcgcctttatcgaggcgggtttaaaacgcctcgcggaatactggattaaacgatggggaagcaaacgccatgaaactgattga

SEQ ID NO: 133191 - DNA, 339 bp, Enterobacter cloacae
atgaaactgattgaaaaacaacagcttttcaccgtgatgatcgcaaatctgatccacttcgcggaggaaaaaggctaccgcctgacgtttggcgaggcgtaccgcacgcctgagcaggccgcgctaaatgccaaaaaaggcagcggcattgcaaacagcctgcatacccagcgcctggccgtggatttcaacctgtttatcaatggggtgtaccagaccgacagcgccgcctatcgcccgctgggcgaatactgggaatccatcggcggctcatggggtggccgtttcagtaagccggacggcaatcatttttcccttgagcataacggggtgcgctga

SEQ ID NO: 133192 - DNA, 381 bp, Enterobacter cloacae
atgcgtaatttgctggggttgctgctgatcctgattgctgccatgtcagcagggtggcaagcgcacgactggcacgacgcaaagctaaagctggccgccaacgaatcggcagagcaaacccgccagattgtcgccgaagtgacgcggcagtctggtgaagcgctggaagcaaaaatcgcggagctaaaaggtaatgagatccacacggaacgggaaattcgcaccgaaatcatcaagccggtatttagcaacgtttgcgcttctgatgattacgtccggttgttcaacgaaagtgcagatcgcgccgagcgagcattatcaggaaaaccagctaacgctttgcccggtgaatctgcccagactggcggggccaaccggtaa

SEQ ID NO: 133193 - DNA, 276 bp, Enterobacter cloacae
atgagtaagtctgattctaaaaaaattgtcctggccgttgcgggcgtcagcctgagctttgagcctaacaaaaccgcttacaacaacctgattaacgaaatgaccatgaccaacaaggttgcgccgatggtcacctatctgggccgcattgttgatgccgaatccaaagaggcattaaacaagctgatggaagattacccaggctgtgaaatgcagatcgttgagaaggttaacgaaatttactcgccgaaacttgagatcgaagtaaaaaactag

SEQ ID NO: 133194 - DNA, 2115 bp, Enterobacter cloacae
atgagtcacctggattttacgctgagcctgattgataagctgacgcggccacttaaaacggcccagtcttcgctgactggctttgccgaaaaatcgcaggcgtcttttgcaaagatcggcatcggcgcggcggcggtctggggtgttgcccagtccatcgcgggcgtggttggccccgcgtatgaaatgaatgctgcgctttccgaagtgggcgccaaaggcgtggcagaagacacgctgaaaaggctgtccagcgaagccctgaaattcagtatgcgctacggtaaaagcgcggttgatgtggtgaattccagctatgcgatgaaaggcgcaatgtccggcctgagcgatgcagatctgccacgagtgacagtggcggccaacaccctggcggcaggtgtaaaagccagcggcgaggaagcgggagaatatatcggcgcgatggcatcccgtttcaacgcggaactgtccagcctggggcatgtgaaatttgccgaagaactggccggtaaaacggcgtacatggtgcaaaacttcggcgtgaaaatgcagaccatgcaggagcttatcgaggggaccaaaaacgccggtgctgacttcggcgtcagcatggatgaacagttcgcggtgctgggtacgctttcacgcaccctgggcacggagtccagcggcatttacgagcagtttttgcgaagcgcaccggcagcggctgaaaagctgggcatgagctttgtagatgcgaccggcaaaatgctgccaatgggcgacatcctgcaaaagttgcaggacaaatacggggccagcattgaagggaacgtcaaagcccagcaggcgctggacgcggccttcggcggcggtgctgatgtcattaaaaagctgtacggccagcagaatgatttaaatcgcagcatcacagaactggggcgcaatgacggcatgaaacgcgcccaggaaatggccgaacgtatggcgaagccgtgggaacgcatcgtcgcgacgttttacgcgatgcgcgttgcgctgggtaatacgttgatccctattcttacgccgatgatgaaccgcgtcgccgacgtgggggcaaaatttgcccgctggctggagatgttccccaacatcgcccgctggctgggttatatcaccctgggcgtgctgtccttcgggctggccggtgcggcaactaatattgtgatgggcatttttgggttcacgatggtgggcctgagcgctatcgccaaagtgctgggcggcgcatggaaagccctgttatggacccttaacttgctgcgcccgtcattgctgacaacccgcatcgggctggccgcgctgtggatccagtcaaagctgttagccctgtggaccggcgtttgtcgtgtcgcgctggccgcctggaatgttgtgttaaaagccggtgcggttgccatgcgcatttatggtgtggcgaccatgtttgccggtgtggccatgcaactgctgaccagtccgatcaccctgataattgccgccctggcattgctggcgctgggtgtctggtatgtcgtgaatcactgggaggagctgaaagcggcggtaatgaataccgaggcttttgcatgggtgatggatgttgccggtcaggtgggccaggtcttttctgacgtctggaaatccatcattgaaggctgggattctgtggttgcgttcttcgccggtctttcacccctcgccacgtttgaaggattcgcggacaccatcggcggtgtattcagcaagctttttgacgtcctgaaaagtacgtttgcatccacctataactggattgcggaaaagctaaacaaaatccccggcgtcaatatcgatctcaagtcggtttcgccgccagccggggcgacggtaccggcacccactgttatttctgatggtgctgcaggtccaccaaaactaaacgcgccgtccttgctgacgggtaacacggtcaatgcagatatcccgcgcggcggcctgatggggcaggtaaaaaccgacagtaaaaccgttgtggatagccgcaagacgtggggcgatacctatatcaacgccccgaatggaatcaccccggcccagttggccgaatggcaggagcttaacgccggatga

SEQ ID NO: 133195 - DNA, 336 bp, Enterobacter cloacae
atgagtaccgaaccgttatacatcgaccttttgatcactgacggcgatttcacgctggacagtggcaacgagccggagcggtgcaataaccgcgacagcatagcccaggacataatccacagcattctggagagcggcatcaccacgcggctgattggtgagagaagcccgaccatgcgcggcgacgcgctgacccagctatcgctactggttgaaagtgacgaacgtctggtccctggcacgattgtgattacagaagaaagtatcacgcggctgtatgtcaccgctgaaacctacgatttcggcagcgttggcacggaggtgaattatgactga

SEQ ID NO: 133196 - DNA, 1185 bp, Enterobacter cloacae
atgactgagaaaccggaagttgatttcgaaaaagtcctgagtgacagcgggatgccaacgacggaagcggaaatcacagccgtgtttaaagagacggttaaggcggagggatttattaccaatacttcccgaatgtcaccgttctggcgtctgatttcgaaaattgtcaccacacccgtgctgtggttgcaggctgcgctaatcaatgtcgtcctgcgaaacatgtttgtggcaactgccacgggggcaatgctgcgcttgctcgcctgggcggtgaacatcactccaaaaccggcaagcgctgccgcaggggtaatccgcttttacaagacaaatccttcggacgttgtgatcgtgcctgccggcacgttgattcagacggagcgaatcaacggcgtgatctatgtgctggccgtgaacgaagacacgacattgggggcgggtcttgaaagcggtctggttcccgttacggcgaccgacaccggcagcggttacaaccttgcgccgggatattttcgtattttacccgtggccgttgcaggtatcgccagcgcagtgaatgaggaagactggttgatcacaccaggcgcagacgaggaaagcgacgacgagttacgcgacagaacgcgcaaccagttcaacctggtgggcaattaccacaccgatgccatataccgcagcatgattgcgggcgttgtgggattgagcattgatcgcatcttctttttgcatgacgccccgcgcggaccgggaaccgcaaatgcctacctgctactggatagcggggaaacgtcgcagccctttattgatgcggttaacgattacgttaactcccagggccaccacggccacggcgatgatttgcagtgctacgcgatgccggaaacgacccacgcgctggcggtaaaggtgtatgtggaaagcaaagaaaatatggagccggaagaactgagccagttagaaagcggggtttcagatttgatccggtgcgcattcagggaaaacgccaattatgacgttaaaaagacgtggccgtattcgcgttattccttttcgaacctgggccgggagattcacaaagcattcccggtcatagattcactgagtttttcactgacagatattgtcagcgaattatcggtcccgcgtctggcctccttatcagtggagatcctcaatgactga

SEQ ID NO: 133197 - DNA, 594 bp, Enterobacter cloacae
atgactgagtttgccagactgctggccgggttgaagttgccgtcatggatggaccgtggcgaccccgcgcggctgctgcgtgcctgcgtgaaattctggttgcaggtttacgagtggatcacctggccgttgaggcagttcgacccgctgacctgcgtcgagccagtgttaaacctgatcgcatgggaacgagacatcacccgctttaaaggtgagccgataagcctgtttcgtaagcgagtcagctacgcctttattaatgcgcagcaggcgggcgaggtggcggggtttatcgccatttttgagcggctggggatcgggtatgtcgaactactggaacgccaggaggggatggactgggacgtgattaccgtccgcgtcactgatagccagatagcggataacagcgatctcctgctggagattatccgcaagtatggtcgaacctgccgccgttatcagtttgaagtgatcaccgccctgccgctgcatatcaatattggatggtatcagggtgattatgtttgctggcctgcgaccctgggcgatgtgcaaaacgagttaagcgcgacatatagcgcaaggttggagtaa

SEQ ID NO: 133198 - DNA, 2034 bp, Enterobacter cloacae
atggctcagacagtcattacaatagcgttcaccgaatggaaagcccaacaggcaattgataatcagccggttaatctggatgaatttatttttgcctatatccccgatctggatgtgacaaagccggttgagaatacagagggtttgccacctgccgataaaatcgtccatcgccaggcggtgagcaaatcaggtgtggttaatgcgaattcagttgtgtattccgtcactctgggcgcggacatcggcgactttaatttcaactggatcggtctggcgaacaaagcgaccggcacgctggcgatgattattcacgccccgacccagagcaaaattaagaacgccagcgggcaacaaggtaacgtcctggttcgttccatgctcatggagtatagcggggctgagtcggcaaccaatatcaccacaccagcagaaacctggcagattgattttactgccagacttgcggcaatggacgaacgccagcgcctggagaatatcgatctttatggtgcggcggcgtttttcgctgacggttacctggtttcgaaaaccggttcgcagtttttcgtgacgaaaggcgcgggttatgtagcgggtctgcgttcagagctttccgcaaatcagaacatcactgtttctacgaagccggttaaggtctggctggatgttgcatggtcaggaacgttgaccagtgaatggatggtacagagtaaaattattgtccgcgataacctgacggattacgttgaaaatggtaaccagcattatgtgtttgccgtggcgagcatcgacgcaagcggcgatattaccgatctgcgtccaaagggaacgcttaacgatcaggcgttcaatgatgcgcttaaaaggcatgaacaatcgcgcaatcaccctgacgcaactacaactgaaaagggatttacaaagctaagtagcgccaccgatagcgattcagaaacggaagctgcaacgccgaaagctgtcaaagctgcgaatgacaatgccaatggccgcgtgccgtcagggcggaaggttaacggccacgcactgacggaagatatcaatatcacctcacaggacatattcagtgaacaggccgttgcaattggcaatgctatcgacctcaacaccctaacgaaagcaggactttactatcagggtgctgacgcacaggcagcctcagggaaaaactacccggaagccgctgctggctcgctggaaatatataaacacgcggggttaacgcaggtttaccgggtgtattacagctccaccacctatatccgcaccttttacaacggtacttggtcaggatggataaagcggtatgacgcggcaaataaaccgaccccgtcagacattggcgcggtatcggcatctggcgggaattataattctacattccgatttggtagcgtaggaaccgtgcctacagaaagaaatacggcgtcgcttgtcagcgcccagggtggtgctggaagtattgtctctggagttgcttttgaatggtacgataatgcgatggttctcggccttgtgagaggtgacagctataatacgctagggttcgctctttggctgggcaataagaacctttttaatattagccctaccgggaatgcaggactggcaggtaatttagtttctgatggtagtatttatgcaaattacttacaaacatccggggatgtgcgttctgagcgcaatatcagtagtaaggggataattgaggctgggggtggattgtttgatactccgggtgttcgcgtgtattcgccgaacaacatgcctccacagcaggatttaagcccttatgcaacgacatcctggactatagcgaatttcctgcaaggcggaatcagattagcttcaccgggaacggcagataacgggaataacgatggtaattttgcctatgcacctaatggcgcggtcgttactgctgtaatgcagaagacaaactatacagcggttcaatatcgttatgtccaatataatatcggcggaaactggtacacagcatgggtggcctaa

SEQ ID NO: 133199 - DNA, 609 bp, Enterobacter cloacae
atgacaatgcaatctggaatttttaaacaatatgacccattagagaaatggggtaaatataccccggcgaaagtggctaaacttacgccagaggaactcgaattatattacattgccaaatcaccggaaatgaatgtcgtttttctgaaagacgataatggtaatgactggtatcagtggcttaagacgcttacaaaagaaacgctaaaagtatcatttgatccggtatcaaaagaaatcgttcacttttcttatgacgcaagcgcaattttcccggttaatcagattgtcgttgaaatcgcgcctgagaatataccggaggaatttaccgctgcgggcgagaaagcattaggcggcgcatttctttttgatggtggggagatcattgccgcgcctattgattatgaggcagaggcagaacgtaaaaagctggagttattaaaccaggcgaataacgtgattgccacgcttcaggatgccgttgatctgggtatggcgaccgataaagaggaaaaaaacctgccggagtggagaaaataccgcgttttattaaaccgggttgataccaccaggcccgaatggccggagcctcccgaagatgtggcgtga

SEQ ID NO: 133200 - DNA, 723 bp, Enterobacter cloacae
atgtggcgtgattcggttatcaaaatcgccgacgatatggcggggttgagttgctcaatcatcccggcgcatccgtgggtttatggtctgggtcagtcggcagattcaggggggtatctgagtccggctaatgccctgggctatctggcggggaagctggcaaccagcagcgggagcggtgacgttatcgtgatgatgattgccgaaaatacccatgatggatttatgaaagccctcaacgggcttgccacggtatttcctgcacccgcatttacccaggttagccgcatggcggctgcggcggccgaacttagcacggttaaaatgcaactgccgtcgaaatccagttcgctgccggtcgccgcgccgctgtccgtcgcgacaagccgccttgcggtgaacgcgcagcgggttgccgccgcgcagctagctgccgctgtcagcacgacaaccgaagggctgaaaaaacaaattgccgaattcgtccaggcgcgtgctggcctgctttcttcggttagtcagtcgcttgaagacctgaaaggggccagcgcgaaagcctggtcattcagttacaccggcaatcacagaatggcggctattgaattactaaaagacataccgcaggcaaccgccgtgcatacagcggcaatgatgtttatcggtgattcgcttgcagatttggggaagatgataaatgagccagaccgcactactcgcgcttaa

SEQ ID NO: 133201 - DNA, 540 bp, Enterobacter cloacae
atgagccagaccgcactactcgcgcttaatggtgaagggatcgcgatgcaaaacatgctggtttccccttctatgcaatttcaggaaaaagaccagtcaggccagacatcgagcacgaccaattccgaacagggcatcaaggctaaagaattgcgcgtgtcgggcctggtgacgtttgacgacgaggcagttttacagcgccttttccagttggcatccgctacagaggccagcggagccttaaagacttatcgcgtcgccaatgccacggcaaccgcaatcaacttccgcgaagccacctttaccggtcagattgatgccgttccccaggaagaccgactcgcctggcaggtcagtttcacgctgcgggaaaaaaacagcgtgccggaaaaacgccaggcacgaaaaggcaacgcaaccgccagcacgaagcaaaccggcgcggggggtaaaggtggcgcagcggcagacgaaccagccgacaaaatgagctggtttgaagaaaaagtcctgaaacccgttaatgatgcgctggggtaa

SEQ ID NO: 133202 - DNA, 1725 bp, Enterobacter cloacae
atgaaaccaattaaacgccttttcctgtccagtgacccggtccacatggtggactgtaatatcgtgcttgagcaaaacgcctgcgggcgtggattcatcacggccagcactgaaatggattacaccggcaaattggttcgggtcgatgtgggttatgacgggctggtcctgcgctggttcaccggctatgttgagcggtcgcagcctgctgataatggcgcctgccggttgttcgtgcgtgagcttgtcggggtgttcgataagctgtggccgtgttcgttccagcacccaacgttacgccagatcactgactggttaacggagcaaagcgggttaaccgtcgcaccgcctgccggtgcggcttatgcggataaacctatcccgcactttacccacagcggaaccggctatcagctattagccagcctggggagggctttctcaatcaaagattatgtctggtatcagttgccggacggggccgtctttaccggcgcagcagagcatagcctttttgccggtaaacctgtggagatcccgcacgaatttagccaggcatccgcagccggtaattcaatggttgtgccgatgatccagagcctgcgccccggcgttgaggtcaacggtcagcgcttaagccaggttcagcttaacaacgacgatatgacaatcacctggttaccacgcaataaggcaaccggcaaaccactgcaaaaatcaccgattcagcgccagatagaaagcgcctacccggaactggcctccgggctgcatttgccaaaactcgccagggttgaagcgccaagcgaagtcgtttcagggggtaacatcgcggacccattccgaccccgttacgctgtggatctgcaactgctggatgaagacggcaacgcggcggccaacacgccggtttattccgccgtgccgctgccggttccaatggccggtagtgaatcgggaatgtttcagtttccgccgcctggcacgctggttgaaattggtttcgtagagggccgacaggataaaccgtttattcgtcagatcatgccgcaggggcataacctgccagcggttaagcctggcgaacagttacagcaacagcgcgatggggtatcacagcgcgttaccgttgccggtgactgggtgcgtcagactgaccagacgataagcgaaacatccatgacgcgggaagtgaccgcagatgatgaaaagcgaaagctggttgcccgtgaaacaacagtccaggccacggataaaacaaccgtgctgggaacggccacacttctggccggtgcggtaatgcatttaagcgagggagattacagcgtcggcacgtctggcaacctgacagtgacctgcagcaaggacaattctgtcagtgttggccagaacgtaaaacgcgacgtcggcggcatgatggaagacaacatccagggtaatgctgaaatcactatcggcggagcgcttaacgagaaaattgcaggcattaaaaaaagcgttgcagcagcgcagcagttgatcggggcgtccgttaagctgggcagcgaagaaaccaacgtcctgacgttgctgaccgacaccctggacgttgttcgcgaactggcgcagatatgtgcgacccatacgcaccccaacacgggagccagcggccaggcatcgcagttcaccggaaccgccgaaaaaacaaacgctttgaaagcaaaatacagcccccttattgcctga

SEQ ID NO: 133203 - DNA, 192 bp, Enterobacter cloacae
atgaacagagcctcaccagttgatttgaggaaaagcctcgaaatcgccaaccacctggcgcacatcggcattcgctttgtgccgatcccggtggcgaccgaagaagaattccagacgctggccgccgagttatcgcgacggcttgagcagatggcggttgaagccgagaagaatgaaggcggtgaagcatga

SEQ ID NO: 133204 - DNA, 528 bp, Enterobacter cloacae
atgaccgattttggaggatcgacgacgccacaagatgaaaaggactgctggcagacaccgctgtgggtattcgatgcactggatatggagtttggtttctggctggacgccgcctccagtgagcgtaacgcactgtgcgctaatttcctaaccgagcgggatgattctctgagtcgagaatggaactcgtacggcgcaatctggtgtaacccgccctattccgatatctcgccatgggtagagaaagccgctgagcaatgcatggcgcagagacagcctgtcgtgatgcttctccccgccgacatatctaccggatggttcagcgcggcaatgcagacggctgacgaattacggctcatcaccgacgggcgcattcagtttgttccggtaacggatggcggcaagcgcaaaagcaatccaaaggggtcagttctatttatctggcgtccgttcaccaaaccgcgacacatcatcacatctgtttcgctggcagaactgaggcggatcggagcaagggaggtagcatga

SEQ ID NO: 133205 - DNA, 171 bp, Enterobacter cloacae
atgatcaatcatcacctgctgcgcgccgcgcagagtaaagccgctattgccctgtttatcggtgatggcgccatgtggatggcagcctacgacgaaatgaaggtcgccatcggttatccgtggcatcggggaaagtcgaatcagcgtggaggtgagcatgcaatgggttaa

SEQ ID NO: 133206 - DNA, 909 bp, Enterobacter cloacae
atggctgagttgctggagttagagttcactgaggatatttattactctattggaaacaacccaagcattaaggaaatcatagcctccttgcagggctgggaatccctaataaagcagtccagaggtgttctttcagaattaacaggatctcacgttttagacgtggatgttcgagttagtaaactggaagttggatcgctgaaagaaaaattactcattagacttttctttgccaatgaggaagaattagacaaatttgttgatggtgttagaaccaaatatataggggaaggcaaagtgaggaacgctcttttgtgggctgtcgttatcgcccttgctggcaccgcttttctttccttggccaagctcatggccccgaacactacttctcattttgaagccaataataatacgattatcaatattggcgccggacagacagagattacgcctgagagaattcaagcgatcattgatagtagcgtcaccgataaaaaggtactagccaaaagcgctgtcaaaattctctctccagcaagaaacgatgagaatgcaactctcgtaattgggagtggggacgtaaaatatacgatacctgctgaaactataagaaaggttcccactgacgtggagtttcccccagatacatacacccgagatcacagtgatgtcgaccttgagatcagggctactgacttggataaccctgaaaaatgggctgcagtgataccaggtttggttgacagaagagtgaagttagttttggctcctggcataaacccggatgaaataaaaagaatttatacagccagagctgacgttactattacgtataagcatacgtcctctaaaagcaacccatatcagccatccgagatttttctcaagtctatcatcactgataattga

SEQ ID NO: 133207 - DNA, 693 bp, Enterobacter cloacae
atgaaaacgacacttgctggaagactgaaagaagcacgcgcggcacgaggcctgacacaaaaggcgctcggggatctcgtgggtgttagccaggcggctattcagaaaattgaaacaggaaaagccagccagaccaccaagcttgtggaaattgctaacgcgctcggggtaatgcctgattggctcagctctggagaaggggcgatgcttaatgacggaaagcaatcaggggcagctttattaactaatgcagcttcggacgtattccgcgtagacgttctcgacctcactgttagtgcgggaccgggatcattcatgatttctgagtttgtagaagttctgcatgctattgagttcacaaatgagcatgcccgcgccctcttcggcaatcgcgcacagcatgatgtgaaggtgatgactgtagacggtgacagcatgtgcccaacgattcagtcgggagatcgcctgttctttgacgtttcggtgaggaacttcaaggttgacggagtatacgcatttgtctttgggcagcacttccatgtcaagcgcctgcagatgcagggcctgcagttagccgtgctttcagataatccggcttacaaagattggtatgtgacagaagaaaatcaggaccagctatacatcatgggtaaagcgcttattcacgaatcgatagcttacaacaaactgtag

SEQ ID NO: 133208 - DNA, 198 bp, Enterobacter cloacae
atgaaaatcgaagaaatcaaaaacgttgcggtgctcttcaatttgaacggcaagacagtagcgttacgaatggatgctgagcagaagcggatcgtcgcattgatggcgctgaacacggctgatgctcgggcagaactgatcgaagtgccgcacatgactttaccagcagacccagccatgcaggaggccgcccaatga

SEQ ID NO: 133209 - DNA, 309 bp, Enterobacter cloacae
gtgacaatttcccatgaaaggctcaaagaagttgttcgtgattttgggcgcagacacatcgcgtatcacatggctcgagagcttcaggagatataccgaaatggcccgcttcccgtctggaatgatgcatccgaaattaaacctgaaagcaacgggctttacctgatgctgacggattatggggttgcgattacagcttgctacgattgtgaatctgacgagtggagaggtagtgaaggagttattgtgaaggctgccatgtggatggatatccccccattaccggcagagagaaaactccatgcataa

SEQ ID NO: 133210 - DNA, 177 bp, Enterobacter cloacae
atgattattgaactaaccaacaatgcaggtcatcctgtttttctcaacagagatcatatcatcagctttaaatcaaacggtcactatacggaaattgtgttgactaacgggcaaacggtaacagtaaaagacaaaccatcaattatcactgatcagctcaacaaatggccgggttga

SEQ ID NO: 133211 - DNA, 456 bp, Enterobacter cloacae
atgattctccccaaagacggcatcaagctacaccgtggaaaccttggcgctatcactcagcacctgaaacctctcctcgaaagcgggaagtgcttccgcctgcagctcaaagactggcacgagaagagaagcctttctcaaaatagcttgagccatgtctggtacaaggaaatcagcgattacctgattaagtccgggcgaactgacgccactcctgcttgggtaaaacgtaacctcaaaaagacctatttaggttatgaagaggtggagtacaccgatttcatcaccggaattaagacgattgaattagagctgcgccacacgtccgatctggacactggcgacatgcaccatttcatgtgccaggtggaaggctggtgcgctcagtttggcctggtgctcaccatccctcaaagcagcgaatttcaggtgctgcgcgataagcaggaggcctga

SEQ ID NO: 133212 - DNA, 213 bp, Enterobacter cloacae
atgataaagccagttttcggcataggtggcccgctgacggacgccgattttaacgctatcaggatgagcaagaagcaggcacaacacgcggctgacaggctagcaaggaagacggtatctgatgggctatccacttacgcaaaaggattcgtatttgatgcaggtgagcattaccgaatttctgtgtgcgtaactaggccgagggcgatttga

SEQ ID NO: 133213 - DNA, 318 bp, Enterobacter cloacae
atggctaaacgtatgcaagataaagaaagcattgccggagtgtcatggcttattgtccttgctctgtcatgctggggcggcctggtccgataccttattgacgttaagcagaacaaggccacctggagctggatcaacgcactggcgcagatcgcagtgtccggatttaccggtctcatcggtggcctgatcagcgttgaaagcgggctgagtctttacatgatcctggttacgtctggtattagcggggcgatgggctcggtggcactgacctatttctgggaacgtttgacggggatgaagaatgcaaaccagtga

SEQ ID NO: 133214 - DNA, 621 bp, Enterobacter cloacae
atgaacagaccacacccaccagcgcattttacgatgccacctgacccgaagccgtacatcagcattatgcccgctaatgacgttggcgagtggctgaatcagcacatcctgagcgatgagggtgacctctacaaccctgatcaccagcatttgcttgaagcggatctgtgctttctctgggcgtcgaacgctttcgagaagaaagggcgttccgtgctggggcaggcggaagaagtggcaatgcgggctggaggctggcagaaagcgcggatggagcagcagatgtatgagtggttcggcagggtgccgcagttcatcatcacgctggcagccgattactgctcgcaatgttccgatctggaattctgcgcgctgatagagcacgagctttatcacatctgccaggcgacagatgaatttggtgcgccgaagttcacgcaggaagggcagccaaagctgaagctgcgcggtcatgacgtggaagagtttgtgggcgtggttcgccgttacggagcgagcgccgacgtgcaagagctagtggacgcagccaatcaacctgcagaggtggcaaaaattaacatcgccagagcgtgcggaacgtgcatgctgaaactggcttaa

SEQ ID NO: 133215 - DNA, 456 bp, Enterobacter cloacae
atggctgcattaaaaccggaagtgaaagccgccatcgttcaaatgcttgcgtgctatgacagcctgtcgattgttgtcgaggctatccaaaaggattacgggataaaggtcaccccgcaacaagtcgaatcgcacgacccaacgaaggtcagcggcaaaggtttggctaaaaaatgggtcgacctgttcaacgctactcgcgaccgcttcctcaacgagatatgcgacatcccgatcgccaataaggcctatcgtctgcgcgtactgcagcgaatgtcgatgaatgcagagaacatgaagaacatcggcatgaccgcgcagctgcttgagcaggcggcgaaagaggtcggtgaagcatacagcaataagcagaaggtcgagcacaccagcccggacggaacaatgactccgcagccgaccatcatccagttactccccgttgagccgaaagcatga

SEQ ID NO: 133216 - DNA, 291 bp, Enterobacter cloacae
atgaatattagaatggaagataacattcacgtagtcgatttcccgaaacacggtggcggaggtagcggaggagatgacatgctagagaagcgtgtaaagaaactagaggatgatctggctggcattcggactgatatagcagtcataaaatcaaattatgcaaacaaagaagatgtcgcctctttaagagctgagttacaccaatctatttccgctcagacaaaatggttagctgcgaccatgattggtatagccggccttgccatggcagttgccaagctcattttctaa

SEQ ID NO: 133217 - DNA, 405 bp, Enterobacter cloacae
atgcatatcgacataccgggcgctatcaatgactatttcacagttagtggttcggaagaaaaaacctataaatcaaacagaagcagaataagggcgcttgttgaaatacgggaccagaaaattcagcaggtgatcgctgatgggggaaacatacataccgcatccttagatttacaagatcaggttagtgactttttttctgaagctccggttgaagcacaagttgtgctttttgaaacgctcgctgaagagatgctagcctcagcatcagcaataaatgatgaaactaccaaactcaacgctcaagtcgcatcaagcgaggcgacaggtcatgcaattggccagtggataggcgctggtattttgctggtgttccttctttttatgttcggtttattaaaatag

SEQ ID NO: 133218 - DNA, 279 bp, Enterobacter cloacae
atgagcttcttaagattcaaggtgatcgtcagcgcgccattgctaaagccaggatggagacttcaaaggtcactgacaaccctaatcagattgcatctgccgagcgtctggctgcagaaaattacgatctacaggaagctgaggaggcgcgacgcaaagcgcagcagcagagtgagcagcagggtaaaaacgcagccaaccagcaggaagccgttgcccaaaaacttgccaatcttaagcagcaaacagacctcgcagccgattctacaaaagaactaa

SEQ ID NO: 133219 - DNA, 126 bp, Enterobacter cloacae
atgctgctgctcgatacgcagagatgtttcgttgaattgctcctgacttatcttcttggcggccagagcggttttaaggtcttcaacatcctgtttgtagctagcattctctttggcttccggtag

SEQ ID NO: 133220 - DNA, 555 bp, Enterobacter cloacae
atgaagcagcgtggtttctcactgactgaagttctgattgccacggcgattagcagcctcctgctgataagcgcatcgcgttttttacccggcttgcagcgggcggtcttagcgcaatctggccagagacaactggaggaagaggtcttgcaccacctgtttgccctgggcaaacagctccagcgtgcggggtactgtgcgggaaactgtcagggacaggcgctggtgaccgccaggcaaggaagttgcgtcattgtgcggtgggatgccaacagtaacggcagctgggataacagcgcatcagaaaatgacagcaccggttttcgactggagtctggtgcgcttgaaactcagcgtggagcgacctcatgtgaaggaaaaggatgggaaaagctcacggacccggacaggctagggatcgcgcaatttgtggtgaggacagttgaacatgccggttttgcgccagaggtgaatatcgaactggcggcgattcgtaaaggcgagcagggggaaccctggcaggcgttgtatacggtcacggggtacaacctgtga

SEQ ID NO: 133221 - DNA, 486 bp, Enterobacter cloacae
gtgaaaaagatagccatcctcccgctttaccaggcaccgcactatgcggagcaggtcaccgactggctctggcaggcctttggcgaagggctttcccgggaatttttccacagcattattgagcacagccagacgccgggagcattaccgctgacctttatcgccgttgaagacgaaaagcttgttggtacggtagggctctggcgctgcgatttgatcacgcgtcaggatctctttccgtggctggcggcgctctacgttgacgacgcgtcgcgaggcaaggggctggcaggaaagctacagcagcacgttattacctgggccgcgcaggcgggatatgaagaactgcacctctggtctgcctgccgcgacttctacgaacgttacggctggcagtatatcggtgatgggctggaataccccaacacgcgggttcacctctatcgttattcgctctgcgcttccgcaggtgaagcaacggagtga

SEQ ID NO: 133222 - DNA, 270 bp, Enterobacter cloacae
atggaagttaaaaaggtttcagtagaagactatagagcagatatggggttgatacgggggtatagtgatgattctcaagagatccaggaagtaaaaaacttttattatcaagagtctgtcaggcagttaaaaagctttaagaatggcattgaaatacttaaagaagatgaaaacaagaacattcttgtgttcaaagtcaatgaggatcttaagtttcaattgactcttttgaataacattaaatacttaagtgttgtgaatcgccactga

SEQ ID NO: 133223 - DNA, 360 bp, Enterobacter cloacae
gtgcgtaatcttcgtaagaaaggggatgacgaacttaatgccgcagaaatgcgtaatacgctgattgatttgcttgaagatttggtagaagtaaaaagtgagttcgtcagcctcaaagctgttttgttgagtaaagaagaagagatacaatctctcaaagcccaacttgatgggaaaaataagcttcagtttgacggcaaactatattggctggaaggggataaaaccccatattgcacaaaatgctacgagaaagactcattggtattccatttaaactttattcatgctaaccgtaactggaatagtagtgagcactggcattgcagaaactgtcaggcaaactattatctaagatag

SEQ ID NO: 133224 - DNA, 2124 bp, Enterobacter cloacae
atggatattattaggaattcagtctggctctctcaaggcactgatttgcttgcagagggactttaccgtgttttggattttgacagaaaggtcgatttgttaattttgtttaaaataaaatcagaaagaacgggtaagccaatccctttctcattttcaatgtttaaatattatattgaatcaaatagcataacttgtaaagattatatatatccttcatatatgttagtagatgagaaagaaataacagataaagacagaggaaggcgagatgaaaattacaatatcattaaagatcttgtagatgacagaatgtttctgttcgactatgcattacataaaaagtcgcaccttttaatggattactccagaaataaaaaaatatcacaatatactatcagaacgcttctggcgttgtattggcgacatgggcaggatatttatgcattgctacccgcattctcgaactgtggcgccgctgggaaaagtagaatcaaacatgaaattaaacttgggaattccaaaaaaaacagagcattacctaatgaacgatcacgtgttttcattcttaatgaaagagatataaataatattagaaaatctctcattacgtatcattataaagttaacggagatacgataaagaaaacattagagagacatattgatttgtattttagggatgaaattaaaacagcaaacctagaaaatagagctccatatgttccttctttaaaacaattttcatactggaataaaaaactcttcactaaagatttctcgataaataagaagaacacgaaaaaagaaatagacctcaaaatgcgggcgcttttaggtagtgtggctaatacaactgttttgccgggtgatgttttcgaaatagactcaactgtcgctgatgtacatcttatttcgagtttaaacagacgaaaagtcattgggcgtcctactatttatacagtggtggatcgtgcaacaagaatgattgttggccttcatgtttctttataccatgcttcatggcgagccgcccgacaagcgttagcaaattgctttatgccaaaaaaagaatattgtagattatttggaatctctattactgatgatgattggccttgttctcacattccattaacattgatgtgtgacaacggggagatgattggtcttaaacctcaggaagagatgacccccctgacaaaacttgagtttgcgccagtcggtagaggcgacagaaaaagcattgttgaacgctgtttcggcattctgaatgatgaggttattcataggcttattggaacaacacgaaggggaaagattgttaaaggagagccaacaccgcaatctagggcttgtttaacgattcaggaggtcacgtctttactgattcgggagatacttgcacataatcagagaacgtatgaggaactggcttatatcaatcccttactgattgaaaatgatctcgtaatatcaccaaaaaatagttggatgataagcttaaagcacgggagattcagcgcaagagccgttggggccgacgaagtgatcgcacgattgttaatccctgtgaacgctaacattaccgccggtgggattcagtacaataatcttttttatgaatgtgatcctgaaattgcatcaggtgtcagagtatttggaagaaccacttgtgaagcaagaatagatgacaattgcgtagattatatatatgtaagatttgacaaaaatagcattttcaaaaaacattacctacttaagaaaagagatgtatttaaagggaaagctcatcttgatacagatgtaatggctgattgggtagatactcaaaaagaaattaatttatttactctggattcgctcagcaatatcaataataaagatgaatttaacaggaaaggtaacgaaagattaaatgaaatatacgaatctcgccgggtacatggtaaagatattaaaaagaacaggaaaaatgaacttgattcattagggcgaactcatgttgctaatggaagatctgaacccctacttccttcatccagtaatgttctgcttttgcctggccgggaggagaaacaaagatggttaaaaggtaagaagaagactgaggacgcagaataa

SEQ ID NO: 133225 - DNA, 408 bp, Enterobacter cloacae
atgccattcaaaacggctattaaatggattcatcgccttgttaccgcttcacttctggttctggtcattggatttctctggttaaaccatcagcccaatcagcgaaatagcgatgagctacagcgcgcttataaattatccgatagcgtctggctctatatgaccgtgaacaatcagggcggcacaaccgtaccaccaatctaccgttattatctctcgggggcgcttgcagggaaagacactgatattatccatcagcttgctatgaagtatccggtaatcgaaggtacaggcacgataacctcggccagtattgatacaagcggggaagtgaacattgcctatagcggaaaggttatttcgattgagaacaatatctccagtctccggttctcagttaagccctga

SEQ ID NO: 133226 - DNA, 2124 bp, Enterobacter cloacae; identical to SEQ ID NO: 133224

SEQ ID NO: 133227 - DNA, 987 bp, Enterobacter cloacae; identical to SEQ ID NO: 105543

SEQ ID NO: 133228 - DNA, 849 bp, Enterobacter cloacae
atgtttcacgggttaagcgcgtttccgttaacgcccctgaaagaggggacgtttgacgagcacgccttcatcaatcttctgcgccccgtggtcgacgctggcgtggattcactcggcattttgggctcaacgggaagttacgcctatctgaccgttgaaaagcgcggtcggatcgcacgctgcgcggtggcgcatgctgatgacattccggtcatcgtcagcatcggcgcattgcggctggacgatattctgcgtctggctgacgacgcgcaatcggcaggagtctccggcgtactgctggcacccgtgtcgtaccagcgattaacggaagacgaagtgtttcatctctatgagacggtgacccgccagatctccgtaccgctgtgcatttacgataatcccgccacgactggtttttcgtttagcgatgaactgttatttgccgccgcggccctgccgaatatagggtccataaagcttggccgcgtgccggaggacctgtcgcaggtacgcgctcgtcttccggataccgtcacgctgggcatcgccggtgactggcgagcggcctctgccctgcaggccgggtttgacgtctggtactcggtggtcggcgggttgtttccgcaaacagcgctggcgattgcccgttcgaaacagtcggcacaatccgagcggctggagccgctttgggcgctgttccgccattatggtagtttgcgggtggtagcggcagcggcagaaatgctggggaaagtggaaacgcccgcgctacccttcccccttcaggctattcagggtgagccgcgcgaagcgcttgctgcgataattgcggatctggtgctggcctga

SEQ ID NO: 133229 - DNA, 1293 bp, Enterobacter cloacae
atgcgtaaaattaaagggttacgttggtatatgatcgcactggtgacgttaggcaccgtgctgggctacctgacgcgtaacacggtggcagcagcagcgccaacgttgatggaagagctgcatatctccacgcagcaatactcctacatcattgctgcctattccgcggcttataccatcatgcagcctgttgcgggctatgtgctggacattctcggtaccaaaatcggttatgccttcttcgccatcgcctgggcggtgttctgcggcgcaaccgcgctggcaggcagctggggtggactggcgctggcgcgcggtgcggtcggtgcggcggaagccgcgatgatcccggcgggtctgaaggccagctccgagtggttcccggcgaaagagcgttccattgcggtcggctacttcaacgtgggctcgtccatcggggcgatgatagcgccgccgctggtggtgtgggcgatcgtgatgcacagctggcagatggcgttcattatctctggcgtgctgagctttgcctgggcgatggcgtggctggttttctataaacacccgcgcgatcagaaaaagctctctgaagaagaacgtgaatacatcattggcggtcaggaagcgcagcatcagaccaacaacggcaaaaaaatgaccgtctggcagatcctgggcacccgtcagttctggggtatcgccctgccgcgcttcctggctgaaccggcctggggtacctttaacgcgtggatccccctgttcatgtttaaagtctacggctttaacctgaaagagatcgcgatgttcgcctggatgccaatgctgttcgctgacctgggctgtatcgtgggcggctacctgccaccgctgttccagcgctggtttggcgtgaacctgatcgtttcccgtaagatggtggtgaccatgggcgcgctgctgatgattggcccgggtatgatcggcctgttcaccagcccgtacgtcgccattgccctgctgtgcatcggtggctttgctcaccagtccctgtccggcgcgctgattacgctctcgtctgacgtctttggtcgtaacgaagtggcaaccgccaacggcctgaccgggatggccgcctggaccgcgagcaccatgtttgcactggtggtcggcgcgctggcggataccatcggcttcagcccgctgttcgcggtgctggcgatctttgacctgatgggtgcagtggttatctggacggtgctgaaaagcaaatcggcagaggaggggtcggttccggctgagggcgaaatgacaccctaa

SEQ ID NO: 133230 - DNA, 1164 bp, Enterobacter cloacae; identical to SEQ ID NO: 31753

SEQ ID NO: 133231 - DNA, 777 bp, Enterobacter cloacae
atggcaatgaaagcaacctttaaacctgatacccctttaacccgtgacaacctgatcgcatggggttatgaatacgacgagagcgtcccgtttgctatcgtgcgtgacgttaaacagggccgtggcagaaaacacggtcgtaaagctgtgggcttcattgccagaggtaaatctctggtgcgtgttcccaactgtggggacgtccccgcctctgtaatcgcttggattctccacaatggtgatatcccagacggttacactatagcgcttcaggacccggcagacagtcgcctgagcaatgccacactgatcaccgtagagaaagccacagaacgccgtaaagcggcccgagtggcctctgccagtggcacccgtagtaagtccactctccctcgtggaattgtggaacgtgtccccggctattacgtcgcctcattcatgcgtaaaggcaagcggacccacaaggcgggccgggatctggaatccctcaccctgtggctagtcaaagagcgtgatggctttaataaaccacaattgatacatttgatgtgtatcaatgaagtttctttggtgtataatgaggtagaaatcatatggaggttctctatgaaacacactccaacccaaaaagaaattgttgcaatcctgaatgagtctcgtaaagcaggaagctttcatttatgtggttcgcgtgaagaacgtaaagctcagttgaaagcccttcgttgtcgagattttttgcaagaagggaaaagagttggcgacacaaccctctaa

SEQ ID NO: 133232 - DNA, 177 bp, Enterobacter cloacae
atgaataacgataagtctacccacccgaaacgcttcccatatggtgggcgcatggtcaccgcttaccctacatacatcataattgatggtatccggataagccgtacccgtctgtcatttgcctttcagttggagttagcgaaagcttttcgtgtgtatacatcaggaaaagaataa

SEQ ID NO: 133233 - DNA, 567 bp, Enterobacter cloacae
atgaatttcgtagagggttgtaaatcagttcaggaagtgaaagcggtagcggttgagctactcaaacagggcaaggggctgacgctgtaccgtgacgcctggttattaggttatgaattaatgctgagggtgtcggatctgcgctctatccgttatgacgacatcaaaggcgatcaccttgtcctgtcccaacagaaaaccggtgaatctgtccgggtgaggcttaccgataccgctaaacgcatcatagcggcccggagagaggcgaaccctgatcatgtgtacctcttacagttggacagccacaggagcaagggaaaacctgtgagccgctccaaattgcatgaggaaattagctacgccggggaaaagctggggctgaatctttcgacccacagcatgaggaagagtaaaccaacaattggttatgacaatggggaggatatagccgtaatcagtaaggcattagggcacaaatcgttatcaagtacgctccattacattggggccacgcaacgcaaagtagatgattttagtgataaatattcaatagcggatctgttatga

SEQ ID NO: 133234 - DNA, 2115 bp, Enterobacter cloacae
atgagcggtaacgtgattattaccaagaccgtcaatagaacagtttttactgtagattcagcgagttacagaaagatcgttgaccgtatcaaacaggtggggaaagagtgggataaagtctcctctaaaatgaagcctctacggatgaaatttgaggaaaacgcctacaccaagatccgccggaaacagcaggacgccgccgcaaaagcagcactggcagaagccaaagccaaagcggcagcagaagccaaagcagccaaagcacagatcgcagcggagcgcaaactccagacaatccgagctaaagccatccgctttaataccgcagcggctaacgccaacgtgaccccggcccaacgtgccggacaccttcaggagtttggacagcttacccgccagtatcacgccgggtctatggcattgcaggaatataacgcccgtgtgtcacgccttcagcaaaccatgcgccaacaaggccgggtaggcatgaggggagcaacaatcccggtaaccgccaaagtaaacaaactggatacctccatgatcgagggtgcaggcggggcgatcaccttagcggctaccgttgcgctctccggcaagatcatgaccaccggacaggattttgaatccgctatgtctggtcttacagcgatcaccggttccacagagaaagccgctaaagagtttgagtatctcaaagaacagtccaaccgcttgggtttggatttgcttaaaacatccaaggattacacacaatttgcggcctctgttggggataaactccctaaagaccagatgcgatccatctttgagggtgccagtgaatggggccttgtaactggtgcatccgcagatgagcaatcacgtgctttgaaatcgctcaatcaaatgatgtctaagggaacggtaatgagtgaagaactcaaaggccagttgtccgaagctctccccggttctgtgggtctgttcgttaaggctcttaacgacatgaaaggcgttaccaacctgacagagaaagatctgtttaagttgatggaagacgggaagctgttctctaaggacatcctcccacacgtggctaaacagatgaagggagcggcccggaacggcggagcacttgacaaggctatgaagtccaaccgggcatcatggcagcgcctcaataccagtatgcagaacgctatgaatgttttctttacttctggcttcggcaacgaattaaccaacgctttcgactcaatcagcgccgctattgacgggtctggaggagcctttgagatgttcgggcatatcgccgggaagattgttgaaggtgccacagatgcgtttacagagttgcatgacactgtgatcctgaccttccgcattattgagtattacgccgccaaaatggggatcagtggggagcagatcaaagcctggggggaaatggcagcatacgccgccggggtggctttgttcgctggctctgtttacaagttgggcggggctttcaagtgggttctcaccatgctgaaccctcttaccaaactgttgggagtcatgaaggggatcgccgctattggtggcattgaagccgcttctgaagctctgggggacggtaagccaggtaaagacggtaaaccgggcaaacctgggaagaataccaaaccgatcggcgcgggccgtggcgttaactttggtcttccggcagtaatcgccgctgtatctctgaatgaccgccttgatcagattcaggcagacccggaagcgtttaagcgcaacgtgcaggagaatagagaccgtccaaccttgtggaccgacatcatggaggctttctccggtagttggtacgaaaagcagcagaacgcaacccagcaggcagcacagaccgcagcactcgatcagactgttcgtgttgctgtcccaaccttcaccccaccagacgcagcgacgctaaccaaaaacgggtatggaaatccactgatggccccgccagcgtggctaaaccagccgcttaacgtgaacgttaatgtgaaggtgcaagacggacaagtgaaaaaccttgtgcaatctgagattgaacgtagtgaacaggcggcatttaacatgcttatgcagggcgggcctaactaa

SEQ ID NO: 133235 - DNA, 375 bp, Enterobacter cloacae
atgcacccctttgaactactgaaacgccagcttgacgaaatggcgaaatcccgccaggtagagcaggccaaagaggaagccgccgcccgtgaactccgcaaggcacaggccgatctgtcactggatgaggctatcgctctgtacggtacacagttggaagcctccacagaggccgcagacagcgcccagaagggacgcaccattaagagccggggaattgctctgtgtcacaaggatcagggctacagcgccaacggtcgcccggtctctctcctgaccaaatccgcagacctgccagcaggtcaccgccgggtaatcatcaacaaggcagcagggcgcaccctgaaggctatcaatctggaaggggctgaataa

SEQ ID NO: 133236 - DNA, 567 bp, Enterobacter cloacae
atgaataactttatcaccactaaattcaacgccttaacctctgaagaggaagccgcagtaaatgcactggcggagaaattagcagcaaacaagccccgtcggattatggatgagagccatttaaccccggatcaaatcctgaagatcaagcgggcctgtattcagggccacagcgctaaagccatccaagcggcctttaacgtttcgttggcctatgtgctgagagtaaagcgctcccacaaccctatgaagtaccagaagaccccgctcaccttgccagaaaaggcagtgttggcccagcagatggacgccgataatttgagcgtggataaaatggcggaacttctggggatcaacagtaagatggtctccctacttcttacccaaccttcaccctattacctggtggagcaaatgctcccgtatgaccaagttttacagaacctccgcagcgcccgctacgtggaaagccctgtatacaaaaaagggacgagtatgcgccgtgtgcgactgatcgtttctgaagctcgtcagcaggcccgccaggcaatcattaaatcccggtaa

SEQ ID NO: 133237 - DNA, 666 bp, Enterobacter cloacae
atgacagcagccgcagtaaataaatctggttttgtaatgttggaaaatgacctcctgaatattgagaaggtcgccggaaaaactttcaccgggaacatgaaaatcacttacagcctgatccaaggctttgagaaaaacgggcagatcgcctatttctcccgcgccactctggagcgttatctcggggcctcccgctctactgtgaagcgacttgtaaacgagatggtagagatcggactgatccaaaaggtggagagaaagcagggcgaaacgatagagtggcgcacctgcccgatcaccccggaaatggtgggaacccctgaagccgccaaacctgaagtaaccaaaccaaccgcagcaccccgacccgtggagaccgtagagaatgcaggaagtaaccagcctggaattgttaagtgtggatctgacagcgtacatagaagccgcccggcgtcgcctggagcttctcctgtggaccacagcgggggcgctgttcgtcccgcttctgtccctgtgccagtagagcagggggccgcaaacgatgatttacgcaaccctgttattaattttgtggctggctctaatgtgatgatggtcaacggcttgcctgttgaatatttggagccagaagaaagcgccattgatcagtttggtgatgctttctaa

SEQ ID NO: 133238 - DNA, 426 bp, Enterobacter cloacae
atgagtatttaccttgatgttgaaaaaatggttgatcgtgtcgatcagcgtgatttgacccgtaagaccctgacagaaacccgtagccgaatgaaagccgccggacgtatgagagaagtagaagcgattacgcaggcacttgaattgaccaaatccagcgcctccggcgttatgcgacagtctcaacgtatcgcggcaaaggtcaccgagatggacgcagagaaagcacttgaagttaaagcagccgtttcgctgttcgcttccaagtctacagacatgcaagcctccatcgtgatggcgttccaatctctcttcgaagctaaaggcgtcccgatggaatatgacgaagtgatggcctttatcatgctgcaagcggcggatcagtttgagcgtatcaccggagagttgcccgttatcgttcactaa

SEQ ID NO: 133239 - DNA, 261 bp, Enterobacter cloacae
atgagtaatcaactaataaaaaaattgtccgaagatatggcatacgccatccttgaaaacaaagagatcaagagtgttgttcagggggttctggtcttttcgtcttgtgtagatggcggcatgattgtgacttctggtgatcctttgcacattaaatgctcacaaggtgaattcgacataccattaaacggtcgttcaatgtttgaggcattagttgaggcattcgagaaaacctattacgcccctcttctcagcaagtag

SEQ ID NO: 133240 - DNA, 639 bp, Enterobacter cloacae
atggaagatgttgtttatgttatcgatgatgatgatgatgcatataggctgtttgtggttaaattgttaatggcgaaaggttatcaaacttttgacttcaaaaatgccgaagaatttctctcctgccccatagttgatcatccctcatgcttaatacttgaaattaacacgccagacactaacggtttcgatgtgatagatgccctgaaggaacgtggctgtacaataccgataattatcctgactatgacaagctcaatcccactctgcgtacaagcgatgaaagcaggtgttcgggactttttgactaagccagtcgaaccggaacaatttatcaatgtcgtgaaagatgtgctaatcgaagcgactaataattttttagagcagcaaagaatattcgagctttgtaaaaactatcaggcattgacacggcgcgagaagcagacctttgagttggcgattaacggcctgcaaaacaaacaaattgcgtctgaactgggcatatcagaaattaccgtgaaggtccaccgacgcagagttatggataaaatgcaggtgcgtactttagctgatttggtccatgctgccggtacgttacaaattggtaagtcccgatgcccgccccggaaacgttattaa

SEQ ID NO: 133241 - DNA, 210 bp, Enterobacter cloacae
atgaaagagaatatcgccgttggcaaacgggatgatttcggtatcacctgcacgtttatgtcccgcgccggtttcaaaatggccgtgccatcgttcctgggtatggtcataaacgtgcagaatgacctcgacaagtcctctttgcggacaattaaggcgcaggaaggtagaagagaaattcagggacagcgcatggaagggaatcaataa

SEQ ID NO: 133242 - DNA, 591 bp, Enterobacter cloacae
gtgagtttgataccctttctgttgttcgcatttgtcgcctccattacgccggggccgaccaatattctcgtgctgacgaacagccagcactttggcgtaaaaaataccgtacctgctattctgggcgggtgtatcgcggccagtgcgatcgtgctggtatccggcgcgggcgcgggggaagtgctgcgtcagtaccctctgatacgtcagataatgagctggacaggcgtgctgtggctaagctggatgagctggcagctgtttcgtgccccggctgcccgtctctccgctgagcaccgtatccgattcaccgctcaggcggcggcgctgctgcagatcgtgaaccccaaaacctggatgatggcgctggccgtcgtcagcctgtttacgcctgctggcgaccatgcattgcgggatattgcgctaatggcgctatggtttctgctgatctcaatagtctgcttgatgtgctgggcgtggctgggtaaagcggtgaaccgaatttttcgcaccaccgtggcgatggtgcggtttcagcgtctgatggcgctgtgtctgctcatctccgcctgggcgggcatgctggcttag

SEQ ID NO: 133243 - DNA, 474 bp, Enterobacter cloacae
atgttaaccaccctcctctttttgctgatctatttttcgctgactgcctttcttgtacatgcggatattcgctacggactgcttcccgataaatttctctgcccgctgctatgggcgggcctgctcttccagctctgtgtccaacctgattttctgccaagtgcagtggtgggtgcgatggctggatatgtcggctttgccgttatttactggggatatcggtttatctgccggcgtgaagggatgggatacggcgatgtaaaatacctggcggcgcttggtgcgtggcatggctggtgcatagtgcctacgctggcgttactcgctgcgcttatggctctacttagcattcttgtgttttcgttactcaccggcgataagggagcattaaaaaacccactgccttttgggccatttctggcagcagcgggtttatgcgtaggctggaagacggtggttactcttccactttaa

SEQ ID NO: 133244 - DNA, 1422 bp, Enterobacter cloacae
atgagcagcagcggaaataaatttacttacctggtggtttcacctccacacgtccgtcgcaggaacgatgaaatagaaaaaattgagttaaaaaagtatctcaatcggcaggacggaattaaaaaacagatcaatcatccttcctacggcgatgtttgcgtagcttataagcctcctaaaaccatgttattacctgcagacacacttgttgccagaaccaaattttatgcgatcccaggtgcgctggagtgtggctattcacaaagtatcaactggactgcagaagggatgttaaatgcagaaatacacagaaagattagtatatacgtactcgccagattaaagctggccggcgcctgtattggtattagccatagccgatcttttaaggtgaagaatttttaccagtgcattgaagcctcagagaaagcgactatttcctttattataggcggtttcttttgctaccagtctgcaaccaactggttaaactccagacatgaacaaatcaagctatttattcatgccgggctcgcggataaagcatccttaagccttaagcgaaaaaagggtaagaagactacccccgattatctgattgagacgacccaggggaagtggcacgtatttgagagcaaaggcggcgaaagtagcagtcgatggcagagaatcgaagagggcattgcgcagttagaaagcgtcaccagagttggctggaaagggcaaaaaaaccagcctataagcaccttcgtctgtacacacacgtccatagattcaggaaaagagattgcggtgaacgttgttgatcctctccctggtcactcgcgatctattattctcaatcgcgctgtctctgttcttctcacaaaagcgtcattaatcgacctttttgacgtgctggcagaagatgaatcgaatgccgtgtttagcatcccgggtatgcagggatggaaatttatcaacgccccactgtatgatcacgttcagttaggtatcccggaaaaatactctgccttaaaagatgtattaagaataggggttgggcagtatctagcgcttaaagaaataattgatgacgcgcttatggaagacgatgaaatgcccacgccggaagccgttgaaaaacgattatcagatctatctataaagcccgatgatgtgcgcaacgccatgacgctaatagcccccttgctgcataaaaaacgtgcttatgaagatatactgcatctattctctgaaaaacttaaactgccagagctggcggataaattttgtcaggaagatgaacggttagaaaaagcattatccgaatcagtaagaaagcatcgatctccatggggcggcctggtgcgtgaagcgccagcacccggtcatgatgacccttgggagaaaaaacaaagacagaataaaatgaagccctga

SEQ ID NO: 133245 - DNA, 366 bp, Enterobacter cloacae; identical to SEQ ID NO: 97162

SEQ ID NO: 133246 - DNA, 3237 bp, Enterobacter cloacae; identical to SEQ ID NO: 97161

SEQ ID NO: 133247 - DNA, 1530 bp, Enterobacter cloacae; identical to SEQ ID NO: 97160

SEQ ID NO: 133248 - DNA, 417 bp, Enterobacter cloacae; identical to SEQ ID NO: 16834

SEQ ID NO: 133249 - DNA, 420 bp, Enterobacter cloacae; identical to SEQ ID NO: 22854

SEQ ID NO: 133250 - DNA, 369 bp, Enterobacter cloacae; identical to SEQ ID NO: 97156

SEQ ID NO: 133251 - DNA, 345 bp, Enterobacter cloacae; identical to SEQ ID NO: 97155

SEQ ID NO: 133252 - DNA, 321 bp, Enterobacter cloacae; identical to SEQ ID NO: 97154

SEQ ID NO: 133253 - DNA, 180 bp, Enterobacter cloacae; identical to SEQ ID NO: 97153

SEQ ID NO: 133254 - DNA, 510 bp, Enterobacter cloacae; identical to SEQ ID NO: 97269

SEQ ID NO: 133255 - DNA, 333 bp, Enterobacter cloacae; identical to SEQ ID NO: 16829

SEQ ID NO: 133256 - DNA, 285 bp, Enterobacter cloacae; identical to SEQ ID NO: 97151

SEQ ID NO: 133257 - DNA, 360 bp, Enterobacter cloacae; identical to SEQ ID NO: 97150

SEQ ID NO: 133258 - DNA, 297 bp, Enterobacter cloacae; identical to SEQ ID NO: 97149

SEQ ID NO: 133259 - DNA, 546 bp, Enterobacter cloacae; identical to SEQ ID NO: 97148

SEQ ID NO: 133260 - DNA, 156 bp, Enterobacter cloacae; identical to SEQ ID NO: 97147

SEQ ID NO: 133261 - DNA, 240 bp, Enterobacter cloacae; identical to SEQ ID NO: 16823

SEQ ID NO: 133262 - DNA, 336 bp, Enterobacter cloacae
atgttcgattaccgtaattccgatcaggagcgctacggccagcaaatctatcaccactatcgtaaacagggtaatcatcgctgggatacttctgttcatcaggatagcggcggccaatacgcgattattttccggcactccttcagcaaaaaacaggctgatggcgttaagcgaacgatgatccgcgatgaaaccgttatacgggcaggtacggcgcaggagctgacagaagcgacatttcccgacttccaggatagcgatattctgaaggcgtcggatttctttaagtcgcttatccagcgcaaagcggcagacgtaacacaaaccgatatttga

SEQ ID NO: 133263 - DNA, 426 bp, Enterobacter cloacae; identical to SEQ ID NO: 16821

SEQ ID NO: 133264 - DNA, 441 bp, Enterobacter cloacae; identical to SEQ ID NO: 97223

SEQ ID NO: 133265 - DNA, 1266 bp, Enterobacter cloacae; identical to SEQ ID NO: 97224

SEQ ID NO: 133266 - DNA, 720 bp, Enterobacter cloacae
atggataagttgctgaacaaaaagataaaagttaagcagtctaacgagcttaccgaagctgcttactacctctcgctaaaagcaaagcgcgttctctggttatgtcttatgcagacgtatttcacagcttcagtaagcgaagatgatgatgagatggctgtactcggtgactctactttcaaagtaaaggtggctgactatgagcaaatttttcaggtaagccgtaaccaggctatcaaggatgttaaagaaggcgtgtttgagttaagccgttctgcggtaatcttttacccgaaagaaggaagttttgactgcgtcgcgcgcccctggctaacagaggctggcagccgatcagctcgtggtatctgggaaatcgaatttaaccataaactcctgcggtacatttacggcctgacgaaccagttcaccacctactcgctccgcgattgtggcagtcttcgaaatccacggacgatccgcctttatgaaagtcttgctcaattcaaatcttcaggcttatgggttactactcatgcttggttaaatgaccgtttccttttgccggaatcccaacagaagaacttggcagagttgaaacgatctttccttgatcctgcactcaagcagataaatgagaaaacacctttacttgctaagtatagtattgatgattcaggaaaatttctgttctcaataattgataagcaaaatcccgtctga

SEQ ID NO: 133267 - DNA, 393 bp, Enterobacter cloacae
atgaaaaaattacgcagcaaaatgaccacggaagagctggcggagagtttgggcgttgccagacaaacggttaatcgctggatacgccagcagggatggaaaaccgaaggcctcaacggcgtgaagggtggtcgcgcgcggctcattcatattgatgcgcgcgtgaaggaacatattatgagcctccctgcgatccgtaaccgtcaggcggtttaccatctcgctgaggtcaccgcttcatacagtgaaccctcttcaaacctgtctccgggcattattgagacgctggagagtatgactcagccagaacagaggcgtctggacgccttattgaaacgcgaaggcatacacggttttcttacgcggctcggtatcgcggaaaaagaggcataa

SEQ ID NO: 133268 - DNA, 216 bp, Enterobacter cloacae
gtgggattaaacttcccacggcgcttttggctgtccgttttctggcgcattgtcggcaccattctgagcaagaagttcagacttcaggatctcgagattacggatagcagagtgataatcgcccgccaccaggatatccagcacggtatcaattcgttgtgctacagcttgtgcgtcaatagtcgacataatctcaccccaggcgcgaaaagttaa

SEQ ID NO: 133269 - DNA, 1230 bp, Enterobacter cloacae
atggctagtactcttctgacagacagtaaaatacgtgggctgaagcctaaaaaatctgcgttctacacctggcaggcatcagccaccagaggaacaggaaggcttggtgtgaagacatacccatcgggccgcaagaccttcgtttaccgatacttcctcaatggtaaagagaaattcgtcaatcttggtgatttcccatctgtggcacttgccgaggcgatagaaaaagcaagttccgccgccaagaatatttctgagccagttaaagccgtaaccgacctttcttccattaaacaacttttcgacgattatatagaagatcagaaagcccgtgggaaacgttcatacgaaaaaacgcagaaccggattaaccaagttttggacagcgagcacattgatccaggaatgcttgcgcgagatgtcacccctgaccacataaaacgagtgttatcagagttcatctcccggggagccaaagccggagcaaacaaggttcgagccaatcttcatgcaatttttaactttggcctatttgctgacaacgatccggcaaacattgacaacaagaccatatacgggcttgaacgcaacccggtatctgtcgttccggcccagcgtggggtcgataaggcactggatagatttcttccctgggatgaattgtccgagttgttggacatccttcatcgacctgcatcgtcagttcccatgaacagcgattttgcccagcttttactctgttgtatccatacagcaggacaacgcccttgggagataatgacgaataccaaaagcaattgggataagaaaggaaaagtgctgacggttccacctgaaatctccaaaactggtgattatcacgtcatccctttaagcgctacagctaccagcattcttgaagagatggaaaaacgttatcctgaatctgattttcttttccctgcggaaacagctgaaggacacctactttctgccgaatacggaaagcagctacgaaaattctgtgaacgcgaaccatttaataaatttacgccaagggatatacgccgcacctttaaaacactggccggagatatgggtataagcaccgagatgcgcgaccgattgcagaaccataagcggccaggagtgtcagcaaagcactatgaccgctatgactatcttaaagagaaaagggaaataatcgaagagtgggagctgcggcttttgtctctgcggcaagcaccttga

SEQ ID NO: 133270 - DNA, 1032 bp, Enterobacter cloacae
atgcttgaattaaccgccatttctaaatcgttttctgatgtgcaggtgctcgacagcttaaacctgagcgtggcgccggggagcaggacggcgattgtcgggccgtccgggtcggggaaaaccacgctgctgcgtattcttgccgggttcgaaacgcctgacaccgggcgcattgtcatgcaggggagaacgctgttcgatgaaaacagttttgttcccgcccacctgcgccggatcggttttgtgcctcaggagggcgcgctgttcccgcacctcaacgtggcagacaacattgcatgggggctggacggcacccgccatgagaagcgccagcgcgttgcggcgctgatggagatggtttctctggacaggcagctcgcaacgcactggccccacgagatttccggcggacagcagcagcgcgtggcccttgcccgtgcgctggcccagcggccttcactgatgctgctggatgaaccgttctcggctctggataccggcctgcgcgccacgacgcgtaaggcaacggccgatctgctggccgaagcgggcgtggcctcgattctggtcacccacgatcagaacgaagcgttgtcctttgccacgcaggttgccgtcatgcgctccgggcgcttcacgcaggtcggtacgccttatgacgtttacacccgtcccgttgacgaagagacggcgctgtttcttggcgatgccgtgatcctgcctgctcagctcgctgccgggtatgccgtgtgcgcgctgggtgaagtgccgacggacaacgcgcatgcgacaggacagggcagggtaatgatgcgccctgaacaattacgcgtgacggcatgtgcagcgcatgaaagtccgatctcgattctcgacgtggacttcaccggccagctgtcgacgctcaccctgggattggccggacagcagcagccggtgattctgaagaccgtaagccagccaggatggaacccgggcacggcggtacgcgttgatattgctggcaccgcgcgggtattcgaatattcttaa

SEQ ID NO: 133271 - DNA, 1437 bp, Enterobacter cloacae
atgaatacgtcagttgtttcaccgggccgcgctggcctgatattgctgctaaccggccagatgctgccgatgattgatacctcaatcaccaacgtcgcgctggacgccatcacccattcgctgaacgccaccgccaccgagctggagctgattgtcgccctctacggcgtggccttcgccgtctgcctcgcgctaggcagcaagctgggggataactttggccgtcggcgtctgttcatgtggggcgtcgcgagctttggcctggcctcgctgctctgcgggatggcggggaacattgaacagctgctggccgcgcgcatcgttcagggggcgggagccgcactgatcgtgccgcaaattcttgccacgctgcacgtgacgctgaaaggtacggcgcacgctaaggccatcagcctgtttggcggcatcggtgggattgcgtttatcgtcgggcaaatgggcggcggctggctggtgtcggcggatatcgccgggctgggctggcgtaacgccttctttatcaacgtgccgatctgtctggtggtgctggcgctgagccgccatttcgtaccggaaacccgtcgcgagacgccgtcacgcatcgactggccgggcaccctgctgctggcgatcattctttgctgcctgctgttcccgatggcgctcggcccacagtggcactggtcgtggccgctgaaggttatgcttctcgccattattccgctgggctggctgacggcgctgaatgcgcgcaaaaaggagcgtgagaatgcccacccgctgatcccgccgcgcctgctgcagcttcgcagcgttcgctttggcattctgattgcgatgctctttttcagcgtctggtccgggtttatgttctgtatggcgctcaccatgcaaaccggtctggggatggcaccgtggcagtccggaaacagttttatcgcgctgggcgtaacctactttatttcggcgtggttcgcgccgaggctgattgctcgctacagcaccagtaccattctgctgaccggtctggcgatccagattgccggcctgctggcgctgatcgccacgttccgcgtctggggaatggagaatactgccctgacgctggcgcccgcgaccgggctggtcggctacgggcaggcgctgatcgtgaacagcttctaccgcatcgggatgcgcgatattcagcctgacgacgcgggagccgcgagcgccattctcagcacgctgcagcaggccgcgctggggcttggcccggccattttcggcgcgattttgctccacgcgctgcagaaccatcacggggattacacccaggcggtgaacgtcttcctgatggtggaaacggcgatgatggtggtgctcgccctggcgacgctgtgcatccgccatcgcctgtgcctgccggtggtaaaggtctggcaggccaccaaataa

SEQ ID NO: 133272 - DNA, 1614 bp, Enterobacter cloacae
atgcaatcctctctacttcatgccgaaccagcaacaatacagcagcaggaccaagcccgacacgaacaactcgcccctccgggtaagctgctgcttacagctgaaagcacatctcatggcgacgctcttgttcttccgaaagagtctgtttgctacgacattctccatgtgaggatcgacaatacggagtcgcttccaaactggctcacctttcgcgattttattcgtcaggctgagaataactgtatcggcgtgaaaggaattaaagccatatatacagccgtgcagaatcgattaatatcccacggatttattactacccgtgtattaataccggagcaaaatttgcttaagggaacgttaaccctgcgaattctgcctggacgtgtcagtgatgtcattattcaggatcaaagtgggctccccgttcatcgctggaataacgtcccgcaaggggcgggcgacctcctcgatttacgcggtctggaacaggggctggaaaacctgcagcgtattcccggttcgcaggcgagtattcgtctggtgccgggggaaaatcccggcgatagccgcgtagagatcaagcgcgaccagcgtaaagtctggcgactgggcagctggtttgatgattctggtagtaaatataccggacggtatcagggcggactggtactgtatttggataaccccacctcgctcaacgatatgttttatgtagcgtatggcggcggtttcaaaaatgaaaacggcaagcgtaacgataatacctcggcgttttactccgttccctggggatactgggcgctggaactttatgccagccagtacagaacgacgcagactatccatagcggtgattttgattaccggtacagtagcgatcaaaagttaatgaccgccgcgcttaaccgcgtggtttaccgcagcgcgagccagaaaaccacgctgggctttaaagggatcaagcgtgatacccgctacgatcttaacgacatggaagtggaggttcagcaccgggacaccagcagttggctgcttagcctggaacacttagcctatcttccatttggtcaacttacggcaagcttaggttatcaacatgccgcaccgtggtttggtgaagaagccgatgctgaagaggtagtgggcaatgccgacgcgcaggcgcgcatcattacgctgagcgcagacggtagtttccctttcaaactgggcaagttcgccctcagctatgaaccgcatttcaaacaacagaccactccggacaggcttacccagcccgataagttcaccatcggcaaccgctggacggtacgcggctttgacggagagtcctcattgtatgccgacaaaggctggtatctacgtaatgatatcaatctgaatctgccggtatggggaatgcagccgtatattggcgcagactacggcgaagtcagcggctcagaaaatgattactggagcggggcccacattctcggtgcggccgcaggcgtgcgcggggtgaaaggacacgtgggatatgacctttttgcaggtgtgccattggtaaaaccggatgagatgcataccagtcccgtcacgcttgggttttcggtacaatggcagtactaa

SEQ ID NO: 133273 - DNA, 372 bp, Enterobacter cloacae
atggaattacgctgcgatagtgatgaaatagccgccaggataataaataatatcctgaacaacatggccgtaatacttatcaccaggttgatagacaactccgttttcccaaacaccattaccttcaggggtaccatttggcttaattgtggtatttccactattattcgcagtggcattcgaacctgggttggtattgatgtcatcagcagtgttattatctgtaccttgatttgctgcaccggtctcgttaataacgcccatattattgacgtagcctgtggtgtacacgcgattgccggtaatattaccgctggcttcgttgttaacgccgttggctgtattcaacgtaatatcacttgtgctaaataa

SEQ ID NO: 133274 - DNA, 345 bp, Enterobacter cloacae; identical to SEQ ID NO: 97180

SEQ ID NO: 133275 - DNA, 600 bp, Enterobacter cloacae; identical to SEQ ID NO: 97182

SEQ ID NO: 133276 - DNA, 282 bp, Enterobacter cloacae; identical to SEQ ID NO: 97183

SEQ ID NO: 133277 - DNA, 294 bp, Enterobacter cloacae; identical to SEQ ID NO: 16852

SEQ ID NO: 133278 - DNA, 318 bp, Enterobacter cloacae; identical to SEQ ID NO: 97185

SEQ ID NO: 133279 - DNA, 2601 bp, Enterobacter cloacae; identical to SEQ ID NO: 97186

SEQ ID NO: 133280 - DNA, 714 bp, Enterobacter cloacae
atgaaaaaaacactgacggcagtattgctgaccaccggcctgattctgggaggcgcgcaaagcgcttccgcaggcatcatcgtgaccaaccctactgagctggctaaacaggtcgagcagcttcagcaaatggcgcagcagctggagcagcttaaaagccagctgcaaacgcagaaaaatatgtatgagtcgatggcaaagacaaccaacctgggcgatctgctggggacgtctaccagcacgctggcaaataatttgccggacaactggaaggagatctacagcgacgccatgaactccagttcttccgtcacgccttcagttaacagcatgatgggccagtttaatgcggaagttgacgacatgacgcccagcgaagcaattacctacatgaacaaaaagctggctgaaaaaggcgcttatgaccgcgttatggcagaaaaagcctacaacaaccagatgcaggaactaaccgatatgcaggagctgacggagcagattaaaacgactccagacctgaaatcgattgctgacttacaggcccgtatccagacgtcacagggtgctattcagggtgagcaggcgaagctgaatctgatgaacatgttgcagcagtcacaggacaagctattacgtgcgcagaaagaacgtgccacccacaattttgtttttggaaccggcggggacgttaccgcgtcaccttcaattaactga

SEQ ID NO: 133281 - DNA, 228 bp, Enterobacter cloacae; identical to SEQ ID NO: 16848

SEQ ID NO: 133282 - DNA, 1041 bp, Enterobacter cloacae; identical to SEQ ID NO: 97200

SEQ ID NO: 133283 - DNA, 699 bp, Enterobacter cloacae; identical to SEQ ID NO: 97199

SEQ ID NO: 133284 - DNA, 885 bp, Enterobacter cloacae
atgaaaaaactacttctttcagcagtcgttttgtcagtcctgggaggcgcggccactaacgttatggcgcttgaggttggccgcaattctccttatgactatcgcattaaaagcgttgtttataaccctgttaatgtggtcaaaattgacgctatcgccggtgtggctacccacattgttgtcgcgcctgacgaaacctatatcactcatgcttttggcgattctgaaagctggacgtttgcgcacaaaatgaaccatttttttgtgaagccgaaacaggccatgagtgataccaacctggtgatcgtcaccgataagcgcacctataacatcgtcctccatttcatcggtgaagaaacgaagaaaaatgcagacggtacggtatcaaaatcctttattgaaacgccgtgggctgtgcgccaggccgttcttcagctgacctatgaatatccgtttgagcagcaggaaaaagccaaaagcgcggctgataaaaaacgcattacgcagaagctgaagcagacggcttttgcgggggcgaagaactatcagtacgtaatgagcgaacagcctgaaatgcgcagcatccagccggttcacgtctgggataactaccgctttacccggtttgagtttccggccaatgcggagttaccgcaggtctacatgatctcggccagtggcaaagaaacgctgcctaactctcatgttgtgggtgagaaccgcaacatcatcgaggtggaaaccgtcgctaaagagtggcgtattcgtctgggcgataaagtcgttggcgttcgtaataataatttcgcaccgggcgccggtgcggtagcaaccggtacggcttccccggatgtgcgcagggttcaaattggggaggataactga

SEQ ID NO: 133285 - DNA, 1161 bp, Enterobacter cloacae; identical to SEQ ID NO: 97197

SEQ ID NO: 133286 - DNA, 996 bp, Enterobacter cloacae; identical to SEQ ID NO: 97196

SEQ ID NO: 133287 - DNA, 198 bp, Enterobacter cloacae; identical to SEQ ID NO: 25167

SEQ ID NO: 133288 - DNA, 525 bp, Enterobacter cloacae
atgaacgttttagcagccgctgaaaatggcttccggtttaaggggatctggtggacggaggagacctttactgacgtattgcgcacggtactgaacctgcaccgtgctatgagcaatcaccgggtggcttttcactttggtgtttctgaaaaagccgtcaggaaattgagagcccgcagcgataccgccaatggggtgatactgcgcctgatggaagaagcaaaactctgcaggagcaggccagcacagtatcgcgaacgcaactggtacaacaattacccggaagacatcgaggccagaaaattactgatagccgcagaggaggaaagggaaaggcagcgggtggttcgacatgagcagcgaaagcagagaacgcgccgggttactgatggtgctgtacgtcttgagcggattagagcgcagcggcgtgaggcggtacaatgctgtaaacggtcaggattaactcaggtgctggcagcagaaagcctgtcatgttcgctaagtactgtccggcggtactggtga

SEQ ID NO: 133289 - DNA, 1026 bp, Enterobacter cloacae
atggcatctatccgtgagattggcgccggaaagcgcctgcgttatgtcgttaactggctggataaagaaacccgcaccggacgacgcaaaacctttcacagcatcgacgatgcggcggcgctgctgtatcaactggaagtggcagcccttgactggcgaacggcagacaatgcggaggcggtaaaacgctggacgttacagaaactgtcatggttctggctgggatatcagcgtgacaggctgaaccggaaccggatcagggcaaccagctacgaccgctaccgctattgcctgctaaaccttccgtctgacctgctgaataaaaacctgaataaaatcacttcacgccagcttagcgagcggcttaaccgacagtcgcttgtgtacatcggcgcggcttttgcttatctcatgcggtccgggatgattgcgcataatccggttcgccagagccgatcaccggcagacaggccgtggcaaatcccggatgaggataccgtgttagccatgctggatcgcgcagagcggcgcgaaaggattgctatctggctgggtgcggcttgcggcctgcgtatcagcgaagtgctggcgttaacctatcgggatgtgagcgctgacgaaatacaggttcgctgccatctgacttcacgcgggattatccggggcagaaagcgcggcaggggccgttccgtcgatatgccggttggcctgtatgagtgcctcgataaaacgctgctgggaacggatacaccgctgattgccggaagcaacggacagaggctgagcctgaactacagcacatccggcgtgatgaaacgcctgctctctgaattcgggatagcgcgctttcatgacctgaggcattttgcggtgtccagcctggtaaaaaacggcgttgatattctggacgtgtcggacatggtgggccactccaggccgtcggtgacgttgaatatttacgggcatcttttccgcgaaaaaccgtcactcaagaacgccctgagaggaggggtaaggagaatatag

SEQ ID NO: 133290 - DNA, 585 bp, Enterobacter cloacae
atgaaaaatagcgttactaatgtaaacccctgctctgatacgcaggaaattgaaagtttacctgcatacaggcaggcgctggccgatgaagcggtaagtaataatgtgtctgctgtagaacgtatacgggcaaggttagcgcttctggagagctatattcctgattcgcctgtaccacaagacgaggtgtccgcatttcgtgtccgcatcgccggattactcgtggaactgaaggagggcggtaaacaaggcactgtactgatgcatgcgcaccgaaaattacgtgatttagaggatcggatttacatacctatacgccggacggccgctgcagagtttgaccagctgcgccgggaaaaacaggacatgacgagtgatgtattgctgaaaactcttgtgggcgctgaaattggcgaatatcaggcgagaaacccggaggcgtcaaaaatagccacgctggccgcgcttatgaggtcatcaccccgtgcggatattctcatcaacatgatccgccagcgaaacgatgagcatccggtagcagtgtttagctggtgtcctctggaattacctttgcaggatgtgtag

SEQ ID NO: 133291 - DNA, 165 bp, Enterobacter cloacae
atgagtaacatcgaaaagattaagcctcaaaagcgtgaggcagaagaaaaagagaacgttcgtacatggcaggacgatctgaccagccagccccaccttgacagcgatagcgccattgtagaaagacaattgcaaagaaatgctcccggggtaaatgttgtttaa

SEQ ID NO: 133292 - DNA, 663 bp, Enterobacter cloacae
atgccattcattagacctgcagatgagcaggatgtagcacagcttgttcaggataacgccaaagcagcagtgaccaatgcgttacccggcgttattcgttcattcgacccgaaaactgtcacctgcgacgttgatatagccattacggcaagaatgacgaaggccggcacaatggacgaagatttccagtatgaatccgtccgttatccgatccttaatgatttgccagtagttttcccgcgcggtggcggcgttacgctgactttcccgattaaagaaggtgatgaatgcctgattgtgttttcgtcgcgtagcattgatttctggtggcagaacggtggggtacaggaaagggctgacgggagagttttggatctgtcagatgcgttcgttattccgggcccgcagtcgcaggcacagaaaatcagcggcatcagcaccagcgctgcacaacttcgtactgatgatggtacggcattcgttgaagtggccgctggtggcgctattactattaccagctcacagatcaccatcaacggaccagtacaggtaaacggctcgataacttccactggcgaccagacagctaacggaattagccaggttaatcatactcacggcggcgtacagtccggcggaagcaatacaggaaaaccacaatga

SEQ ID NO: 133293 - DNA, 345 bp, Enterobacter cloacae
atgaagaagattattttactgattggtttattgggcgcatctggaagtcatgctgcgcaggttattaccatgcagtgcggaaactttcgctttgagatgatagaaaactcgatggcgagaattaatggtgagtatgtaacatctcagaaaattacagagttcggacagaacggggcaaaagtagaaatgacgcttatgcctgccagcgatgggaatctgtatgggtttgaatacatccatcctgacggtagcaaaaagcgctggctgaatgttgagcttatccgcaccaatatgaatcaggcgcggatcattggctcgtttgattgtaagcgcgtgaacgggtag

SEQ ID NO: 133294 - DNA, 1068 bp, Enterobacter cloacae
atgtcaaaaaactggatgaggcatttcgaactacaacttgtgggagagaacgggcaagggatcagcctgagtgacttcaaagttacttttcaaatagagcgtaacgataacaaatggcctgctgtaggcacggtaaaaatttataacctgtccgcacagacgcaaaaccgtatcatgcaacgcgagtttgcaaaaataattatgattgccggctatgatggccttgcatctgatgtgcctgcgagtgaagttggtgttgttcgtgagataccggccagcgaagtagggcaagctaacggcacaaattacggcgtaattttcagcggtgatattcgcttcactgtgaccggaaaagataaccctgtcgattcatgggtacaggtgcaggcttgtgactctgtggaggcgtttaccagcgcatttatcaacaccactatcagtaaaggctacaccacagaagatatttatgttgagcttatgaaaagactggaaccttacggcatttctcgcggtattgttcctgagttcccggcaacggtatttcctcgcggtcgagccctctttggctatgtccataactatctcgatgaagtagccgcgcagtgcaaagccacttggcaattcaactatggaaaagtcgatattgttcccagagacaaggcgactcatgaagctgtggttctcaacgctaataccgggcttatcggtatgcctcagcagaccatcggtgcgggtgtgaatgtcaaatgcctgattaactcacggattcacctgaacggacttattcaactggatcaggcttcggtatatcgtagcgccttatctgctgatcaaattgcccaggctggtgggccaatttcggtggaaagccaaaacggaaaccttgtcactactggattaacgcagagtccggcgagcattgctacggatggtatctataaggttcggtatatcagttacacgggcgacacgcgcggtcaagcgtggtatatggatctggcgtgtgaggctcgcgggaattctgatttattttcaagttcatttatgaataagcagagtgaagaatga

SEQ ID NO: 133295 - DNA, 678 bp, Enterobacter cloacae
atgccaaacatgactcgctttaatgcgaccccttccggatctggcgtaatcattactgcaaattttgataatgatacggagattcaattccctacagaccccgcatctgcagacttcatgacaaccatcgttaaagccttagcagaagcgaatgatcgcattatcgccgctgaaaaccgcgcagcggccgccaaccgaacagcagaccggctaaagaaaagaactggcgatcagcagcctgcaggctcaggccagccgcctcaatcccatgctgagtttctcaagtcagtatggaaagccgtgccagatttcacggttggcgttgaacgcaacccggaaaacatcgctattgaggcacttcgctttgtgcccattgctgttctgaaagccatttccggctatacgttgcctgacaatattccacggagtgaggctgtctcgttactggaaattgccggggaatacatggaggcgaacaacatcaaatcgaaaccatatatccctagtatcaatgctaaagaagcagctcaaaagcgccgggatttcgatgctgatgtgaataaaaacattcagcttcaacgtcagcttgatcagcactgggagcagcagaaagttgatgagaaggaaagacaaaaaaccatcgataagcacatgcgcccatacgccaatcattattaa

SEQ ID NO: 133296 - DNA, 2343 bp, Enterobacter cloacae
gtgaaagataatttcattaatgaaattcgtggtagggctaataataactggcctgcaattatggagcgccttgccattcctacaaacagcgcagaagggccatgtccggcgtgtggtggcaacactcgctaccggttcgacaataaagataaccggggaacttatttctgttcgcactgtggtgcgggtactgggctggatctggtgatgaaggtcaaccagtgcggcccgagagaagcggctgagctggtggccgaagctatgtcgctgcctatgccggaaccgaagcaagccagagagaagcctcaaacggatatcgccgggaaagttgcggcgctggccgcgaaagcctctccggggcagtctgcttaccttgcatcaaaggggcttaaatgccccttcccgatgctgtcagatggatcgctgatactgctgctgaaaaacggtgctggtgcgacgactggcgcacaggtgattaaacctgatggcagtaagcggctagtggccggaacggtgaagaaaggctctttttgcgtggttaattccggtgcaacgtcggaaacggtgattatcgccgaagggctggcaacggcgctttcggttcagcagttccgccctgattcgacaattatcgcagcgattgacgccgggaacctgctgcccgttgctcaggtgatgcgcaaaaaatacccgaacgcgcggatcatcattgctgcagataatgaccagtgcgccgaaagtgacagaagcggagaagtgaaagttaacacaggtaaggagtgtgcagggaaagccgctaaagccgttgctggctgggtttctttgccccctgtggactacaaggcggactggaacgactaccaccgacaaaacggactagaagccgctatagcagcatttaacgattcgatgtatcagccggagggggaaagtgtgggcgcaaaacttaaagtagtcgatggcggtaaaaagcgcgggcgcggagaaataaacctgatccagatggcggataatgaaaaagcgctgatgctggcagaccgctacgagggcatagccattcacgcagagagcgaggctgtgtatctgtaccgcgaaggagtatggataaaagcggcaccattagaactaagccgcgaaatggtagctatctacaacgaaaatcagactaatttcagcaaacgttcagtaaacaacgttattgaagcgttgaagattgttattccggttatgggccaacctcgccgcagcctgatcccgttcaaaaatggcgtgtacgacatggaaaccgggactttctcgcagcattcattacacaactggctcactaacgataacggcgtgatctatacgccgccggagcctggtgaaaaccttcatgaccatgcgccaaacttccataaatggctaagttacacagcaggaagagacgcacttaaaatgaagcggatcgccgctgggctttttatggtgctggcgaaccgctacgactggcagctttttcttgagataaccggggagggaggtagcggcaaaagcgttttcactcacattgctactatgctggctggcgaacacaacacggccagcggaaatatggccgcactggatagcgccagaggtcgggcgcagttcgtaggcaaaagtatgataaccctaccagaccagccaaaatattcaggcgagggaacgggtataaaagcgattacgggcggcgatgccgtagagattgacccgaagcatgaacaccagtacaccgccgttctgagggccgttgtagtcgctacaaacaacacgccgatgattttcaccgaacgggccggaggcgttgcccgccgtagggttatttttcagtttaataaccgggttcgagaggaagacaaagaccccgatttgtcggaaaagatatccgcagaaatcccggttattgtccgcaggctcctggctaacttttctgatccagagaaagcaagagcgcttttgttggaacagaggaacagtgaagaagcactggaggttaaacagaaaacagacccgctttatgctttctgtgcctaccttgaaaagctgtcagagtgtacgggaatgctggtagggaaccgcaatccgccactatacccgcgcgtgtatctctatcatgcgtatttggcgtttctggaggctaacggattcgataagccgctaacccttaataaattcgctgagggcatggagagcgcaatgcgcgagtttaatcacgaataccggaaagagagaaagacgcgaggagttgtaaccaacgtggaactttcaggaagtgctgaggactggctgccacagccttatcccaacccgacgaagaagtaa

SEQ ID NO: 133297 - DNA, 219 bp, Enterobacter cloacae
atgaaaaagaaaaatactggcttaattgccagcggattatctcatcctgaaatcaggcagggcgataaatggcgtgatggatggggagatattgtgacggtcgaaagttaccgattcaacagagtgacatttattcgtgatggttatttatctccatgcactctgaatgaatcacgatttatcaaagaatttaatccggtaggcgaggtgacgccgtga

SEQ ID NO: 133298 - DNA, 222 bp, Enterobacter cloacae
atgagacaggttccctttgatgttttgatgcacgtcgagaatgccctatccgaaagtgaatgcacgtatgaggttctcagcatgtggctggacagcattactgacgatgagagttcacacagcgaagcgtgtcgggtgggcgctatcatgtcactgctgaataaatctattggcgagctggtaaaggcgcgggacgcttacaagccaaatagcgagatataa

SEQ ID NO: 133299 - DNA, 183 bp, Enterobacter cloacae
atgcgtaaaaccttccagattgacggctacgctgttaacaaacgcggtcttaccattggcattcactacaccatgaccagcaccagccctgagacagcgaaagctacagcgcaattactggcacagaaaggcgggtataaacacgtccgtatcaactttgtccgggaggttaaaaatgcgtga

SEQ ID NO: 133300 - DNA, 879 bp, Enterobacter cloacae
atgtttaacctccagactctgacggccaaagcccgcgaattgcgcggcaacgtggttaaagcggttagcactaagggcagtcgcacaatgacgccagtttatgaccgtgacgaacagcgcaagctacgcgaacgcatacagcagacacaaccggattgggtgctgctctggtgggacattgcgaccgtaaccggctggcgtaccagcgacgtttgcaacctgcgctattcctgcatcaattgggaaacggggcaggcgacaattatcgttgccaaacagaccaaagctgccgaagcgcgggcaacccgcaaaggcattgaaatcgtgcgccagcagcgcaaggacgccgcgaggcttgccgctgaccatatcgcctacatgaagtgggacagcatcaactgtgatgcgctggcagcggatatgaccgacgaagaacaggcgatagtattcgggctggtggctaaagcagacgttaagcacgacaccaaacagttaccgccgggcatcatcaaacggcttcgcgaacgtcaggatcggaatctggtagaggacgacctgatattttcccgctctcaaatcgaaagtaaccgttgtcaacgtctggaaggtagcgtgacccgccagaccatatggcgaaaactccatgatgtgatggcgtggtttacccgcgttatcaacgccaaactgcgtctgagcgcttattcaagccgtaagattgcagcctttaacctcatgtcagcaggcggagaacaaggcttgttggtggcctctgaaatgctggggcatagcaacccggcaataacacgcacatatttgcagttaggaagtaaagcggccgcgatccaatctcgtctggctatggaggtatgcaatgcgtaa

SEQ ID NO: 133301 - DNA, 246 bp, Enterobacter cloacae
atggctaaaccaacctgccctaaatacacctggctgtttctggccacaccgaaaaaacacgactgcacaccaatagtattgcgcacaatggctgataccgaagaagaagcccgcgataccttcccatgctggaatctgacctttgccgcaaaaatccgcactgaaagcagcctgcgtgattctggctgtggatcttatggcctgaacctcctgaccccggaaatgctggaggtgcacaatgtttaa

SEQ ID NO: 133302 - DNA, 213 bp, Enterobacter cloacae
atgtctgaatcgaatagtgaaatactacttaaaggcgaggttaaagcgcgacttcgctaccgttctgattctgcgttctatgatttcctcaaagatgagggaaacggttttccgatgccttttaaagtgggaggccgtaactgctggtatcgtgacgaggttgaagcgtggatcgggaaacaaagtgaaaagcgcgggatctgtaccgcatga

SEQ ID NO: 133303 - DNA, 1230 bp, Enterobacter cloacae
atgcttgttaaaccactcaccaatgcagaagttaagaacgcgaagccacagcttaaagattacagtcttcatgatgggtttggacttcttctgtacgttactaagtcaggcggtaaatcgtggcgattccgctatgcgcaccccataaccgggaaaaggcagacattcactattggccgatatccagaatttagtctcgcagaagcgagggaggcgagagaagaagccagaaggaaagttgcccgagggatagatccaaacgaggttaaaaaagaagaactcagcgacagacggaaaaaacatgcgcagcagttttctgttatcgctgataactggctgaaaataaaaatcacggagggcatccgcagcaatacaattcgaggctacgagggggctttaaaaacgctgaatagtgttcttggtgacgagccggtacataaaatgaatgccgcctcaacaattcaggcaatgagagagtttgccgatcgtcccgcctctgtggaaaagatgatagttgtgctcaattcggtaatggattatgcggtaaacaccggagtcattgaccataattgcctgctaaaaatcggcaaggctttcccagccaaaagaagcgtaccaatgcccgtgatggataaaggcagattgcctgtgttcctttctgaatggctggggctgagtatgtgggagccgataaggctgtgtgtctacttccagcttttaacgatggtaaggccatctgaggctcgcctggctgtttgggacgaaattgatttagacagtgctgtctggaaaattccggctgaaagaatgaaggggaaaaggccacacgctgtaccgctgtccgcgcaagcaatagcagttttacgcaatgctgaaaaatggcgtcgcggggcgtttatttttccttccggcaaaaagggagataagccgattggaaaatgtaccgggcagatcgctattcataaaacatcgctaagcggagaggtagttactcacgggcttaggtcgcttgcatcaactgtgctgaatgaagaagggtttaaccctgatgttattgaggcggcacttgctcacagaagcaggaacgcgatccgcaatatctacaatcgtactgattactttgaacagcggcgtatgctcatgcagtggtggggggattatgtcgatagcgcagagcgcggagaactgcttgagacaaagggcgataaaggattaaggctgattggttag

SEQ ID NO: 133304 - DNA, 354 bp, Enterobacter cloacae
atgcgatacagacgtgaagacgccgacggtgattacacctttggcagcggcgatgatacctggctgattaactcaccggaggccgtcgcgcaggctgtgaaaacacgattcgaattgtggtatgggcaatggtttctcgacaccaccgaggggacaccgtggattcagtccgtactcggtaagcagaagccagaaacctacaacctggcgatccgtaagcgcatcctcgaaacgcgtggcgttaaatccattctctctttcaatacgacagtgaacacgacgacgcgccgcgtccagttcttcgctgaaatcgacactatctacggaacaacgacagtaaccagcgaggcataa

SEQ ID NO: 133305 - DNA, 756 bp, Enterobacter cloacae
atggcagtatctgaccagacccgcagcggcgaccttgccgaaacattcaaatccgagcgagacacaacaaagaaccagatccgcgtagctttgcctggcatcgttcagtcattcgatcctggcgcggtgacggcggttgtgcagcctgcaatccgttcggttgaaactgacaacgacggcaaccgcgttaccaaaaattacccgctgctggtggatgtgccggtgatatttccgcgcggcggcggctgcacgttaactttcccggtgaaagccggcgatgaatgcctggtgatttttgccgatcgctgcatcgatttctggtggcagaatggcgggatacaggagcctgtcgacgaccgggtgcatgatttatcggatgcgttctgtatcgtcgggccgcagtcgcaggcgcagaaaatcagcggcatcagtaccaacgccgcacagctgcgtactgatgatggtgctgcgtttgtggaagtgaccgcaggtcataacgtcacggtaaaaactcccggcacgctgacagcgaatgcagaaggaggaaccacgatcacgtcgcccaccattacactaaacggtaacgtgacaataaacggaaatctttctcagggtatgggggaaagcggcggtaccgcaacgatgcgcggtcctgtcgcggtgactaacgatgtgaaagccggtggcaagagcctgatgacgcacacgcacggcggagtacagaccggcggcggtaacacaggagcgccaaactga

SEQ ID NO: 133306 - DNA, 243 bp, Enterobacter cloacae
atgcgagtctataccgtcttttgtagcggtgaggcagcagcactgaacgatgttgatgttaacgcagtaaaaaaaatcggcgttaaactgaaaatgacgcatgcccaacgtgttaattctgattacaagcttgaacggaaaatcaaccggattaccgcgctaagtgcaattcaggacgcggaagaggtcgatgcaatcgttaataaactgctgaaggttggcgatgattcgttaactgcataa

SEQ ID NO: 133307 - DNA, 732 bp, Enterobacter cloacae
atgagcttagcgcagccaaaatcaggagaactgttagatcttctgaccccttcattaactaagggtgaaaatcttctgagtgaatttgaagtacatcaaatcattcgtgaagctaagaaaatcccggaacgttatcaggggttatcgattgaaggcttagctaagcttgttcttggcgaaatcgaagaagggtgctctctctgtgagcaagggttaagactcgctcctaacgattcagtttctttctgtaactatacgatagcgctacgtaacttaggtttgcacgctcgccagtacgcgatgattcagaatgcggccaactcacttaacccaacgatactggctgaagttgctacaatttctgcatactgggctgatatcgatttgcttgaaaaggtgatgccgatgctgactgctatggaagtgcctcgccctgaagacatggcaaagtggtatgacacacttgattacctgcacacccatcaggagcatgctcaggatcttaaaaaaattgggcagcttatgctgaacgtatctgataagtatcgcgttcgcctggctggtgctcatgctttttatgtgatgtctgagcttgatacattgtttgttgaagtcaaaacagacgatccagcgctcctgtcgcagatgaacaatgaccttgctgatgagattatcatggctggtcttgcagattctgaatgtgtcggatgttttgaggcgggggaactttaa

SEQ ID NO: 133308 - DNA, 348 bp, Enterobacter cloacae
atgaagcgtatgaagttagttctgacaatttcgttactgatctcctgctcagcggctttcgctgatttgcaatgcggcggataccgacttcatgcagctgataacggttggactaaaatcaacggtgaacaggtaacatctcagaagattaaatttcttggtaagaaagatgactgggacaacgttaaaactgacatgggcctgatgccttcccgtgatggaaataattacggttttgagtttgtgaagcgtaacggaaaagctttcctgaacgtccagctgctgcagaacagtatggacgcgccgaaaatcatcggttctttcccgtgtaaaaaagtcgctgggtga

SEQ ID NO: 133309 - DNA, 459 bp, Enterobacter cloacae
atggttcatggcatcggtgaggaagccacccgtaccacaggtcgggtcatacagagttcgaatcaaaccggggctggcctcaaacagggcatcatccgggtcaagcagcaatgcggtcgccaggtgaacgatgtcacgcggcgtcatgaagtcctcggccccttcatttacctcggcaccaaagcggcgaatcaggtgttcgtagatgttactcatcacccgatccggcaccacgtccgggtgcaggtcgatcttggcaaagttctggcaaatcttgtacagcaagcccgctttctccagccggatcaccgtattgccaaactcaaactcctcgaagatagcgcgggcgttatccgaaaacagggcgatgtagtcttccagattgcggcgcgtcttggtgctacccagggtgccaagggagtattcagaggtgttgtagaaggggtattcagcggttga

SEQ ID NO: 133310 - DNA, 273 bp, Enterobacter cloacae
atgacaacattaaaatgggatcacgctgttcagtttgtgaaccagccggacgaggcgattgcaacgtttgccgggcaggggctcaacgcgtttgccggtgggcgtccccctggctggggaacctggaatgcgctcagttatttcgggcttaccttcatcgagtttctcgccatttacgattatgttgggctggcttcggcgcaggccgattttttgctctccggtgatgcggcgcaactcttgcccgaaaaggctatttgcattctgaggtag

SEQ ID NO: 133311 - DNA, 525 bp, Enterobacter cloacae
atgagtacaaaacagcccgcttcggcgcacaacgcgccgaccctggacgacgaagttaccctggcgctgcgtgccattaccgaaaaacgcgcggccacgcttggctatttgcttgatgagtcccgacaacgccatcagcctgacgattatgcgcgtgacgctatccgccattatggccgtgatatcggacgttccgtgcgcgcgaagatgcgtcatggtcacgacctgcaggagtttgccgccgtgtttacccgtggcctggaatcgcgggtttacgaaatggagaccgtttcggccagcccgtcagagtttattgtgctgttccattattgcccttacgtcaattgctggcgccagcagggacgcgatgcccggcagattgagacgctgtgtgatatctgcatggagggggatcatgcgttaaccgatgcgcttgatggcgtgcagctagcggttgagacggcgctggcgcggggggatgccgcctgccgcctgcgtttctatcagtctcaggaggcttcatga

SEQ ID NO: 133312 - DNA, 474 bp, Enterobacter cloacae
gtgcgtaacaatgaaaacgatattcatactctgggcgatctggcgagcggcaagaagaagctggtgccgattcatacctccgatgcgcgctacaccgttattgataactacaacaagaaacaccctgggcagcaaatcaatctgcaaccgaacggcgagcagtctgcggcggacattttcaaagccgttgcttccggagagtacgatgcggctatctatccgattggcgcattactggcgttaaacaaagccctcaatctcaatctgaaagcctccgagtctgtcggcctgttccctaacgtttatttatacaaaaagaatgctgacccgaaactgatcaaagccatcgacaacgaactcgctgccctcaaaaaggacggcacgctcgctgcgctgtcccgcaagtggtatgacgaagatgtttacggtctgccgcgcgcggaaaacgtcaaagtgaataccgactgggaataa

SEQ ID NO: 133313 - DNA, 969 bp, Enterobacter cloacae
ttgaaggatcagatcacgtatcttcccgacaacgcagaccgttccgtggcaaagcaaaagttcagaatcaccaactggcccacctacaataaagccctcatcaaccgtggctccataactttctggctggatgatgaagctattcaggcctggtatgagtcagcaacaccttcttcacgaggcagacctcagcgctattctgaccttgccatcacgactgtgctggtcattaaacgcgtgttcaggctgaccctgcgggctgcacagggttttattgattccatttttacactgatgaatgttccgttgcgctgcccggattacaccagtgtcagcaagcgcgcaaagtcggttaatgtcagtttcaaaacgttcacccggggtgaaatcgcgcatctggtgattgattccaccgggctgaaggtcttcggtgaaggcgagaggaaagtcaaaaagcatggccaggaacgccgtcgtatatggcgaaagttgcatctggcagttgacagcaacacacatgaaatcatctgtgcagacctgtcgctgaacaatgtgacggactcagaagccttcccgggtcttatccggcagactcacagaaaaatcagggcagcatcggcagacggcgcttacgacacccggctctgtcacgatgaactgcggcgtaagaaaatcagcgcgcttatcccgccccgaaaaggtgcgggttactggcccggtgaatatgcagaccgtaaccgtgcagtggctaatcagcgaatgaccgggagtaatgcgcggtggaaatggacaacagattacaaccgtcgctcgatagcggaaacggcgatgtaccgggtaaaacagctgttcgggggttcactgacgctgcgtgactacgatggtcaggttgcggaggctatggccctggtacgagcgctgaacaaaatgacgaaagctggtatgcctgaaagcgtgcgtattacctga

SEQ ID NO: 133314 - DNA, 1293 bp, Enterobacter cloacae
atggcttctttaaagataaaatatgctgcaataattatcagcagcctcatagcaggggggctgatatcggttactgcctggcagtatttaaactcatcacaaaaaacagtaccagcagaacaaaaggcaccggagaaaaaggtacttttctggtatgaccctatgaaaccggataccaaatttgataaacccggaaaatcgccttttatggatatggaccttgtgccgaaatatgctgatgaaagtggcgataaaagcagtggcgggatccgtatcgatccaactcaggttcagaatctgggattaaaaacgcaaaaagtcacgcgaggaatgctgaattattctcagacaatcccggctaatgtcagttacaacgaatatcagtttgtcattgtgcaggcgcgttctgacggtttcgtcgaaaaagtgtatcccctgacgattggcgatcatgtgaagaaaggcactccgcttatcgatatcaccattcctgaatgggttgaggcacaaagtgagtttctgctgttatccggtacaggcggtacgccaacccagataaaaggggttctggagcgacttcgtctggctggtatgccggaagaggatattcaaaggctgcgttcaacccgcacaatccagacccgttttaccattaaagcacctattgatggtgtcattactgcatttgacctgcgcaccggcatgaatatttccaaagataaggtggtggctcagattcaggggatggacccggtctggatcagcgctgcagtgccagaatctctcgcctatctgctgaaagatacgtcgcagtttgaaatttcggtaccggcttatccggataaaacattccatgtcgaaaaatggaacattcttcccagcgtggatcagacaacccgcacgcttcaggtccgcctccaggttactaacaaggatgagtttctcaagccgggcatgaatgcctatctcaaactgaatacccaaagtcaggagatgctgctgataccaagccaggccgttatcgataccggcaaagaacagcgcgtgattactgttgatgatgaaggcaagtttgtgccgaaacagatccacgttctgcatgaatcacagcaacagtccggcattggctccggtcttaatgaaggcgataccgtggtggtcagtggcctgttcctcattgactccgaagccaatattacgggcgcgctggaacgtatgcgccaccctgaaaaaacagaaaacagtatgccagcaatgtctgagcagcctgtaaatatgcattcagggcactga

SEQ ID NO: 133315 - DNA, 3147 bp, Enterobacter cloacae
atgattgaatggattatccggcgctctgtcgccaaccgtttcctggtcatgatgggcgcactgtttctcagcatctggggcacatggacgataattaacacgccggtcgatgcgctgcctgacctgtcagatgtgcaggtcattattaaaaccagctatcccggacaggctccgcagattgtagaaaaccaggtcacctatccgcttaccaccaccatgctgtccgtacctggcgcaaaaaccgtgcgtggcttttcacagttcggtgattcgtatgtgtatgtcatttttgaagacgggaccgatctgtactgggcccgttcgcgcgtgctggaatacctgaatcaggttcagggcaaactgcctgcgggtgtgagctctgaaatcggtccggacgccacgggagtgggctggatatttgaatatgccctggtcgatcgcagcggaaaacacgacctttcagaactgcgttctttgcaggactggtttctgaaatttgaactgaagaccatcccgaacgtggctgaggtagcctcggttggtggcgtggtgaagcagtaccagattcaggtcaatccggtaaaactgtcccagtatgggatcagcctgcccgaagtgaaacaggctcttgaatcgtctaaccaggaggccggtggttcatccgttgaaatggccgaagcggagtatatggtccgtgccagcggttatcttcagagcattgatgattttaataacatcgtcctgaaaacaggtgagaacggcgtgccggtttatctgcgggatgttgcccgcgtgcagaccgggcccgaaatgaggcgtggtattgccgagctgaacggccagggagaagtcgctggcggcgtggtgatcctgcggtcgggtaaaaatgcgcgcgacgttatcacggcagtgagggataaactggagacgctgaaggccagcctgccggaaggcgttgaaatcgtgaccacctacgatcgcagccagttaatcgaccgggcgattgataacctcagttccaaacttctggaagagtttatcgtggtggccatcgtctgtgctctgttcctgtggcacgtacgttctgccctggtggcgattatctctctgccgcttggcctgtgtatcgcctttatcgtcatgcacttccagggactgaacgccaatatcatgtcgctgggagggatagcgattgccgtcggtgcgatggtggatgccgccattgtgatgattgaaaatgcgcacaaacggcttgaggagtgggatcatcagcatccgggtgagcagattgacaacgccacccgctggaaggtgattaccgacgcctccgtggaagtgggacccgcgttgttcattagcctgctgatcatcaccctgtcctttattcctatctttaccctggaagggcaggaaggtcgtctgtttggcccgctggcattcacgaaaacgtactccatggcgggagcggccgcactggccatcatcgtcattcctattctgatgggattctggatccgggggaaaattcctgcagagaccagtaaccccctgaaccgggtgctgatcaaagcgtatcatcctttgctgctgcgggtcctccactggccaaaaacaaccctgctggttgcggccttgtccattttcacggttatctggccactgagtcaggtgggcggtgaatttctgccgaagattaacgagggcgatctgctgtatatgccgtcgaccttgcctggcgtctctccggcagaagctgcagcgctcctgcagacaacagacaagttaatcaaaagcgttcctgaagtggcttctgtatttggcaagaccggtaaagcagagaccgcaacggattccgcgccgctcgaaatggtggaaaccacgatccagctcaaacctgaggatcagtggcgtccaggcatgacgattgacaagattattgaagaactcgacaggaccgtccgtttaccgggtctggccaacctctgggtaccgcctatccgtaaccgtattgatatgctctcaaccggcattaaaagtccgataggtattaaggtatcgggtactgttctgtcggatatcgatgtaacagcacagagtatcgaagcagtcgctaaaaccgtacctggtgtggtttccgcactggctgaacgactggaaggtggacgttatattgatgtggacattaaccgggaaaaagcttcccggtacgggatgactgtgggcgacgtccagctgttcgtctcttcagcaatcggtggggctatggtgggtgagacggttgaaggcgtggcccggtaccctattaacattcgctatccgcaggattaccgtaacagtccgcaggcgttgagagagatgccaatcctgaccccaatgaagcagcaaattacgctgggcgatgttgccgatattaaggtcgtttccggaccaaccatgctgaaaaccgaaaatgcccggccagccagctggatttatgttgatgcccgcggcagggacatggtgtcggtggtgaacgatattaagacggccatcagtgagaaagtgaaactgagaccggggaccagtgtggcattctcaggacagtttgaattactcgagcacgccaataagaaattaaaactgatggtaccgatgacggtgatgatcatcttcatcctgttatatctggcattccgcagggttgatgaagccctgttgatcctgatgagcctgccgtttgccctggttggcgggatatggttcctgtactggcagggcttccatatgtcagtggcgaccggaaccgggtttatcgccctggccggggtggcagcagagtttggcgtggtcatgctgatgtatctgcgtcatgccattgaagcgcacccggaattgtcccgtaaagagacgttcacaccggaaggccttgatgaagccctctatcatggtgccgtactgcgtgtccggccgaaagccatgaccgtggcggtgatcattgcgggtctgctgccaatactctggggaaccggtgcaggttcagaagtcatgagccgtatcgcggcacccatgattggtgggatgatcacggctccgctgctgtccctgttcattattcctgccgcctacaaattaatctggctgcgcaaacataaaaaaagcgtgtcctga

SEQ ID NO: 133316 - DNA, 441 bp, Enterobacter cloacae
atgaaaaaagtggttctaatggcgctggctctcggcctttcactacccgcgatggcgagtgaaaaagtgattgatatgtacaaatctgaaaactgtggctgttgttccctgtggggcaaagcgatggaaaaagacgggtttgaagtacgaactcacgtcatgaatgatcaggcgctgtcagccctgaaagaaaagcatgctattcctgcaggactacgaagttgtcataccgcggttgccggtaatttgatcattgaaggccatgtgcctgcgacaacgatacataaggcaatgcagtctggttcgggtatatacggtctcgccacccccggtatgccagcaggaagtcctggaatggagatgggagcccgaaaagaggcttacgatgttatcgcattctcaccggatggaagtaaaaaagtcttccagcgaatcgaatag

SEQ ID NO: 133317 - DNA, 1008 bp, Enterobacter cloacae; identical to SEQ ID NO: 111895

SEQ ID NO: 133318 - DNA, 690 bp, Enterobacter cloacae
atgctgaaaatttctgattatgctgtcgcatatggtcagagccaggtcatcagtggactgaatctgacgttagcagagggtgaaatcgtcgctctggtagggcgcaatggtatgggtaaaaccacgctgatgaaatcactgattggtatgataccgtcctgtgccggtgagttagagtttgccggtacaaatattaccggcttgcttagttaccagcgcgttcagcatggcattggctttgtcccgcaggggcgaatggtattttcaaccatgacggttgaagaaaatataaaaacggggattcgccaatcccgttcgttacaggttcctgaatacctgtatgactatttccctgtgctgaaagaaatgcgcaaacggatggcgggaaatctttccggtggtcagcagcagcagctcgttatggccagagctctcgccggtaaacccaaattacttttgctggatgaaccaacggagggaattcaaccgtcaattattaaagaaatggcaaaaatattacgtaagattcgtgatgcagaagggttgaccatattagtttccgagcaggttttaagctttgtactcgatgtgtcagataaaattgttgttattgagaaaggcaatattgttcatcaacaggcgcgttctggtgctgatgaagaacaaattgcgtcatatctgtcggtttaa

SEQ ID NO: 133319 - DNA, 750 bp, Enterobacter cloacae; identical to SEQ ID NO: 111893

SEQ ID NO: 133320 - DNA, 1116 bp, Enterobacter cloacae
atgaaacgcatgcaaaattatccgctactgggtattgccctggtgataggccttatttttatcgtcatgccgctaaccctggatcttttccgtttaaacctgatcggtaaatacctgacttatgcatttgttgccgtcgggctggtactttgttggggctacagcggtattctgagcctggggcagggcatcttttttggcctcggcggttattgtatggccatgtttctcaagctggaagcttcctcgccagcggaaacaaaaatgcaaaccaccccgggcatcccggattttatggactggaatcagctaaccgctttgccctcgttctggcagccattccattcttttagtctgacaattctggctattttaatcgtgcccactatttgcgcatggattctcggcagcgcaatgtttaaacgccgcgttggcggggtgtacttcgctattatcacccaggctatctccgcgatcctgacgattcttattatcggacaacagggttacaccgggggaattaacggcatcacggatttacgcacgcttttaggttgggatatccgtactgattctgcacgctatatcctctactttattaatgctgttttactgatgctggttgtgagcgcgggctattttattgtgaatagcaaactcggccgactgatggttgccattcgcgataaggaagaccgcgttcgtttctctggttatgatgtcgcgaatatcaaaacggtggttttctgcattagcgctctgttttcggcgatcggtggcgcgatgttcactctgcaagtagggttcatgtcgccagggtttattggcactgttgcttcaattgaaatggtcgttttctgtgccgtgggcgggcgaggttctttgctgggggcagtatatggcgcccttatcgtcaatgccgccaagagcagtatttccgagtcttttcctgaactctggacgattgccatgggcctgctctttattgccgtcgtgctgattttcccgaaaggactggcagggctttatcagcaatatattcacccgatcgtgatgtcgctgctgcgcaaaaagagtatgaccaaacccagagtaaacaccggagtgctgaaatga

SEQ ID NO: 133321 - DNA, 927 bp, Enterobacter cloacae
atgttcagcgattataacttcgccgagttggcttccatttttgtcatgcaggggttttcggggctcagcctgttcgccgtgtttgttctgatgtcgcttggactcgctattatttttggccagatgggcgtgattaatatggctcatggcgagttcatgatcctgggtgcttatgtcacatggttgaccggtaagtttttcagcgcttatctgccttcaatcttcggcatctacttctttgttgccattgcccttgctttcctgtgtaccgccttgctgggtacgctcgttgagaaaatcctgatacggcatctgtataaacgccccctcgacacgctgctggcgacatggggtctgagcctgattctacagcagtgctatcgttcgctatttggtccccgcgaagtcggcgttgacttaccttcatggctaatggggtcgtatcagtttgccgacaatattgatattcctgttaatggggtatttgttctgctgctgaccgtagttattaccgcttttacggcctggctgatttatttctccgcctggggaataaaagtccgcgcggtggtacttaaccgccagatggccagcggggtgggtattaatacggctcaggtcgatagtcgaaccttcgcacttgggtgcggcatcgccgggatcgccggaagcgcctttaccatgatcggctcaacaggtccaacggctggccagcagtatatcgttgacaccttcctggtggtggtgtttggcggcgcgcaaagtttgctcggcacgctcgcctccgcatttgccatttcacaatcgcaatccacgctggagtttttcctgagcggttcaatggcgaaggtgattacgctactgatcgtggtcggcattctgctattgcgtccgcaaggtcttttcgccaaccgggtccgccgctag

SEQ ID NO: 133322 - DNA, 1281 bp, Enterobacter cloacae
atgaacattcgtgatttaccccagccacatagaaatatgaaaatccagagcccaggccggtttcaccaggcgtgcctcaaagcgaaacttttggcgattgccggcctgatgatggcagctaatacggccatcgccgccccggcgacgtcagtggttaataccacgggcctggcggtcaccgacaatagcgtcaaggtcgggatactgcattcatccacaggcacgatggccatcagtgaaaccggctcgattcaggctgaaaagctggctattgagcagattaacgctgccggaggggtactggggagaaaaattgaatatgtacaggaagacggggccagcgactggccgacctttgcagaaaaagcgcgtaagttactggtcagtgataaggtcgccgctatcttcggcggctggacttcggcttcccgcaaagccatgctgccggtacttgagcaatataacggcatgctctattacccaaccttttacgaagggcttgagcaatcgccaaacgttatttataccggacaggaagctactcaacagataatctccggcattgattgggtagttaaaaataaacatgcaaaaaccttctacctgcttggctctgattatatttggccgcgtactgcaaacaaaatcgcccgtcaccatattgaaaagctggggctgaaagtcgttggcgaagattattacccactcggtaatacgcagttcaattcggttattaacaaaataaaactcaagaagcctgatgttatctatgccattgttgtcggcggttcgaatgtggccttctataagcaattgaaggcggcggggatcgatatgacgcaggagaaaccgctgctgctgaccatctccgtcacggaagatgagatccgcggtattggcggcgaaaatatcgtcggcgcctatgcctcgatgaagtatttccagagtatggataatccggaaaataaaagctttgtcgccgcatttaaaaagcgctggggtaatggcatggttatcggcgatgtcactcaggcggcctatcttggcccatggttatggaaagcggcggttgagaaagctggctcgttcgacgtggacaaaattcgtaaggcctcgcccggtattgagttcaaagatgcgccggaagggtatgtacgcatccatgataaccatcatctgtggtccaaaacggttatcggtcgcgctcgtgcggatgggcagtacgacgtgatttatcagacgccagaacttatcgaaccgaacccattcccgaaagactaa

SEQ ID NO: 133323 - DNA, 3381 bp, Enterobacter cloacae
atgaccgttcagcaaaaggcgtttaaatcgcgcagacgctacaaccagtgggtgaccaatcagactctcgaggattttgcgctccgctatacgccggtctcggcacgacgctggagcgcaaagcaagttgttatgacagcgctcagcgcaattacctttttggcgcttgaagccattggcggcgcgctgacgttaacctatggatttaattatgtggtggtggcggttatcttagttagcattattatctttgcgctatcaatgccgattgccattaatgccgcaaaaaacggcctggatattgatttgctgacccgcggcgccggatttggctaccttggttccacggtgacctcgttaatctatgcttctttcacctttatatttttcgccctggaagccgctattatggcgatggcgcttaatatgctgtttggcctgccattgcactttggttatctgattggttccgttgttgttattcccctcgtcacctgggggttcacttttatttcccgttttcagcagttcacccagttttgctggctggcgctacagctattaccctttattttcattttaatacgtgaacatcatgtgctgcaaaactggatcgacttccctggttttattacagcccgcgatggttctttcgatttccttcagctcggcgccgtctgttccgtactgctctcactggtaagtcaagtgggagagcaggtcgatcaggttcgttttttaccaaagccacaacatccggcccgctggagatggtatggcgcagtaattgccgcaggtccggggtgggttgtcatcggcgccatcaagatcctgctcggctccttcctcgccgtgctggcgtttaattacggactcggcgcggaactggccagcgaacccacccatatgtatctggtggcatttagctatgtcacccattcatcatcaacgctactggcattaaccggtatttttgtggtgctctcccagctcaaaattaacgtcaccaatgcatatgccggctcgatcgcatggtctaattttttcctgcgcctgacccatcgtcatccagggcgcgtcgtgtggctgttttttaatgtcggtattgctctgttattgatggaacttggcgtttatcgcgtatttgaggatatcctgggcatttatgcggtggcggccacatcctggcttggcagcgtggttgccgatctcacgttaaataagtggcttaaattacgaccagcggaaatagagtttcgccgggcctatctctacgatatcaatcctgtcggcatcggttcgatgacgctcgccatgctctgcggtctctcagcctggatgggatggcttggtcatcctctacaggtttttgcctcaatgttatcgttgtgtctgacgtttatcaccgcccccttcatcgcctggctgactcgcggacgttactatttttcccggacgccggtgcaggtcacggcaacggaatgctgtgtctgcggtaattattttgaaaaaccagagatgagctattgtcctttttatcagggcagtatttgctcactatgttgttctctcgatgtccagtgcaacgatacttgcaaacctcatgcgcgctatacggaacaggcttcaaagcttatcgggatatttattaaagaaaaatcattacgcaaaattgatcccagagtgtggagttttatcagcattttgctgttattcagttccgtcatcggtctgcttttgatgctggttttcgctcagatgcgcgatgaattcggcagcgagcaggaccttctcgccgcggcgttatggaaagttttttttatcctgcttatcgtaaccggcgtcaccacctggctatttgtcctgacaaataaaagtcgccagattgcgcaagaggaattgcgcctgcaaagcgaccgtctgatgaaagaaattattgcccatgaagcaacggaccggcaattgcagcaggcaaaggaagatgccgacgatgctaatcaggccaaaagccgctatctcaccggcattactcatgaactcagaacgccgctcaatgcgatgctgggttatgcgcaattactcgaacgtgctgatgatatccccccagcccggcagcgcggtatcggtattatgcgcagaagcggcgagcatctggctaatctaattgagggattactggatatttcgaaaattgaagcgggaaaattagaaatatatcgtgaagaagtgcgcattggcgatttggtgcagcaactggtcgccatgtttgaacaacaggccagcgataaaggactgacatttcactacaacgccccacactggctgcccgaggcggtgatgacggatgagaaacgcctccggcaaattcttatcaatctgctttctaatgcggttaaattcacggacagaggcagtgtaaccctcgatttccagtatcgtagcgaggtggcgtttttctcggttcacgataccggcatcggcatcgcccctgagaacctggaacgcatctttaagcctttcgaacgcgtatccggcgatagtcgtcggatcgggacgggccttgggctgacgattacccggcttctgacttatatcatgggtggcgatctccaggtggaaagcatccgtggcgaaggcacaacgtttaaactcaccctgatgctgccaagctatagcggggatgcctaccaacccgccgagcctgcggtaatcaccggatatccaggcaagcgacacaccctgctggtagttgacgatgatgaatcccatcggcagctgatgatggatttactcacgcccataggcttcacgctgctaacagccgaaaatggtcatgtcgcgctacatttagcccggcaaaatcatatcgaccttcttcttctggatgttgcaatgcctgaaatgtcggggtgggaactgctacgtcagttacgtaataagggacaattagcgccggtaattatgatttctgcggaagcggatgagggtaaatgccgccatttcactggcgaaggggaagttcgctacctggttaaaccgctgcgtttccctttactactggagaacatcggtgaaatattgcatctccagtggcgcacggaatgtcagccgccaaagcagccggaaatacatgaaccacgctcgcagcttacccgtgtccagattgagtcgttaaaagagatggccagattgggttatgtgagagggtttcgtgaactgctggacaaacatatttccgctaaccagatcagcaaagccgagggcgaaaaatttgccgagttgctgaggcgctttcgattcaaagagatagtcgagagtcttgaacgcccggagggagagaaaaatggcaatagcaaagccgacggtacttatcgtcgatga

SEQ ID NO: 133324 - DNA, 921 bp, Enterobacter cloacae
atggcaatagcaaagccgacggtacttatcgtcgatgatgatatcaacacggtaagtatgttgaatgacacgcttgatgaagccggttttaccgttctggtcgctctggagggtaatcaagccctttcgataaccagccagataaccccagatatcattctgcttgatgccgtaatgccgcatctggatgggttttcaaccagtaagcgcctgcggcaaaatccggggctgcggcataccccgattattttcatgacaggcctgagtgatacgcagaatatcgttgatgcatttgatgccggggtggtcgattacgtaattaagccgatacgcacggaagagctggttgtcagaatgcgtacccacttgcggaactcaaaattaacggtcagtgcctatagcgcgatggattccgttggccagaccttatgtgtttttagcaaagaggggcaactacgctgggccacgcccaatgcatggcaactgatgaaaaacttcagcgataccgggtatgaacccaataaaaaaatagtaaaccggatcatcggttggctgaacaatacggaaggtttaaaaatacccttagatctttcatcgcaaggcatcgctctgaaattctatctttcacgccggaccgctgaaggagaaagtttgctacgtattgaagagatcaaaggacatgaagaagtcgaagcggtgaaacgcctgaaaaacaacctagggctgacgcaacgagaagccgaagtcctcctgtggattgccaggggaaaaacaaaccgcgaaattggcgatattttaaaccttagccccagaaccgtgaataaacaccttgaaattgtatttccaaagctgagtgtggacaatcgcaccgcagcggcagcgttggcaataaattcgctatatgccagggagaaaatgtag

SEQ ID NO: 133325 - DNA, 753 bp, Enterobacter cloacae
atggccatactcggattacagggtgtccgtggcggtgtgggtaccacatcagttaccgcggcgctggcgtggtcattacagcttttaggtgaatcggtgctggttattgacgcctgcgccgataatttgttgcgtatgtcgtttaacgtcgacttttctcgtgaagagggctgggcccgggcactgcttgatgataaagactggcaggatgcagggatgcgctatacctcccagctcgatctgctgccgtttgggcaactgaccaccacggaacgcgagaatgaagccgcgtatcagcgcctgttttcgcaattcacgctggcgctgcaaaccctgaaagaaaagggacactacaagtggatcctgctggatctgccgcacggcgccggcacgctgacccgacagcttatcgcccagtgcgatcatatactttccatcgtcaacgtcgatgcgaactgccatatccgcctgcatcagcaggggctgcctcagaacgctcatcttctgattaacgatttgcgcattggcagccagattcaggacgatctgtatcaggtctggctgcaaagccagcgccgtctgcttcccattgtcatccatcgtgatgaggggatggcggaatgccttgcgtctaagcaaccgctcggcgaataccgcagcgattcactggcggcagaagagatcctgacgctggctaactggtgtctgctgaacttcgccaaccgggcggagcatgcagggagttctgtatga

SEQ ID NO: 133326 - DNA, 2682 bp, Enterobacter cloacae; identical to SEQ ID NO: 105740

SEQ ID NO: 133327 - DNA, 540 bp, Enterobacter cloacae
atggattccaaccctagaatgcaaatagcccccgaaaaccaggtgctgcaccgggtagcgttgcgcacggatgatattgaccagacgcatgcagagttgcgcagtcaagggttacaggtctcgccaattgttaacggccagcgcaacgacccgcaaggaaacgtcattagctggcgtatttttaccattgatggggattttaacggcctgccgtatccctttgttctgcaatggggagaagatgataacgcacggctaacgcggctacgcgctcaggggctcgacaagccgcatccggcaggcgaagtgacattacagagcgccatttttgaggtgcaggatccgcaggccgcgcgtgagcactggcacgcgttgttcggttttaatgaactgtctgaaggtctgtccgcaggacagcagcgctttctctttcgtcagggggaggccaatcgattagtcgaactggtttttaacgcctctgatccgtcgctgaaaggccagcgttttcgcgtcggtcgcggtgaatatcgctttcaataa

SEQ ID NO: 133328 - DNA, 765 bp, Enterobacter cloacae
atgaccagcccagtaaaacagaccagaaggccgcgcaggagctatctcgacgcgcgcaaaaaactactcggaatgctcaattcacccgatttcaacagcggcgatcagatccccgcagagcgcgaattaagcgaggtgttgggtatcagccgtgtgacagtgcgaaaaatcatcactgaattgattgacgaaggcgtgctggaaagacgggggaatcagggaacctggttggtcgatacggcgattgaacgcccgctacagcctgcgctgggcatcagtaaaattcttgaattgaatggcgcagtgcccagcagccagttgatctacttccatatttccgcggccagcgcccgcattgcacggctactgcacattgaagagggcgatcctttagtcatgatcaaacgcctgcgcctggctgatggacaccctttctgcatcgaaaccagttacttacctcaagcccgtgtcgcggatttgagcgctgatatgttagaaaaagaagggtcgctttatcgcctgctggctgaacgttacgctattcacgatgtgtacgatgaaggaaccatccgggcagcggcgatgagcgaagaggagcatcaactgttgcaggcgaaaccagagagcccggcgctggtctaccgtggtgtgatttacgatagccagcatcagccgattgagtatctggtctcggtgaatcacccgcaacgcgtcgcttttcgcatcaatggcggcctgaaggaagtggacgtgctttcaccgtga

SEQ ID NO: 133329 - DNA, 786 bp, Enterobacter cloacae
atgaaaattaaaaaagccatcgccgggcttgcttcagcgatagccatgttaggctgcattcacacgtcggcggcggcggatcagctgcgtttcggtatcgacccgaccttcccaccgtttgaatcgaaaaatgccaatggtcagctcatcggtttcgatatcgaccttggtaatgcgatttgcgcggagatgaaagtgcaatgctcctgggtacagaacagcttcgacgggcttattccggcacttcaggcaaagaaatttgatgccattctttcttctctgtcgatcactgatgaacgtaaaaaagccatctctttcagtgacaaactcttcaatactcccgcattcctggtgaccgctaaaggcagttcgctcgcccccacggcggcatcgctgaaaggtaaacgtattggcgtccagcagggttcggtatttgaaagttatgccaacaaatactggcgcaacgcgggcgttgaggtggttgcttatccggatgcggaatcggtctatgccgatctgattaatggccgccttgatggcacgctcgatgatgcggtggtgatcactgaagcgctgttgagcaaaccccagggccaaaagttcacgctaatccagccgcaagtcaaagatgatgagatctttgggcccggcaccgggatcgggttacggcaggatgatatagatttacaggcccgttttaacaaggcgatcgccgcgattcgcgccaacggcacctatgatcgtttagcgaaaaaatacttcaatttcaatatctacggtgattaa

SEQ ID NO: 133330 - DNA, 975 bp, Enterobacter cloacae
atgcagacccaacccatcattacctccctgatgagcagccattttcaggataagccgctgcgtcaggttttcctggtcgcttgcggtggctcgctggtcgatatgtatcctgctcattatttcctcaatgagcagagtgaaaatctgcgctcatggatgatgactgccaatgaatttgtgcatgctgcaccgcgcgcgttaggtgcctcgtcactcgtgattgtctgttcgcatggtggcaacacgccagagtctgtggctgcggctcaactggcaaaaaaccgtggtgccgccactatcacgcttacgcacaatgcggaagcggaactgctgcaatgggccgaccataacctgttatataaatggggtgatgatacgctggtcaccgaaaacccgatggcgctgatcctcagcctgtgcatggatacgctgtatcaggtggaagattttgccgaatggcaggctttccagcatggctttgcgcaaatcgatacggtgatccgccaggcccgcgctaaggtggtaacccgttgcgccgcgttcgcagaacgctatcagcatgagtccctgttctatgtgctttcgagtggcgcctcatacgggcatgcctatggattcgccatctgctcactgatggaaatgcagcgtctcgatgccgcttctattcacagcggcgagttctttcatggcccatttgaagtcaccgataatcacgtaccctttatcctcctgatgaatgaaggccgcacacgtgctctggatcagcgtgcgcaggcgttcctgaatcgttataacgacaaaacagaggttgtggacgcccgcgagttgggcctgaatgcgctgcctgcatcagtggtggactactttaacccggtgctgttttacagcatcatgtgcgactaccgtgcggcactggctgatatccgccagcatccgctctcaacccgccgctatatgggcgtggtggattactaa

SEQ ID NO: 133331 - DNA, 813 bp, Enterobacter cloacae
atgaaagtcattggcataggcgacaacgttgtcgataaatatgaacaccggcgtgtacggtatcctggaggcaacgcgctcaatttcagcgtgtatgcggcgatgctggatgcatcggctgcctatctgggcatttttggtaacgatgcggcggctgaccatgtgatgcgtgcgctggcaaagttcggcatcgatatacgccattgccgtcaggttgcgggtgaaaatggctatgcgcggctgacgattgaacagggggaacgggtgtttctcggttcgaatctcggcggtgtgcgccagacggaatcgatggactttattttgcaacagatggactggcttaatgatttctcgctgatccacaccagcagctacagctatattgatgcgcaactacctgcgctggcaacgttatccggatggctttcatatgatttctcagatgattttgtcatcgcacaggcgctgccattatgccgctggctcgacgcggcatttttctcctgtgcgggatggtcgctggtagaaacgcgtgaacttctggtgcaggcggtgcaggcaggcagcggtttggcggtcgcgacgcgtggcgagcaaggtgcacttctgttcgatggtaaagactggtatcagcaggagccggagacggtaacaccagtggatacattaggtgcgggtgatgcgtttatcactgcgtttctgctccatttacgtcagcacggtaatatcaccgcagcactgcaggctgctgcgcattttgcagcgagaatttgcctggtggacggcgccttcggcgaaggcgaagcttattaa

SEQ ID NO: 133332 - DNA, 276 bp, Enterobacter cloacae
atgaaagcactggaaatggcatgggaaacccgtggtaagcccgtcggggtgatgttcctcagcgatcaaggcagccattatacgagcaggcagttccggcagttactgtggcgataccggatcaggcagagtatgagtcggcgtggaaactgctgggataacagcccaatggagcgcttcttcaggagtctgaagaacgaatgggtgccggcgacgggctatgtaagcttcagcgatgcagctcacgcaataacggactatatcgttggatattag

SEQ ID NO: 133333 - DNA, 750 bp, Enterobacter cloacae
atgaaacatgaaattgcggtgagtgtaataatccccgtttacaacgcagaaaaaaccatcaaatccttgatcgaagatatcttattagaagacaggatcaacattgaagttattatcgttaacgatggttcctcagacaacacgtcaacgataattaactccataaaggatggcagagttcaagttattgaacaaaataataaaggtgtatacgcggccagaaataatggattagacaagcataaaggccagtgggtcatgtttctggatgccgatgacgatgtgtctgaaggattcatttataacaggtacatccaggcttccagccataatgccgatgtgcttttgtccaatgcctggaagctttggcatgaaagcgataataaaaaacctgtacataccaaccaaccttatgatgaaattttatccggcaatgcgtgggtaagtcacgcagtaaaagtcagggaatggccacattacctttggttacagatagttagatctgactatatcaggaataacaatctgtcatttcatgatggccggagtcataaagatattttatggacgatggaattggcgttggcaaatgggcgtttctacatatcaaaagatatggactacacctacaagtacaataatgaatccatcacaaatcgcggtgattatttcgacgacagagcagaatgctatattgatgtaatatctaaaaccatcggccacgcaaagtcgaaaaaaataatgatttga

SEQ ID NO: 133334 - DNA, 1434 bp, Enterobacter cloacae
atgttgtgtcttcttactgcatctatcgccattatgtttatttcaataacgcgaaatgtacttacagctttaagtatctcaacggtatatgctagtgctgcgttaacctactcagatggtacgctttctattttgaatgccaatggttgggctaaattctggagtaattttcagccattcacccactattaccgaatacagttagagcaggtcaatcttggcagttatatcacaacgagtttttcccaatttggtatcttgtcactctatattatcattcctttaactatttcttttattattcttgcaagacgtaattatagtcaacagccggtagtctttcaggagaatgtaaaactcgatggtgttttacagagttttattagtactgttaaatcaataagaaaatgtcaacctatattttcaacggcagttatgtcattgattctttatagtgttttttatccaagcgcctacaaggcacaaattaacctcaaacttcccgttgcggtagttgattttgatcaatcatcattgtcacgtaatctgatcgataatctgcaaaccacacgtgaaattgatgttacccaggttgatagttctctgtctgatgcattaattttattgcgaaacagaaaagtttccgcggtgatagctattgataatgattttaaaaagaatcttatcagaggagagaacgcagggatcgatgtgcacctatcaggcggttatatggctgttgctgccgatttgagaacggcagtgactaatgcaataaacgctacgacggatgttaatagattaacatctaaagctactaataacatcattcctcttcctctatataatccaacattgggatacgaatcttttattatgccgctggtttttattataatacttcagcaaacacttatctttaccagttctatgcttattgcattgcgtaatagtatcggtttaacaaaaattaattcatctcagtttatcgggacgttttttgggttgtttatggttggtttttttggagcggtttttgtgtttggttgggtttattatttgcaagggtatcccaatgaaggaagtatgtttttacaggttttgttgattgttcttttttctgcggcagtaagttcaatggggatgttgattggtagttttctggataacatcaaccgtccaatgcagatcctatcggctacctcgatggttattttttatgcgtcaggagcctcgtttcctacatttaatatgcctgaatgggttgtgaaaacgatggtgattttcccatcaagtacaatgataagtgggtttactatgctgaactctcagggggcaggtatctatgagttggcacccgtaataataaaaatatctttgctagcaattatattatttttacttgctatgtatcgtctagtttggcagaagtaa

SEQ ID NO: 133335 - DNA, 753 bp, Enterobacter cloacae
atgagtagacaacgggtatcaaaaggtagtgttataccgaaaaaagaattcaaaatagcaactgtgctatcttcccttcctgttggttgtgatttcgattctttcttttctgagtttaaacgtgtctatccgaaggattgggaaagagttaataagcgctaccaggagcatgagaggttaacaaaacctggtaaatcacacccgatggctcatcctttatcttatatgcgaactgcatttcgtagcttccaacaaaatttagttaaaaattccatgtcagcagcggattacttagtttcacttgaagaatctaaagataaatatatagaatctgagccaacagaaaaagcaaggaaagaaataataataaataaaaacatcgtatattcatttgagaaaagaatgctggctgttcatttgcttggaaaatataaatgtcagcagtgtatcgataccctgattgatttgatgaataacgaccatatttttgatgtgagagagttagcttatgaaaaattgattcggttcgggttagacgtcggccctcaattaaaaaaaccttcacatcacacggatcctcagataatgcaaaaaatagcatcggtaggtttttcctctgagcaagtgaaaacaaaagaatggtgtgagcgagcaatcaacgagttccgtaaaaagtaccctattgaatacgacctgtacactcactcaaaacgcaatcagttcaaggcttggtttagaaagcagatcagctaa

SEQ ID NO: 133336 - DNA, 354 bp, Enterobacter cloacae
atggattcgctcttagcgattttaggtggggttggtttaggcgctattttaaaatcaattgtggattattttttaaataaaaaatccggaggaaataaaactcaatatgccgaaacatgtgatacatatatcgggattattttggctttacataagatatcagtcataaaaaatcacgagacatctaaagatttcgggcttgcacacatgaaggtcaagctatttggttcagacaaagttgcaagtctgataagtgaagctgtttatactgatgatgaagctaggaaaaatgaaatcttagagaaagacatgattgatgcgatgaaagatgatttacgtagtaaaaggacgtaa

SEQ ID NO: 133337 - DNA, 579 bp, Enterobacter cloacae
atgactgaaatacggatcggctatgctcggtgctccactgataagcaggatttgaccgcacagcaggaagcgctggtgaaactcggtgtttcaccggacaggatttacctcgacaaagggctgaccggttcaaaccggcagagaccgggtctggaccaagcactggccgctgttcgcagtggtgacacactggtcgtgccaaaacttgaccgtctggcccgttcggtaccggatgcgcgtcaaattgccgatgccctgcaggccagaggcgtaaaactggcactgggaaccagcatctatgatccggtagacccgatggggaaaatgttcttcaacgtactggccactttcgccgagtttgaaggtgatctgataaggctgcgcacccgggaaggaatggccattgcgcgtgcgaagggaaagttacgaggaaaacagccaaaattatctgataaacaacaaaaagaattgtgccggatgcatgaaaccgggcagtactcgatcagcgatctggctgaattattttctgtttcgcggccaactgtttatcgaacgcttgctcgtaaggtagttgggtag

SEQ ID NO: 133338 - DNA, 2595 bp, Enterobacter cloacae
atgacaactcgtgatcaagctacaggcaaaagtgaacgactggcggttttaaacagtgctgagcaggaagcgctgtatagtcttcctgatttcgatgatacacagcggctggagtttctggcgctggatgaatccgaactggctctggcctgtagtcgtcaggggcttcctgcccagatttattgcattcatcagatcgcttactttaaagccaaacacctatttttccgcttcgggtggagtgatgttaaggatgacagcaactttatcctgagccgttactttcatggtgaatcacttccggaccaatctcctactaagcatgaacgctatgcgcagcgggaaaaaatctgcgcactgtatggttaccgaccgtggtcatcttcgctgtctgcacaacttgagcaacaggccgcccacattgttcaccgcgatgtgacgcccggttttgtcgccactgagctgattatctggctcaacgcgcataaaattatccggcccggttacaccacgctccaggagttggtaaggaaggcgctttctgatgaaaggcagcggctggagcgtattctggcggaacggcttgatgatacgatgattgctaagctggaaaagctgactgaacgtgatgatactctttcccggctcgcggttctcaggcaggatgcgcgtgactttggctggcgccagatgctccatgaacgggaaaaacgggccatactggagccgctgcaccgtaaagcctgcgacattttaccggtactgaatatttctcagcaaaatctgctgtactacgccagtctggctaatttctataccgtttatgatctccgcaacctgaagccggagcagacccgcctttacctgctgtgttatgcctgggttcgctatcgccagttcagtgacaacctggtggatgcgatgtttttccatatgaaacagtttgaggatgagagccgcagcgtggccaaacagcttatggctgacgtgcaggaaaaacaccggcgtgaaacctcaaaaatcgggcgtctgttgtcgctttatgttgacgacagcgttccggatcccaccacctttggcgaagtccgtcgtcgcgcctggaaaatcatgccacgggaggcgctgaaaagcaccgcgcaacgcatgagtgtaaaacccgtcagtaaactggcgctacagtggcaggcggtggacggaatgacggcattaatccggcgtcacctgcgaccattatatctgtcactcgatctcaccagtgtggtccaggacagcccgtgggctgaggcgctgcactggctcagaatagtgttcagcaaaaagcagacgcttttgcagcggccacttgaggaatgccctccagaaacgttaccagcgcggttgcgcccgtacctgctggaatacggtgaggatggtgagcctacaggcctgaatgccgggcgctatgagttctggctctatcgtcagataagaaagcgttttcaatcgggtgagttccacctcaatgacagtctccggcaccgccatctttctgatgaactggtaccggaaggggaacaggctacagtgctggctgaaatgaatattccctttctgcagaagcccatcaaagcacagctaagagcactgtcgaccgaactgcaccgacagtggaaagcgtttaaccgcgagcttaagcaggggaaactggtacatctggaatacgataaagaaacgcagaaactgacctggcataaatcggtggtcagtcgccataaggcacaggagaaacgtttttatgagcagttgccattctgcgatgtgaccgatgtcttccgctttgttaacgggcagtgccggttcctacccgccatgaagccgctgcagccccgttatgcaaaaaaagaagctgatgcagacagcctgatggcggtcatcgttgctcaggcgatgaatcatggcaatcatgtaatggctcgaaccagcgatattccgttccatgtgctggaaaccacgtacgaacagtacctccgcctggcatcactgctcacggccaatgactgcatcaccgatgccatagaggcactgccaatttttccgcactattcgtttgatccggagacgctttatggtgctgttgacgggcagaaatttggtgttgagcgcccgacagtgaaagccaggtattcgcgtaaatactttggtcgtggtaaaggcatggtggcttatacgctgctgtgcaaccatattccgatcaacggatacctgattggcacaaatgactatgaaggtcaccatgtctttgatatctggtaccggaatacctcagaggtgaaacctacggccatcaccggtgacatgcacagtatcaacaaagctaactttgcgcttctgaactggtttggccttcgctttgaacctcattttactgacctgaacaagcaactgcaggagctgtactgcaccagagacccatcggcatataaaaagtgcctgattcagcctgccggacagattgacctgaaccttatcacccgagaaaaaagcaacctcgaacgcatcgtcgccacgctgggactgaaagaaatgacgcagggtgacctgctccccgttgattag

SEQ ID NO: 133339 - DNA, 990 bp, Enterobacter cloacae
ttgtctgaatatgcactcaatgatatttacaatcttgttcgaattttagacgacccaaaaactgaagaaaccaagaaaaacaatacattaagatatatatgctccatgtttgcagaactcgcttactatcacatcccgaaatgggaaatcgatgcacagaaacgagtcaaattaattccttgccaaggttatcgctcatggataaaggatggaggcgaaacaattgacttaagtgcagtaacacagtccctcgatttgcctggattcgaagtttccactcgaagtgtcgtggccgtaggacgagttgtacaggacaaacttttcattagtgtacgcggtactgcatttctgtatgactggagattaaactttcgggccagtcctgtcgctgttgacatgggcataattgaagaccactggtttataccgtacaacagagctcacatcgttcgattccacggaggctttgcttatgaagccatacgcttatttccgctgattaagaaaactctcaactcactggattatcaaaataaagagatatacatttgtggacattcattaggaggagctgtggcagctatactgcaggaattgctacgatttaatagccatccagcctatattttcggtgcgccaagatatgcagatctaccggcttatttccatcgcgaacagctcccaccagttcaaactcggcgaccagtcgatatagtaccgattttgcctcctcgctttatggggtatgttgatcatccatgtgaattatctacggacggtacagagtacttcgaccctgaaccttactctcaactgtttggtgattggttgcgttggggaaaattcttgtacgacgggtttgaacctcatgatatagaaaattatcgaaaagaaattggtttatcagcaggtcttgttgatgttgatttgcctcttattccttttgagcaaataaagaaaaatgatttaaactccaaacaaaaaaactga

SEQ ID NO: 133340 - DNA, 780 bp, Enterobacter cloacae
gtggagacgattgcggcacgcaataagctgacggccagcgtggccgacacgctgaaagccgtcgccgtgcctcacattgaccagtcgcaggaatcggacgcggtgtttctgtcccgcctggctgaacggaacggggcgtcggtttcggtaaaagcggggaaactgttattcctgaaagcggggagcggtaaaactgccagcggtaagcccattccgcagatgacgcttgagcgcggcgacggcgatcgtcatcagtttgccattgctgaccgggaagcctacaccggcgtgacggcaaaatggctgcacaccaaagaccccaagccgcaaaagcaaaaggtgaagctcaaacgtaagcccaaagagaagcacctccgcgcactgcagcacccgaaagcgaccaaagccccgggaaaggccaaagccaaaaaagagcaggaagcgcgcgagggtgagtatatggccggtgaggctgacaacgtgctggaactgacgaccatctacgcgactaaggcgcaggccatgcgcgccgcgcaggcgaagtgggacaaactgcagcgcggcgttgcggagttttcaatcttgctggcgattggccgggcagatttatttcctgaaacgcccatcgcggtgaaagggtttaagcgcgtcatagacgatcaggcgtggataatcagccgggtggtgcataacctcaacagcaacggctacacgacgggcttagagcttgaggttagggttttggatgtggagtatgaaagcgaagaattaacgcagtga

SEQ ID NO: 133341 - DNA, 330 bp, Enterobacter cloacae
atgacggtgcgttatctgggaatgaacagccagaccggcctcagtatctctgaggttgagcatatccggcaaagcgtacgcgacattctggtcacgccggttggctcgcgcgtcatgcgccgtgaatacggctcgctcctgtcgcagatgattgaccagccgcagaccccggcgctgcgcctgcagattatggccgcgtgctattccgcgatccagaagtgggagccccgcgtaaatctctcgaccatcacctttgaacggtcggagatccgcgctgataaaaaaagggacgttcacggtcgacgaaatcgagcacaggggcgcacctga

SEQ ID NO: 133342 - DNA, 1317 bp, Enterobacter cloacae
atgtttgagttgtctgcggaaaaatttaatcagatgcgtcgagagattgattatcctcctttattcgaattattcaaaaaggagttgcctcgttttgaaaaatggatgaagcaacaagggattaccaaagagatcatgtttgaacatggtttggcaagatttttaataagtgatgttattctttatctatgcaagcaacacggtaaggtttatttatgggatgacggggttatggatttcgaggaaaagaaaaaaagtgcatggatagaagattttattgtgttaaccccttacttcctctggttaaggggtgaagtcggtgatgacgagtgcaatgtggcgagaaataaattttctattaatgcatttatgaaggggcaccattattttatgggtaaagttcctttgagaaatttaggtgatggaattttaaaaggtacaaatctttcaagcaagttattagattttgtatcgctagataacctaaaccttatacagccaatgaataatagtcacctctacatatattgttcctctgctgttaatctcatgatagatggtagtgtcgcatttcttaagtttaaagaatgtaagttatcggaaattcaaataaagcataatgggataattttacaaaatggaagttttcaagaattttcttttaatagatgtcatattgatttgaaactcagttcggcaaatatcatgcacatgaaagttaatggttgtaattttaatgcggtttgtgattttgctcgttttgatagccaatgtgagttcacctatgatcgaaaaaggaagttttcatatcaatcagaaagtgattttttcgatgttgttacaaagttgtttagtaatgcaaatgattattcaaaagcaggtgagtattactataagaaaagaaaagcattgatgttagagtcgctttgttcatggcaaaattttagagatcatacgtttagaatgaccaagaggcaaaggttcaggtttaaggtgaaaatgtttttgaaaagttttcctgatgcatttaactattttgcttggggttttggggagaggccattaagagctcttggtacatctttattgatcgtttgtctctctactattgtttattactttagtgcgaagtccaatactcaaacatttgttgaggcactttattttagtattgttacatttaccacgctaggctttggtgatattactcaagaaagcgattttttgcgcttattttcagcggttgaatcattttccgggttggttcttatggggttatttcttgctggttatgcctctaagaccaaacgatattag

SEQ ID NO: 133343 - DNA, 453 bp, Enterobacter cloacae
atgagtgaatttaagccctttgacgacagactcaatggtctgattgctgccctgtcaccggcttcacgccgtaagctggccggagagatagcaaaggagctgcgcaagtcgcaacagcaacgcatcaagctgcagaaagccccggacggctcgccgtatcaggcgagaaagcgtcagccgctcagggctaagaccgggcggattaagcgggcgatgttccagaagctccgcacgagccggtacatgaaagccactggccgtgaaaacagtgccgtggttgagtttaccggcaaagtgcagcgcatcgcccagattcatcattacggccttaaagaccggccaaatcgatatgtttcagatttaaagtacccagaacgaaaattgttgggtgttaatcctagcgataaagagcttatagaagagataatatacaaagtatgttttttgaggtga

SEQ ID NO: 133344 - DNA, 639 bp, Enterobacter cloacae
atggtaactgttaatctcaagtcaacacgcacaaatccgaaatatttgatggcgttgatggacaagctggcgccttatctgcagtataagcgcgtcgaagtaaatacccgttacaccataacggctcagcggcagtccccctgctattttatccgcacgggtgcagtttccatgtaccggcagccggatgacattctcatcgatctgtttgatgcccccacactgcgcggcgtgattgccttaccgccggaaactctttcggtatacgtcatcaaaactatcgtaccctctgaaatagcgattatcgatcgtgaaaaactgttcgcgcttcttaccgagcacaatctttgggaacttttggctgaccatctactggaagcaagcagcatggttgtcgagaggatgtttaaattaatatccccgacgacctataatgttgtccgccatcaactctatgaactgatcaaccttccggaggacgttcgagaaaccattcttgcggaaaattacattcgcagtaaaacccgcctctcccgcagcggtattatgcgcatcctctctgatttaaaggatggcggatatatcgttattgttaaaggaatcctaaaagaagttcatcaccttccggagaattattaa

SEQ ID NO: 133345 - DNA, 702 bp, Enterobacter cloacae
  misc_feature (680)..(689): n is a, c, g, or t
atgaaagatagtttggcggggaatctaaacaacagactcgattcactgcatacaatgcgcggtctggcagcagttacagtaatgctttttcattttagctggattttagattctgcgtatgatgggctaggtaagagtttaatgaaatatggttaccttggtgtagatatattttttattattagcggattcgtcatagcgatgtctactagcaaggtaaactatgacattaatggttgctttgtatttgttaagcatcgtctgaaacgtgtgctgcctgcatattatttttggttatttattgcattcataactggtggggcaatgagtacgttccattattcagaaaaagtagaaaatttgattagcgcattcacattaacaccagttacatctcagaacgggccgctttatctaaacaatgaaagtatgtacggaatcagatggtcactgatatacgaaatttatttttacttacttgtttcattatctatttttattaaaaacagaacttttgctttagccttaatcattatagcaatggtatttgccgttcctgcaatgattggcttctcaccaactttaagtgacattggtattgagtcagataacaaattcattaatctggcaacaaatcccataattattttatttctttatggtgttatttttcaaaaggnnnnnnnnnntatagtcatataa

SEQ ID NO: 133346 - DNA, 282 bp, Enterobacter cloacae
atgctattcctttttgtagctttaactataaatgaagatctttttaaaaacaaaactccgaaattcgctctattcttaggtgacatttcttactctctttacctgatacacacattaatgaattcaggattagacaagcgccttactgaaataggatttcctaacgggtggttgaaatttggtttgtattgctttatttcaatcattcttgcatatgcttcatataattatatcgagaaacctttttttaaaaagaatgcaaagcatgcggtgtctggttaa

SEQ ID NO: 133347 - DNA, 474 bp, Enterobacter cloacae
atggcgatttataataaagatacaaaacagtattccattagtggttataacaattatgcatggtcagcttcaaaaaatgttttctaccttattactgacttgattacatatgtcagagcggggaactggcctagtgatgctgtagaggtatcagacgatgtatttaacgagtttgctgccttccagaatgaaaacgggatgatcagaggtgtcggtagtgatggtcttcctgcatgggtgacgccacctgaaccttcaaaggaactgctgatacgaaatgcagaagctaatcgtaatacgcttactgcaaaagctagccttgaaattgatatgttgatggatgcagagtctgatggaacaattaccgatgatgaaagaaaattactggcaaaatggaaaacttatcgcctttcattacgtcgacttgatttaacaacggcaccggacatcgactggcctgaaatccccgtctga

SEQ ID NO: 133348 - DNA, 1365 bp, Enterobacter cloacae
atggcaaaaaacgagtttaaacccttctccactgcgggcggggctaacgttatttcacaggctgactatgaggtcttggcagccctgtcaaccggattcacctcaggagtggcaaaggctaacgaaattaacaaagtcctgcggcaggcatctttcgttgcagctgcactcgctcagtttatcagtgacaaaaccaatagtgatgtactggacgatggcagtctgtctgggtttgaaacgaaactgattgcagcccttaatgcactttcacagccgctggatgccacgcttacagcgctcgccgggttgcaaactggccctaataaagtcccctattttacggacgcggatattgcggcactgacagacctgactgtagtggggagaaatattataggaaaagggtctgtcagcgaggtagtgcaatatctcggattacaaaatgccctggttaagggttcttatgggttagggtcacgggatagccagagcgcggccagcaaagagcatgttggtagttttttctacgagccctttcagcctggcaccctttatccagatagtgttgttgccatcgaatccgcaggccccacaactcaggagtgggggcagtttgcggtttcctatggtgctgctattcgagtttttgctgctcacaaatcatattcaggtcagcctgaaacgacggagctttaccatgaccaaaggaaaccaacggccagtgatgtaggggcatatcctttaactggtggcattcttaacggcaatatgtccgctacgggcagcgtaacatctggggccgggaaagatatttcatcagctcaggatttatgggcaggaagagatatctatgctcaccgaaatttaagcgtgacctccattgcctcagtcggttctgatttgactgttggaggcagcgttggtgttacgggaaacgtcgatgctggtggctttgttcgctcaggtgctggtaaggatgtggtatcacaaaatgatatctgggcatctcgaaatatttatgaaaatggccagcgtgtctatagcccaaacaacccaccgcctaataaattcagcaaatcgctgaataccatttcatgggaaaaaaaccttgaaacgggtgtaattcgacaatggggatatgttgctgttagcgataatgattttgtcagcgtaaacttaccgctagcgtttccttcttccttcttgtgtcttaacgttactccaagtgcagcaggacggattgcgggtgaggatgttctatccgcgcatgggcaaatcaccagcaacactacatttggtgttgggctgtctgctaattttcagggtagttatacgggcgtgtatttcgaggcaataggagtttaa

SEQ ID NO: 133349 - DNA, 657 bp, Enterobacter cloacae
atgagcaaatacacggaaagaataacgaattaccacgctactaagcctctttttgaacaacacgttgacctgataacccggccattaaccgacatcgtaaaatcacaggaaagctttatagctgcgtttgacctcgatcgggccgtgggtgtgcagctcgacgtcgttggggaatgggtggggcgtggcagaacagtgagcgtacctatcgcggacgtctatttctcctgggacactgaagggcttggatgggatcaaggtagctggcaagggccattcgaccctgatacgggtttcacccgtctgagtgacgatacgtaccgtgtggtactgaaagcgcaaatcgcgattaacacctgggatggcacgatcggccatcttgaggacattctcgaaaccatctttgccggttccggaatagaaatgcagatcatcgacaaccaggacatgagcatcacgataaatgctatcgccattaatggaatagcaaacacatcggctgagcttatttccgttatcaaagcaggcgagctgaatatcaaagccggtggcgtgagagttaaaaacctcaatgtcattgatcccgctcgtcctctattcggttttgacacacagagtatcgctatagccggttatgacgccggatactggagctaa

SEQ ID NO: 133350 - DNA, 1542 bp, Enterobacter cloacae; identical to SEQ ID NO: 30088

SEQ ID NO: 133351 - DNA, 876 bp, Enterobacter cloacae
atggtgacaaagagagtgcaacggatgatgttcgcggcggcggcgtgcattccgctgctgctgggcagcgcgccgctttatgcgcagacgagtgcggtgcagcaaaagctggcggcgctggagaaaagcagcggagggcggctgggcgtcgcgctcatcgataccgcagataatacgcaggtgctttatcgcggtgatgaacgctttccaatgtgcagtaccagtaaagttatggcggccgcggcggtgcttaagcagagtgaaacgcaaaagcagctgcttaatcagcctgtcgagatcaagcctgccgatctggttaactacaatccgattgccgaaaaacacgtcaacggcacaatgacgctggcagagctgagcgcggccgcgttgcagtacagcgacaataccgccatgaacaaattgattgcccagctcggtggcccgggaggcgtgacggcttttgcccgcgcgatcggcgatgagacgtttcgtctggatcgcactgaacctacgctgaataccgccattcccggcgacccgagagacaccaccacgccgcgggcgatggcacagacgttgcgtcagcttacgctgggtcatgcgctgggcgaaacccagcgggcgcagttggtgacgtggctcaaaggcaatacgaccggcgcagccagcattcgggccggcttaccgacgtcgtggactgcaggtgataagaccggcagcggcgactacggcaccaccaatgatattgcggtgatctggccgcagggtcgtgcgccgctggttctggtgacctattttacccagccgcaacagaacgcagagagccgccgcgatgtgctggcttcagcggcgagaatcatcgccgaagggctgtaa

SEQ ID NO: 133352 - DNA, 336 bp, Enterobacter cloacae
atggaaaaaaacgtcgttaaaattgaatataccgaaacagtgagaacctgtttgtctgagatcacatcccacctgagacaggcagagatcgacccggggcccgttctggctgaaatactggatcaatacgagaatcgcgtaagcatctatccctatggatgtcaaagctctccggaactacttaaaataggcgtatcgaaataccgtgagtgtaatacagcaaacggttatcgtgttttgtataccatagaggattcaatcgtcacgacacacgcgattcttgcgcaacgacaggacatcaagcaactcttgttcagacgccttatcaaggcctga

SEQ ID NO: 133353 - DNA, 165 bp, Enterobacter cloacae
atgatcagagacaccctgaccgatgaccaactgagtgccctgctcagtgcagccagagcaaatctggagatgcagagaattttcggctcagctgaggttattgaagaatgtcgcttaatggtgctggcgcttgaagaactaaggcgactaatactgactaactga

SEQ ID NO: 133354 - DNA, 1305 bp, Enterobacter cloacae
atgttttcacttaaaaatatgttctccctgaacctccagcgatcagccatttcgtatgacgcaatttgtcagaataagcctgtcattgagttcagtccggagggggtgataaataaagccagcccgctttttctctccactatggggtacagggctgatgaaataatcggtcaccaccatcgtatattctgcccgccctcgctggtaagttcaccggaatacagccagttctggcagcgccttgccaggggagaaagctttagtggcaagtacctgcggctggcaaagggaaatcgttccgtatggcttgaagccagttatatccccgtttctgacaggcgcggccgtgttatcagagtcattaaaattgctgccgatatttctgagcgcgtgcattctgctcttgagcaggaagcagtcgtaaatgccataaaccgttctatggccatcatcaccttcaatcctgaagggatcgtgcttgaagcaaatgaaaatttcgtcaatgccactggctataagcgggatgaaatcataggtaagcatcatcgtctgttctgtgccgagacgctttacaaaagtgatgaataccgacatttctgggagagtctgaatcaaggtgagtttttttctggtctgtttccacgccttaaccgtcagggagaccctctgtggttccgtgcaacttataaccctgtctttaacagtgatgggcagctttataaaattgtgaaattcgctacagatgttacggctgatgtcctgcgaaaccagagagagcaagaggctgctgtgcatgcatgggatatggccgtgcagacccgagaaagtgcgcagaacggtgccaatgttattgaaaatagcatccttatgattgacagaattgcgcaggggatgggggctgtctccaccgatatctcacggctcaacaatcagtctgaaagtattgacgatatggtggaaaccatccggaagtttgccatgcagacaagacttattgcactgaatgccgcgattgaagcagcaagggctggcgcatccggaagaagttttgcggttgttgccgcagaagtgcgtaatcttgcggcgagcgtcagtagcgcgactgaagaaattgagcaagtcgtggccagcaatagtcaactggccaaggatgttctctgtggcattgaaaacagcctgatgaacactcgggaaggggttacactcatgcgcgaagcgggtgaagttatgaccagcattcagaggaatgctgcaggggttgagactgcggttaaggatgtcgccatttcagttaaagccggatag

SEQ ID NO: 133355 - DNA, 3258 bp, Enterobacter cloacae
atgcaatcagcagcacatcaggaaaaacacttccagcaatacatcatcgaccggttggtagagcagggctggaagctgggtgattccaagttctacgacaccgagcgggcggtgtaccccgaagacctggaaagctggattaaaaccagcggccagcaggaaaaatgggacaagctggaacggctcaacggggccaaaacccttgaagtgctgatggatcgcctggataaagcactggagaaacaaggcaccatgcaggtgttgcgccagggtttttccattgccggttgcggcctgatcgagatgaccgaggccgcaccggaagacaagcgcaatgcagcagtcattgagcgttaccaggccaatatcctgcgcgtggtgccggagctgaagtatcacccggcccgtgaatttgccattgatctggtgctgtttatcaacggtctgccggtggcaaccgtcgaactgaagaccgacttcacccagtcctgcgaagcggccatggatcagtaccgcaatgatcgtctgccgtatgacgccaagaccaaacgccgggagccattgctgaccttcaagcgcggggcggtggtgcatttcgccatgtccgactctgaaatcatgatggcgaccaagctggatggagaaaacacctttttcctgccgttcaataaggggcgaaaggacgaaagcggcacggtacatgcgggtaacccgccaggtgaaattaaggccgatggtacccaggaatacccggtagcctacttctgggaggcggtctgccagccggatgcctggctgcggattttccatagttttgtctacgtcgagaaaaaggacgtggtggatattcagggcaactggtcgaagaaagaaactctgattttcccgcgcttccaccaatggacggcagtgaaccagatgctggccgatgcccgcgaaaacggcgcaggcatgacctacctgtgtgaccacagcgccggttccggcaagaccagcaccatttcctggacggctcatgacttggtgaaactgcgcgaagataacggcgacgcggtatttaacagcgtgatcattgtaaccgaccgtaatgtgctggacggccagcttcaggacgcggtgaaacagattgaccatcagtttggggtgatcgccgccattgaccggcaaaagtcatccaagtccaagagcaagcagctctcggaagccttgttgtctggcacgccgattgtggtggtcacgatccagaccttcccctacgcgatggaagccatcatcactgacaaggccctgaaagggaaaaactttgctgtgatcattgatgaggcgcataactcgcagacaggctctaccgccgctaagctgcaagccgcgctggggatgagcggacaaggcaagatgtccaccatgacggtggatgaactgctggagcaactgcaaaagtcccgcgcccgcccggacaatatcagctacttcgcctttaccggcacgcccaaacactccactttgatgctgttcggtcgcccgacagatccaagccaaccgatctcggacgataacccgccgcaagccttccacctgtacaccatgcgccaggccattgaggagaaattcattctcgatgtgttgaacggctatgtaccctacaaaacagccttcaacctttccaagcagcttgaagacagcaagcgggtaagcggcaaggccgccaaacgcgccctggcacagtggatgtcattgcaccccaccaatgtgacccagaaggtacagtttatcgttgagcacttcaccaagaacgtcgcccaccggctggatggcaaggccaaggcgatggtcgtgaccagctcccgtgccgctgccattcgctacaagaaggcgtttgaccgctatatcgagcagcacagcgagtacggctttattcattcactggtggccttctccggcaagatgaccggtaagcaggtgatgcaccaggatgacagcgagtttaaggacgatgtgtttatcgtcgatgagaacgaggagttcaccgagcagagcatgaacccggatgtccacgggcaggatttgcgctttgcctttgaccgcccagaataccgggtaatgttggtggccgacaagttccagaccggctttgaccagcccaaactggtcgccatgtatgtggacaagaaaatcgccaaccatgtggagattgtgcagaccttcgcccgcctgaaccggacggcgcctgggaaagatgaagtctttatcatcgacttcgtgaacgacccggagaacgtgcgcaaggcctttgccacctatgacaagggcgctcacatcagcgaagtgcaagacctcaatgtggtctacgagatcaaggagcgactggacgagcacggcctgtacgacgagaaggacttggccgcgttcaaggaagcccgcttcaagaccatacgtgacatcacccatactaaatcgccacagcacaaggcgctgtataccgctacagctggagcgacggccttgtataacgacaagttgaaaatgttgcgcgatggcatggcaacctgggaagcagcgtttgagaaggcccgcgccaagggtgacgaggcgggtatgaagtctgccgatcaccaccaggatgagtatgccgagcaaatcaaggcgttgatgggcttcaagtcggacctggggcgcttctgccgtacctattcctatatcgcccaactgattgattttggcgacccggagttggaaaactttgccgctttcgccaagctgttgcaaaagcgccttcagcacgaagcaccggaaaccgtggacttgacaggcctggtgcttactggctttgacatcaatgctcgacccgatgacgtagaagacgaaggcaaaaccccggtattgcaaccagcaggtgcaggcggtggtggcgcggtaggcgacaagcctaaattcgtcaaagaaattatcgagaggctcaacagcctgtttggtgaggcgacgccgatacaggatcaggtggctttcgttaatcagatttcagcgattaccggtgaaagcgatgtcgtcatggctcaggtggaaagcaacacccgtgagcaggctatgaaaggcaacctccccggtgctgtgcagcaagctgttgttcgtgctttgtccagtcatcagaagctggcaacccaggtgctcaagtctgaccgtcagggcatgaccgcattggttgatatggtgtatgacctgctgcgcgaaggcaaagacatcgatctgggtatggattaa

SEQ ID NO: 133356 - DNA, 417 bp, Enterobacter cloacae
atgattgaacgagataaccagctgctccagctcaatgggaacgcgtgtcggttccagccgcgcatcaagattctcggaggtgatgtttttaatggcattgctgacattacgaaggggcaggtgcccctgacggacagcaatgcgaatgatcagaacaatcagcaggcttatcacgacggcaatcgcaatcagattttttttcagcgcatcgaggtaatggagatggaaattaatggagaggccagtcagcatgacatagttctgctgtttgccctgaaatgtcgcctggccagaggaggcgataatccggtacgtttccatcttcattccggacccggtatccatcgctctcgcagtatcctccaccgtccagagaaagacatcccgtgcgcggctgtgctcgctaaaatcggctga

SEQ ID NO: 133357 - DNA, 681 bp, Enterobacter cloacae
atgaaaatattaatcgttgaagacgaaattaaaacaggtgaatatctcagcaaggggctgacagaggcggggttcgtcgtggatcacgctgataatggtctgaccggatatcatcttgccatgacagccgagtatgatttagccatcctggatatcatgctgcctgatgtaaacggctgggatatcatccgtatgctgcgcagtgccggaaaggggatgccggtattactgctgacggcccttggcacgattgaacacagggtcaaaggacttgagctgggtgcggacgattatctggtgaagccctttgcgtttgctgaactgctcgcccgggtaagaaccctcctcaggcggggaaacacgatgatcacggaaagccagcttaaagtggctgacctctcggttgatctcgtatccagaaaagtcagccgcgccgggaaccgcattgtgctcaccagtaaagagttcagcttgctggaattcttcattcgccatcagggagaagttcttccccgctccctgattgcctctcaggtctgggacatgaattttgacagcgacactaacgcgattgatgtcgcagtaaagcgactccgcgctaaaatagacaacgattaccggacaaaactgatccagacagtgcggggcgtgggctacatgctggagatcccggatgcatag

SEQ ID NO: 133358 - DNA, 261 bp, Enterobacter cloacae
atggttgccggttttcagggcattgatagcgtcgtctgcattaacaaaagtgaagcgcatggtcattgcaggccagcccaccgccgggattgcttcgtgcgaaatggtaatctttttactattcatatcaatgtctttaacgataccggtgcccttgataacctgctgtaccgaagcatcactggcagcattcatatcgccatgctgatgtgtttcagcatgaagaccggcagaaaacatgacagagaaggcaccaaataa

SEQ ID NO: 133359 - DNA, 141 bp, Enterobacter cloacae; identical to SEQ ID NO: 131154

SEQ ID NO: 133360 - DNA, 1299 bp, Enterobacter cloacae
gtgagggaagagcgggacgataaccccttcagctggtaccgctggcagtacgacagcgccgggcgcctgctcgttcaggacggcacgctgcccggtcaggagcagtggcgctgggacgctgccggtaacccgctcgaaggttccgctgagaaggtcacgcacaaccgcctgacgcagctgaacggcattcgctggcgctatgacatccacggccgcaccgtggagaaagataacggccagacccgctggcactaccgctacgacggcgaacatcgcctgacggaggtcatcagccagccgcgggaccgcaataaaccgcagacgcaggtcagcttccgctacgatccgctcggtcgccgcatcagcaaaacgcgacgccagatgctgggcggacagccaaccggcaagccggtcacaacccgatttgtctgggaagggttccgcctgctgcaggaggtgcacggggatgtgccgctgacctacgtctacagcgatcaggatagctacgatccgctggcgcgtattgatggcgtggatgctccggagatcttctggttccactgccagcccaacggcacgccggagcggatgacggatagtgaagggcaggtgcgctgggagggggtgaacagtgcctggggcaagctgctgcgtgaaagcgagacgcaggtatcaggatattctcagaacctgcgcatgcaggggcaatacctggaccgtgagacaggcctgcactacaatctgttccggtattatgacccggactgcgggcggtttacgcagcaggacccgataggactggcgggggggataaacctttaccagtatgcgccgaatgcgctggggtgggtggatccgtgggggttgtcgagatgtaaagcaccgaacggatataaaactggtgatgttgatccacatggtaatctttcgcctggtgtaaacagagcatcgggtcatacaaatagtaaaaatgatgggtttgtacaaagtcaccacccaatacaggacgcttgggctaagaaaagaataaacggttaccagagaaatactgcacctgctacgttacttaagtccgcatcaggcagtccgcacgcgaatataagttctgctcaacgaactcgtagagctttgccgggaggttgggatacaacattgaaacaagagtttcatatcagttacaaagaaatgattgatgcaggtgttccaaagcagcaggctaggaaatcgataagtgactcttataaatattttgaccagttaagagagttaaatagtagtaatgtttattttgatatataa

SEQ ID NO: 133361 - DNA, 2259 bp, Enterobacter cloacae
atgaaaaaaaaagatgcagtgagcactcattctaattcaaaggtattgcacgccaaactggcaccaacctgctttgcgactatgtttgcacttggcatgatcatgcctgctcaggcagccatcgtggcaggtaataccgataaaccgcttatccatacggatgcaagcggcgcaaccatcgtagatatcaacaaggcgagcgctggtggggtttcccataacgtttattccgaatttaacgtcgacagcaaaggcgtgatccttaacaacagcggcacagtaaccaacacccaattagctggtcagatcgatggcaacgctaatatggccagcggcagcgctaaggtgatcctaaacgaagtgcgctcatccgatccgagccagctgaacggcatggtcgaagtggcaggccaatccgcccaggtgattatcgccaacccatcaggcatcacctgtgacggttgcggatttatcaataccaaccacgctacactgactaccggtactgccacatacgataacaagggtaatgttaacggtcttgatgtaagcaaaggtcaggtgaccatcaccggtaaagggatggatacccgctctacgcagtacaccgacattattgcccgttcagtgaaagtcaatgcgaaacttcaggctaacgaactgaacatcataacgggtaacaaccgcatcgataaaaatggtcatgtgcagaagaagtatgacagcagcaatacccctgacgtagcgctggatgtctctgctctgggctccatgtatgcgaataaaatttttatggaaggcacagaaaccggcgttggcgtacatatcgatcatgctgacctgacggcatccgacgcgttgtcaattaacgttgatggtgtggtcgaaaacaacggtggacatatcagcggtaaaaatgcagctaccgtaatgggtggtgatgtcctgaaccataatggtcaaattacctcagagggtatggtgtccgttgccgcagaccacacgctggacaacactaccggtgtcattaaagctgcaaaggtcaatctatccggcaaagataccgttaacaaccatggctccatccagggcagccagaatacctttattatcgctgactcgctggacaatagcgacggtgaaattatcagcaatggtgatttgactatcagccgcgcctcctggaattacaacgcgcagggcgtgaataatacccatggccgcattaatgctaagggggccctcaatattgacgctgccagccttaacaactccactggccgcgtagaaaccgatggtgcgatgacaatcaatgtcgacacgctgacgaacgataatggtcttatctccgcaggggacggctggaacatgatcagcgcctccatgctgaataacgataacggcgtgattcaggctgtgggatctgacagccagattcaggtgagcggcaacaacatgctctctaaccgcaatggattaatccacagcaacggctatgtttcaattaatggtgcgctggataatatgtccggaaccatcactgccgataaagacctctttatgtacggcacgtcctactattctgaccttgccagtaagatggaagctgccggcaatatcgacatgaccgtgaccggcacgttccagaacgccggaaccgttaaggcgggtcagaatatgatgttaaacatcggttctactggctggtatagctatggcggtcccgcgcagaacagcggttccatctcggctgagggccgcctggcgctgcagatgaacagcagtctgttcgacaacagcggcgacattaccgctaatcagatggatcttcaactggcagacttgtctaacagcggttcgatcgccagcaagaatgatatcaatctgaacaccacgagcctggaaaaccggggtaagggcgtgatgagcgccgaccataacatcagcgtcaccacctcttatctaatgactgatgcaggtagccagatcaacgctggttctgatgccacgctgttcgtgatgaacaacctggacaacaatggtgatatccgtgcggcacatgacattaatctcaacgtaatgggcagctacggctggtctcaaggtaccgcgtataacttcggaacgatgaaggcgggtaataaactaaacgcacagatggagcaggtaacactcatcaacgggggaacgctgtccgctgataacggtattactctgatcagtaactacctgactaacagtggtaacatcactaaatag

SEQ ID NO: 133362 - DNA, 723 bp, Enterobacter cloacae
atggatactcaagcactcttgccagctactaaaacgtttaaaaaacgcgccagtataaagcaatctaacgaattgaccgaagccgcatattacttgcctcttcaggcaaaacgtgtgctgtggttatgccttatgcaggcctatttcaacgacagtcaggatgatgattctgacgtattacctctcttcaaaattagcgtttccgattacgtcaaatacttcaatgtcgctacgtctgtcgccagtcgtgatgtaaaggctggggtaaatgctttgggcgaatcaacggttaccttctatccaaaagaaggtgagtttgaagaagttaaacgtccttggcttgctgaagcaggaatgaaaagaggccggggttcctggcagattgagtttaactacaaggtcatgccattccttgttggcttaacctcccagttcactacctattctctctatgactgcggccagctcaatagtgttcgtgtcatccggctttatgaaagcctgtgtcagttccggagcactggtgtctggatcaccacacatgactggttatgtgaaaggtttatgcttccaacctcgcagaagaacaatattgcggaaatgaaacgtaccttcctggaacctgcgctgaagaaaattaatgagaagacgcccttaaaggtaagttatacaaccgaagaagatggtcgcttactgtttaattttcttgataaaaaacaataa

SEQ ID NO: 133363 - DNA, 342 bp, Enterobacter cloacae
gtgctgcccctctgtcgtgcgatcgcgaatttccccctgcctcccgatacggagcgcatttttgagcgcatggtgggcctctcccttgttaagaccgatctgagcacgccgctgcatgtccgtatccaggatccactcaataatgaaaagggtccgttcaatacgaccaacttcacgaagcgcaactgcaaggttgttttgtcgtgggtaagaagcgagcttgcgcaggagttggctgggcctgattttgccagcggtcatcgtcgcggcacaacggaaaatatcaggccagttcgcaacgataagatcctcccgggcttttccacctaccaacttgcgtaa

SEQ ID NO: 133364 - DNA, 270 bp, Enterobacter cloacae
atgcgacatggtctggaacttagcgctcagttcattgacgctatcagccaggttattggcatcgtctttggcctctttggctcgctgagagaaataaaggatcgcactgcccgcgagcatggcggcgccagcgggaccaccgatgagagacaatcctcggctaaccaaaccagccccggtagacaatccagcctgtgccgctttatttgctgccagagcgcgattgtaattatcaacagccccagctgctgctatacgggccgcagataa

SEQ ID NO: 133365 - DNA, 657 bp, Enterobacter cloacae; identical to SEQ ID NO: 31789

SEQ ID NO: 133366 - DNA, 876 bp, Enterobacter cloacae; identical to SEQ ID NO: 30085

SEQ ID NO: 133367 - DNA, 1224 bp, Enterobacter cloacae
atgccaaaagattcagttgcaaataaatggataggggtatcgctaatatctatggcgacactctatttattaacaatatccatgaacgtatcgttgcgtgactataacgacgatgctttttacctctctgcttttgagagtggtgaatttataagttttctttctcaccaataccagacatggagtggcagggtgttggttgacgctttgatgataagcactataggataccgcaccttttggttatttggtattcctgcgtctctgctcttgttggcatactcttgctgcaagatgacatcatccaggacgggtttaataccaatagcattgttcgttatattgtttgcaagcatgccagttcaggtaataaatgactctgtattctgggttacaggattttataactatttattacctacatcagtggcattctatgtattctcggtttttttatcagggatcgattcaaaagcccacaaaataatatccgtagttcttgcgttttatatttcttatatggagcaagccgcgctttgttttttagtcgcaatggctttagcttttgtatttaaaagagactacatcactaaatttagcgtactacttttcgtgattgttttagttaattttatcatttgtataaaatctcctgggagtgagcaaaggctatatcttgaaacatggaatagattgccacagttcaaatactataatgtattcataaagttttcattaggccttgataagattaatgaacttatcatatatgttgttaatctaccgttaattattttctgcatcctgctatcatattacaggctcactattggaaagcttagcatctccgttaagttttctatagttttctcctttgcatatgccatattgcagttaattagacttctttcaccagccatgaactctcatttcttttttaatttgggagatatctctggagagacattctttacattgtacaagtatatgtcttacgtattactgacaatgttattgacatgcctggttactattatgcttgacttgacttatcatgaccattcattcctcattccaattgtagcgttgttagttggcgttatatctgtaacagccatgggtttctctccaacggtatttatatctggattcagggtggattttatttttgaggtgatttgctctttcatgagcatatttgtagtaaataaaatactgaaataa

SEQ ID NO: 133368 - DNA, 465 bp, Enterobacter cloacae
gtgaatcctatgcctgattttattaatcgatatattaactatatatggctttgtttaactgctgcctctgcgttaattgttttgcttgtttttttagtctggaacgcctgtactctgaacaagccaaagagtgtagttatggacctcgagaatgtccatgttgatgagtgctcttttgataaacaccgcataaaggtcgtcgggtgggcattcactgaaggcgagccatcatctattaatcgcgttttcgcttataagacgaacggagaggctgtggaggttatgtcgtcagttgtcatgaggcctgacgtaactcgttattttaacaagaaactctcatacgacagggctggtttctcagcttctaaacgcattttcaatgcagatgattacagtggagagattgaagtaatatcagaggattatagcggagttggtcatgccaaaagattcagttgcaaataa

SEQ ID NO: 133369 - DNA, 315 bp, Enterobacter cloacae
atgcacacacgaaacgtcaacgtcaaaaccgccgctcccgaatcttccaggaagatagggggaaaaaccgtgtcgtacacgatcctcgtcgctgagacgaaaaaaaactcagcggaggaaccggacgttctggagttcagcagcctggctgagctgaagaaactgcgcagacgctgccccgaaacgatgcgctgcacctatttctacgccctcagcagcggcgtcgataaacagttccgccatatccatgtggctgaatctgaccacttcaaacagtttgtgcgcctgatcatgcgcgcaggtatcgacatttaa

SEQ ID NO: 133370 - DNA, 831 bp, Enterobacter cloacae
atgactaataatactttatcagacttttcagcttcattgatagatgaaattaatttcatctatcatgaccgctacatgaaaatcttactgtttattgtgccggtgtttttattaacttttgtcatcgctatcttcagttctggtgtgcctgagaaaatacctgtcgcactggtagattatgatcattcatcattgagtcgggaaataatcaaaaatattgatgcatcgaagagtattgagttaatagaaacaacggacaatatttccctggctcaacgcctgatgaagagtatgaaaatttatgcttttatagagatcccccgaggtgcatctggatcaactatccgtcaggatgataataaggtcgtaattcgttataacgggcagttaagaacaactggtaatgctgcgtttatcggtttgcaggcagcggtgaatgatgcctttaactcaataaataacaggaagtcactgggtgttgagcataaaggtacgggcaactcaatgccaaatatacaagtaatcagtatcagcaatccacaaaatagctatgaaagattcttgaccccaattgcagtgccggtgttgctgagtatagttctaagcagcgctgtaatttgcgctatcggacgtttttttgaagaaggtaatctctgtgacgattggattaagaaaaaaacaatatatttatcagttcagattgcttcccgttgcctaccatatataaccatcatttttctttggggattaatattcaatgtctggcaagtagtggggcggggttggccaattttaggtaattggggtcggttccggctgagggcgaaatga

SEQ ID NO: 133371 - DNA, 996 bp, Enterobacter cloacae
atgacgataaaaaataaaaaaattaagatagccatacttattgttataataatggtgttatctgccgggtttattttatctcactcctcagggccggagatattagaaggcattgttgatacagatgaaattaatataaccagtaaggttacagcaagagttgatagcttgcatgtcagagaaggagacagcatccgtaacgggcaggctttagtcagtttgtatgacaggcaaattactgagaattccctgcaagcaaaggaagcattagctgcggctgtagctagtcaggaaaaggcatataacggagagcgtacagagtatattgagtcattaaaagctaactggataagtgctcaagcagatgaaaaaaacataaagttatccacggatcgagtagtaaaactctatgatggtagtaaggctgtttctgcccaagaacgtgatgatgccattgcgagatataagatttctaggcagaaaactaatgctgcctatgagcaatatatgcaagtcaaacggggtaacagggcagaggatattcgcattgctgatgctaatgtaaattcagccaaggcggcttttgagtctgcggattccttggtcagagagctgagtgttcattcaaaaaatgatggagaaattgccaagcgctttgctaatccgggagaacttgtttctgctggctcacctatattcagcatgattgatttaaataatctttgggtaactattaatttacgggaagaccgttttaacgcattaaaaataggtgatgtgattgaaggggcgattcctgcattgaaatataaaaatgttaaattccgtgttttttttattaaccccaaaggaaattttgccacatggagagcgactcgtcagtcaagcggttatgacgtcagaacatttgaagtacggttacatccgatgaataaaatagaaggaatgcgcccggggatgtctgttatttttgattggccttttgataatgactaa

SEQ ID NO: 133372 - DNA, 1623 bp, Enterobacter cloacae
atgcgcgacatggccgctatctttacgggtgtcggccagaagctcagcagcatgccgtattaccgggctaaccagtatgcgcagacgctgggcattgacgaaaatacccttatggcgatgcgccggggtgtcggtggtttctccgggcagtacagcgcaatggcgaaggctatcggcttcaatgctgatgaggcggccagaagctccaataagttcatgacctccctgcgcgagttcggcgcgatggcaggcatggcccgtgacaaaatcggctctaatcttgctggtggtctggcgggttcgctggacacgctgcgccgccacattctggataacttcccgcgcatcgagcagaccctgacgaaagccataaaaggcattctggcgctcggggatatcatcggtcggctgttcttcaggttgattgaggggacatcaagccttatcacctggtggcaatcgctggataagcaaacgcgggagttgatctcgctgtttggcgcgctgacgattgcgctgcgcattctgaacagtacgttctggatgtcgccgattggcctgattacggcgctggcggcggggattgctctcctgtgggaggactatcagacctggaaggaaggcggggatagcctgattgactggggcaagtggaaaccggaagtcgacgccgctctgaagatggttcgtgaccttaaaacgaccgttaatgacctggcgaaagtgctggcgaaactgctcaacattgaccccaaatcatggtcccttaagtgggatttcagcaacttcatcgaccagatgggcgagttcagcaaaatgctgaatatgatcgccgacctgctcaacgctattaaagatggtcgctgggctgatgccgccagcatcggcaaacaaatgcttaatcagggcagcgaaaatccgtcagcgatgccgatggtaacagacagcgccaacggtaccgccgactggattaaagagcactggggattcgatcctcgcagcgtgggccgaacggtgcgcggctggtttggtgataatgagcctgaacagctcggccagtcagtcaagcggccacagccaaccaaagcgggctctgagctgctgggttggatgcagccgatgcttaccaacctggagcagctctatcggcttcctgaaggtttgctgcgcagcgtagctattacggaatcgggcggtaatcagttcgccgtttcaggcgctggcgctaaaggtctgtttcagtttatggacggtacggcgcgtgacatggggctgcgcgggaatgatgttttcgacccggagaaggccgcgcaggcagccgcaaagtatctttcacagctgctgcaggcgaacggcggtgacctgagcaaggctctggcctcttataactgggggatcgggaacgtgcagaagcacgggatggcccttatgcctcaggaaacccgcaactacattccgaaggtattaagcaacatgcccacgcccggggctcaggtacagcaacagaacacctatcacatctacggtgggggtgacccgcgttctgtcggtaccgaggtcgagcgtcggcagcagtcggcaaacgcccaggtcatgcgcggtaatcaaacgaaggtgggctaa

SEQ ID NO: 133373 - DNA, 234 bp, Enterobacter cloacae
atggacatgattaacggtgaacgcgtcacatcgcagaaaattacaaatcttggtgctgatggcattaagattgatatggggcttatgcctgctaaagatggcaacaattatggctttgaatacattcgccgtccgggtaccgaaacgcgattcctgaatgtccaactgctgcagaacagcatggacgcgccgaaaatcatcggatctttcccgtgtaagaaagtatccaactga

SEQ ID NO: 133374 - DNA, 225 bp, Enterobacter cloacae
atgaaaatcgttatcttttctgacaatggtagcagtgtcgttaatacagatgatggaacaatggactggtacatcttaaattcagacggtacaaaacaatgtgctgctgtgatgatgcatgaataccgcgagttatccgtccataaatttgcttatatcgctagctttcgtgatgtgtcccaggaagagattcgttcagccataatgcgccagatgtttaactga

SEQ ID NO: 133375 - DNA, 756 bp, Enterobacter cloacae
atggcagtatctgaccagacccgcagcggcgaccttgccgaaacattcaaatctgagcgggaaaccacaaaaaaccagatccgcgtcgctttgcctggcatcgttcagtcattcgatcccggcacggtgacggcggttgtgcagcctgctatccgttcggttgaaactgataacgacgggaaccgcattaccaaaaattacccgctgctggtggatgtgccggtggtatttccgcgcggcgggggatgcacgctaacgttcccggtgaaagtcggtgatgaatgtctggtgattttcgccgatcgctgcatcgatttctggtggcagaacggcggggtgcaggagcctgtcgacgaccgggtgcatgatttatcggatgctttctgtatcgtcgggccgcagtctcaggcgcagaaaataagcggaataagcaccagtggcgcgcagctgcgtactgatgatggcgctgcgtttgtggaagtggccgcaggccataacatcacggttaaaacccccggcgcgttgacggcgacagcagaaggaggaaccacgattacatcacccaccattacgctaaacggcaacgtgactataaacgggaacctctctcagggtatgggcgaaagcggcggtgccgcgacgatgctcggccctgtcacggtgactaacgatgtaaaagccggtggtaagagcctgatgacgcatacgcacggcggagtacagaccggcggcggtaacacaggagcgcctaactga

SEQ ID NO: 133376 - DNA, 354 bp, Enterobacter cloacae
atgcgatacagacgtgaagacgccgacggtgattacacctttggcagcggcgatgatacctggctgattaactcacctgaggccgtggcgcaggctgtaaaaacgcgattcgaattgtggtatgggcaatggtttctcgacaccaccgagggggcaccgtggattcagtcggtactcggtaagcagaagccggaaacctataacctggcgatccgtaagcgcatcctcgaaacgcggggcgttaaatccatcctctctttcaatacgacagtgaacactacgacgcgccgcgtccagttcttcgctgaaatcgacaccatctacggaacaacgacagtaaccagcgaggcataa

SEQ ID NO: 133377 - DNA, 252 bp, Enterobacter cloacae; identical to SEQ ID NO: 31793

SEQ ID NO: 133378 - DNA, 675 bp, Enterobacter cloacae
gtgtctgactttggcgcaatgatattaatggagaacggcaatccctttgttacaccacaatcaacgcctttctgcctctacggaaaatactccttcaattcctcagctaatggcagctctcagcaggtggcgcaatatctttcggttcctgacgattatccggtaatggtcttcataaaaacgactaatactgcgcagccgactccggccatgtcatatcggataggaggaaatgtctatattagtggcgtaaatccctataaccagggctttacgctgacagcatatgtatttgcaatttttccgcaaacacttcccgcgtggggatttgctatctgggatgcctccgggaagcttgttctgacgaacgaatcaagggtgctttctgatcttcaaacagtgggcacgccaggtgcaagcggcgggattaatattgaccagacgctgagcgggtcatgggctgttgcgcctgcacagcttgggcagaccatcgttgtgaataactccacccagcctccgaccatctacaccatcaatgcttattcggcttgcaggtttgacgggactaatacgaggataaatgcagggggaacctccaccggaacaggttctccgggagggggaacgaatactggcatttccttgaccgcgataaatacagcggcctatgactga

SEQ ID NO: 133379 - DNA, 303 bp, Enterobacter cloacae
atgtcatggggtatacaaacatgggatgcgtcgggtaaacccaacaactacggtatcaagccagtttcagttgttgggcgtatacagctggctgccggacaaaactccggcaactggtctttcgcggtgccctcaggaatgaaggtcggctttgtgctcacacttgatgaaggaggaagcagcgtagggaggcgcattgtcgcgtcagggaacacaataactgtaactgctgcctcttctgtaggcctgggaaattacccggcctctaagtgtgaggtgatcgttttcatggagaaagcatag

SEQ ID NO: 133380 - DNA, 261 bp, Enterobacter cloacae
gtgatccagaatggtcagacgttcatcagggccagcttcattcaggacggtaccattgagaacgccaaaatcggtaactatatccagtcgaataactatgtggctggctcggcaggctggaaacttgataaaggcggcacctgggaaaactacggcagcgacggtcagggagcaagaaaatccaccaatgtcactgacagtatcagggattcaaatggcgtgctccgcgtgcaaatcggcaaacttacaggggtgttttga

SEQ ID NO: 133381 - DNA, 588 bp, Enterobacter cloacae
atggatattctctctacgctctttcagcagcagagccggaaaatagggatgattgtccccagcgtggttgtttctgagaagcatagcgacacgctggagataaccgagcaccctgtcgaggtcggggccgctattgctgaccatgcctacaaaaaaccgtctgaagtggtgatggaagtcggtttcgcaggtggcggatcgttgctggattttgccagtaacctgacggctaccagcctgctcgggctgagtccccagcagacgtatcaggagatactcgacctgcaggcgagccgtattcctttcgatgtggtgaccggcaaacggctgtacagcaacatgctgatccgcgcgctggaagtgacgacagacaagacaaccgaaaacgtcctgtctgccgtcctcactctgagagaggttcttatctcgcagacgcagcagatcaccgttgcggataaaaccaacatgaaggacggggccagcacgtcggcggtacttaacaccggcaacaaaaccacaaagccgccaaatacctcgctgctgaaaagcatcacgggtaacgcggcgtcattactggggctcggctaa

SEQ ID NO: 133382 - DNA, 378 bp, Enterobacter cloacae
atggacggtacggcgcgtgacatggggctgcgcgggaatgatgttttcgacccggagaaggccgcgcaggcagccgcaaagtatctttcacagctgctgcaggcgaacggcggtgacctgagcaaggctctggcctcttataactgggggatcgggaacgtgcagaagcacgggatggcccttatgcctcaggaaacccgcaactacattccgaaggtattaagcaacatgcccacgcccggggctcaggtacagcaacagaacacctatcacatctacggtgggggtgacccgcgttctgtcggtaccgaggtcgagcgtcggcagcagtcggcaaacgcccaggtcatgcgcggtaatcaaacgaaggtgggctaa

SEQ ID NO: 133383 - DNA, 303 bp, Enterobacter cloacae
atggcaattcaggaaatcccgctaacagcggataaccagcaattcagcatcatcctggcggggaccacctggcggattagcatcatatggcgcgatctgtactggattatggacctgcagaacgacagaggggagccggtgatctccggtattcctcttgtcaccggcgctgacctgctggcgcagtacgcctatatgggcctcggctttaagctggtggtggtctgtgacgatagtacacaggattatccgacgaaaaccgacctgggcggccgcagtcatttactggtatcaacggagtaa

SEQ ID NO: 133384 - DNA, 378 bp, Enterobacter cloacae
atggacggcacggcgcgcgacatgggactgcgcgggaatgatgttttcgacccggagaaggccgcgcaggcagccgcaaagtatctttcacaactgctgcaggcgaacggcggtgacctgagcaaggcgctggcctcttataactgggggatcgggaacgtgcagaagcacgggatggctcttatgcctcaggaaacgcgcaactacattccgaaagtgttaagcaacatgcccgcgcccggggctcaggtacagcaacagaacacctatcacatttacggtggtggtgacccgcgttctgtcggtaccgaggtcgagcgtcggcagcagtcggcaaacgcccaggtcatgcgcggtaatcaaacgaaggtgggctaa

SEQ ID NO: 133385 - DNA, 597 bp, Enterobacter cloacae
atgtccgctacgggtagtgtgacatctggggccgggaaagatatttcatcagctcaggatgtatgggctggcagagatattcatgctcaacgaaatttaattgtgacttccattgcatcagtcggttctgatttgaccgttggaggcagtgttggtgttacaggaaacgtctatgctggtggctttgttcgctcgggtgctggtaaggatgttgtatcacaaaatgatatctgggcttctcgatatatttatgagaacggtcagcgcgtttatggtccaaacaacccaccacctaataaattcagcaaatcattaaataccatctcttgggagaaaaaccttgagaccggagtgattagacaatggggttttgttgatgttggtgacaactcttacacaactgtgaacctacctattgcatttccttcttcttttttatcgttaactgttactcctgctatgcctggcgcattcatgggcagtaatgtctgcggagctggagggaaagtgataagcaattcttcttttgggtgcgggatgagctcgaatgtcgacatcccgtggtccggtgtatattttgaagccataggagtttga

SEQ ID NO: 133386 - DNA, 480 bp, Enterobacter cloacae
atgtcaatttacaataaaaatacaggatgttatacaatcagtgggcaaagtaactatgcttggtcagcatctaaaaatgtattttatcttatttctgatttgttggtttatgttcgtaacgggaattggccggatgatgcagtagaggtttctgatgaattattctcagaatactcatcattccagaatggaaatggaaaagttcgtggcgttggtgaggatggaatgccagcttgggtggatgctccagaaccaaccccggaggataagattgccgtagctgaaatgcaaaaacaaaaattgattgaacaggcaaatagcaaaatagcaccgctgcaggatgcggtagatttgggcatcgcaacagatgaagagtcagatagcctcctggagtggaaaaagtaccgtgttcagcttagccgggtgaatacatcacttgctccagatattcaatggcctacattacctaatagcaagtag

SEQ ID NO: 133387 - DNA, 492 bp, Enterobacter cloacae
atgattggcagattcgatcaattattaatcggtatgattgctggatatctctacctcaactacagacacttattcacaagtaaaatactttttataatatccaccgtgatagtatttatcgccattagcagaatttataaacttgatgcttggaacagtctaaaaccatcttctgttctcttaacatattttgaagctctcgtgtgggcattgtttattctttcatatatttgcgtttctataaaactccctgattggttagataataccctatcaaaactaggcgaggttagctactcccagtatattttacatgtattgctaattggcttcattaactcatacactggatggttagaactagttgtcgatccaaaattaaatgcaatatttaatttcttactctttctccctatcgttctcatcttctcaaaattaagctatgaactcattgaaaaaccgtttttacaaatgagaaaaaaatacatttaa

SEQ ID NO: 133388 - DNA, 1311 bp, Enterobacter cloacae
atgctttataacactggcaccattgctatcaacggaaataccgccaccgggacgggtacaaactggacggcacccgccagccaggttcgcgctggccagacgattatcgtcatgtcgagcccggtacaaattttccagatctcaagcgtggacagttccacctcaatgacggttacacctgccgccgctccggcacttagtggccagaagtatggaatcctggtgtccgacaatatctctgtcgacggactggcacaggccatgtcgcaactcatcaaagagtatgacgagaatattggcgcgtgggagacgttcgccacaacctcagccaatcagagcatcactgtaaccatcaacggcacctccgtaaccatccctggcatcggtaagctggcacagaaagggagcaacggcgcgctagctgtcgaagacggcggaaccggggcaaccacggcagaaggcagtcgcacaaacctcggtttgggaaacagcgccaccaggagtgttgggacggtaactggtaccgtagctgctggcgatgattctcgcatcactggtgcccttcaaaaaactggcgggacactaacaggtcagctgaatttgaaaagcgcgccaatcgctgccgatgctaactctgttatttctgccaacggtgggcttgatgttgatctttctaaggggttcgttttaaaaggaaaggtgcagcagggggcaggtagggacaataatatacttacaatctcgggtgatggagatacgccaacaacaggatatgtaggcgcatttcagtacaaatggtacagcgatagctgggttgcgggtattactcgagggtctggaacggacactctggcttacacaatttactattatggaccaggcactacaaaatactgggcattcaattacgatggttctgctacttcgcaaggaccctgggttaatggttctgatgaacgtcacaagtcgaatattgaggcggtagcgcaacctcttgctgccatactctctcttcgcggggttacttataatattaaggatggtggtaggggtgtcgggctcattgctcaggatgtagaaaagtggtgtcctgatgctgtcaaaacatacggagaccgcaggtttagcgacggcacggtgattgagaattttaagtttctcgatacatcaggcgtggctgccgcgtaccatactgaagcaatcaaagaactcttcaatctggtggaactggcgcttaacgacccggaaaaggctcgtgatgttattaaagcggtgaaagctgcctcagagcttagccagtcaggttcgtaa

SEQ ID NO: 133389 - DNA, 564 bp, Enterobacter cloacae
atgctcaacgataaaggatttaatggtctgcgcccggacaccgacgtcgctcatctctttcaccgcctggtgagttggagcaagccccgtcatcaccggacgaacgtccgccggcagggtctccagtgcagatatcaccgccttcagctgcgtggttttccccacgccggcatagccctgaatcccgataaactgatccttggtacccagcaccagggtggtcgcctttttctggccatcggtgagtccgttcagcacggcctccggtacctgttccagcaacggctgctgcgtacctttcccttcctccaccacgcgcaagatagctttctccatctcccaggtggaccgggaaaccagtaccggctctccccctgcggatacggacaacagctcgccatttttgatcatcgcgccaatttcatttccgatggcctcaaggtcgggatgatatttctgcgcttctgtcgcgagcttcagttcgctgatcaccacggtgcgctggtcgttgatagcacgccagacggccagcccggcgtccgtccggacgctgtcatgcagtga

SEQ ID NO: 133390 - DNA, 303 bp, Enterobacter cloacae
atggcaattcaggaaatcccgctgactgcggataaccagcaattcagcatcatcctggcggggaccacctggcggattagcatcacctggcgcgatctgtactggattatggatctgcagaacgacagaggggagccggtaatctccggtattcctctcgtcaccggtgctgacctgctggcgcagtacgcctatatgggcctcggctttaagctggtggtggtctgtgacgacagtacacaggattatccgacgaaaatcgacctgggcggccgcagtcatttactggtatcaacggagtaa

SEQ ID NO: 133391 - DNA, 303 bp, Enterobacter cloacae; identical to SEQ ID NO: 133383

SEQ ID NO: 133392 - DNA, 1032 bp, Enterobacter cloacae
atgcctatcctaccacctctgccacgaccacaacggcgccgcattcacaaaatcatccatgccacccgtgataaaggacatgctcgtcgcttgatggccatcttgctgttacatgaaggacgcacgatcaccgatgttcatcaccttaccggcgctgcgcgctcgaccatcggtcgttggcttcggtggtatcgagatgaaggcatagatgcgctagaagccttaccggctggccgtgccccagtcttacctatcgccaagattgtcaccttactggtgctgctcatgcagttttctccgcaagattttggttatcagcgcagccgttggtgtactgaactattggctataaaaatcaatcggttaacagggctcaatgtggcagcctccacgctccgccgatggttacctcgtatgggcattgtctggcgcaggcccgtgccgaccttgcggataaaagacccagcctatcaggaaaaaatggcgaatatcgacgccgcgctggcccgctgtgatgccgataatccggtgttttatgaggatgaagtcgatatagacctcaatcccaaattaggagccgactggatgttcagagcgcagcaaaagcgggttgtcacaccggggcagaatgccaagcattatctggcaggcgttctccacgcaggcaacggaagggtgctttacgtcagcgggatcaagaaaaactcatcgctgtttattgccatgctggaaaagctgcgccaccactaccgacgagccaaaaccatcacgttgatcctcgataactacatcattcacaaaagcaaacagaccgagcgatggttgaagaagaatcccaagttctgcctggtgttccagccagtttacagcccttgggttaatcacatagaacggctatggcacaagttacatgaaaccatcacgcgcaatcatcaatgcagagggatggcaaacctgctggcccgagtgaaacacttcatggataccgtgtctcctttcccggggaatggctatggcacagcgaaggtgtag

SEQ ID NO: 133393 - DNA, 840 bp, Enterobacter cloacae; identical to SEQ ID NO: 6027

SEQ ID NO: 133394 - DNA, 969 bp, Enterobacter cloacae
gtgggggcaggtcaagttgagttcattccagaaacaggtgctcataaaacaccagacctcaaagttgttaaaggcactgatattttttatgttgagtgcaagcgattagcaaaggtgactcagtactcagaagaagaaagggcggagtggttgaaacggtgggaaatggctcgaccattgattactcgataccataagccagttttttttgatgtgattttcaaaactgaaatagtcaaaacgcgtatcgatgtgcttctcggtgctgtagcaaaaatttacggctctgatcatcttgtgaaaggtaagtttgcagtatgtgagagcgatgatattttggttcaggctaacttaattgatatggaacgggtggataaccacttaagaaagtggcatgtgaaatatccttctcctcaattaaattccttattagatgaccagtatgatccgtttggaagttatacaatggtttgcaacgcaaagttatgcacttttagcaatgatgaacttagtactataaacgtattcattgatgagatagaaatgcctttctgcgcaaaatggatttgtctcgctgatgagtctgtcgataaaaaggcaaaagatataaaaagggtacttgttcaggctgtaaagcaggctccgattggagaatcaacaataattcatattggatatgaaaccttgcatggcccacagatcgaatttgcacgtgatatgaaaatttgcgaattgatttctgattttgactttatgggtaaagatatagctgcaatctactgtcattctttccagccgcgcctgcttgcagatgagaattgggactttgccgaaacggtaagatactttagccagagtcgaaatgccgagacaattcttgagcaaaaactgcttactgatgttgaaggaacgatccaatctgacgatacgcattgggcccaagatttaagagagatgctcggcaaatga

SEQ ID NO: 133395 - DNA, 315 bp, Enterobacter cloacae; identical to SEQ ID NO: 133369

SEQ ID NO: 133396 - DNA, 207 bp, Enterobacter cloacae
atgagcgttaacaccccgaccgcaaaggcccgttacgaaaatgggcatatgtcagacccggagcctaaaacagcctctctcattgcgatttatggcaatgaggtgagctatgcatggaacgttctggaggatttgaaagctgcaggtgcttcttatacccgcagaaacattatcgccgatatgttccgccgtctgggcgttcagtaa

SEQ ID NO: 133397 - DNA, 660 bp, Enterobacter cloacae; identical to SEQ ID NO: 16020

SEQ ID NO: 133398 - DNA, 501 bp, Enterobacter cloacae; identical to SEQ ID NO: 83644

SEQ ID NO: 133399 - DNA, 435 bp, Enterobacter cloacae; identical to SEQ ID NO: 19847

SEQ ID NO: 133400 - DNA, 456 bp, Enterobacter cloacae; identical to SEQ ID NO: 25798

SEQ ID NO: 133401 - DNA, 366 bp, Enterobacter cloacae; identical to SEQ ID NO: 122249

SEQ ID NO: 133402 - DNA, 606 bp, Enterobacter cloacae
gtgaagccgttcaaatacatcctttctgctcctatgtcctatggggctaatgagtctgcggaaagtgatgacccaaatcatccaaggtatatccgtattactgacctgacagagaacggcaccttaagggaggatacatttaagactctgccatgggataaagcttatagttatttactgtctgacggcgacatattgctcgcaagaagcggtgcgacagtagggaaaagctttctatacagagagactaatggtgctgcgtgctttgcaggatacttgataaaagctagctgtaatgaagaaaaggctcttccaaagtatatttacgcttaccttcagtctcactcttattgggaatatattagcggaagcaatatacagtccacaatacagaatgttagcgctgaaaaatacagttctatggtactgcctgttcctcaacgagaagaacaagccaccatcgcggccacactcgaccgcgaaaccgcccgtattgatgcgttgattggcaaggcagagcaaagtattaccctacttaaagagcgccgctcggcctttatcaccgccgctgtcaccggccagattgatttgcgaggaaaacaataa

SEQ ID NO: 133403 - DNA, 315 bp, Enterobacter cloacae; identical to SEQ ID NO: 133369

SEQ ID NO: 133404 - DNA, 207 bp, Enterobacter cloacae; identical to SEQ ID NO: 133396

SEQ ID NO: 133405 - DNA, 705 bp, Enterobacter cloacae; identical to SEQ ID NO: 8686

SEQ ID NO: 133406 - DNA, 603 bp, Enterobacter cloacae
atgatgcagacgcagtttgcactggctaaggaaagggatgtttcgcattaccgcgaaattttattcgctaacctggaagaactgaaaaggttgtcacgaatgaccagtgacatgctttttctggcacgttcagagcatggtctgctgcggctggataaacatgatgtggatctggcagccgaactgaatgaattacgtgagttgttcgagcccctggcagacgaaacaggaaagacaatcacggttgaaggagagggcgttgttgccggagacagcgatatgctccgacgtgctttcagtaacctgctttccaatgcaatcaagtattctcccgataacacctgtacagcgatacaccttgagcgtgacagtgactgtgtgaacgtgatgattacgaatacgatgtccggccaggttcccgctaatctggaacgtttgtttgaccggttctatcgcgcagactcatcaaggttctacaacacggaaggcgcggggctgggattatcaattacaaggtcgatcattcatgctcacggcggcgagctgtcagcagaacagcaggggcgtgaaattgtgttcaaagtgcgcctgttaatggattaa

SEQ ID NO: 133407 - DNA, 303 bp, Enterobacter cloacae
atggcaattcaggaaatcccgctgactgcggataaccagcaattcagcatcatcctggcggggaccacctggcggattagcatcatatggcgcgatctgtactggattatggacctgcagaacgacagaggggagccggtgatctccggtattcctcttgtcaccggcgctgacctgctggcgcagtacgcctatatgggcctcggctttaagctggtggtggtctgtgacgatagtacacaggattatccgacgaaaaccgacctgggcggccgcagtcatttactggtatcaacggagtaa

SEQ ID NO: 133408 - DNA, 267 bp, Enterobacter cloacae
atgctttttttatggctgctacagattttcttatctagtcatatctctttgccgcacagctgggactcaagattaatctttgcagactccggccgcagatcattcagccatagaatcggtgttctatgggaaacaggtcaactttgtagccccccggaatatgggaaacaggtcaactacacagacaccccggaatatgggaaacaggtcaacttcacagacatcccggactatgggaaacaggtcaactttgcggacggcccgtaa

SEQ ID NO: 133409 - DNA, 252 bp, Enterobacter cloacae
atggccaatctgatgctgtcggtcatgggagcctttgctgagttcgagcgcgctctgatccgcgaacgtcagcgcgagggaatcgtgctggctaagcagcgcggggcctaccggggacgaaagaaatcgctgaacagcgaacaaattgccgagttgaaacggcgagttgcggcaggcgaccagaaaaccttggtggcccgtgacttcggcatcagccgcgaaaccttgtaccagtacctgcgggaagactga

SEQ ID NO: 133410 - DNA, 279 bp, Enterobacter cloacae
ttgcccgatcagcggcttgagggcttcacgccagaatgtctgatgcgcatcagagagcttttcccaggcagcttcggcttccagccgatccatgcccaccttatccagctccagggtcatgcgcagcgggcgcagaaccctgatacgacggtagccaaaggtacggtagtcaagcatccgggaaagcgctccgctttcgcctgtggcgtagatgtccagaatctggcggcgctgctcatcgctgacaatacggcgtttgttgccctcgttgcggattga

SEQ ID NO: 133411 - DNA, 807 bp, Enterobacter cloacae
atgcattttagtgtgttaatgtcgctctatgacaaggaaaaaccttcctatttggaagagtgttttgacagcctggcaaatcaaacggttaaagcggatgaaatcgttcttgtttatgatgggcctatcaacgaagcattatgcacagtggtcgatagatggtcaatgtcattacctatcaagatcgtcgcattaaaaaagaacgttgggttaggacaagcgctgaatgaaggaatgaaacattgtacatatgattatgtcatgcggatggatacggatgatatatgccaaccaactcgttttgaattacaatctgtatttatggagctaaaccctgatattgatatttcaggaggttgtatccgagagtttataggtgataaaaacaatatagtatcagaaagaaaagttcctcttactgataaagaaattaaaaaattcgccagacataaaaatccttttaaccatatgactgtcattttcaaaaaatccagcgtccagtctgttgggggataccagcaccattatcttatggaagattataatttatggttgcggttactaggggggggattcagagcgggcaacctggacgaatcattggtattggtcagagtcggagctgatatgttggtcaggcgacgcggacttaagtatgtttcaagtgagtataaacttgctcgaatgaaaagaatgactggttttcagagtatcttatcgtctcactactattttattttgagaagcattccacgattactgccattatgggcgcttaagcgaatatataatattacacgaaaatag

SEQ ID NO: 133412 - DNA, 480 bp, Enterobacter cloacae
atgaaaatttctaatacttcgctcagtggtgttttgattatcgaacctcgagtgtttcatgatgaaagaggctatttctttgagagttttaacgaaaaaaacttcaaagaaaatatagatccaaacgtcacttttaaacaagataatcagtcaagatcttctaaaggggttttacggggtttgcactatcaagaagcaccttttgcccagggaaaactggttagatgcgttacagggcaggtttttgatgtagcggttgatatacgcaaagaatctccaacatatgggcaatgggtgggtgttattttatcagaagagaataaaaagcagctttggatcccagctggatttgcacacggttttttaacaaaatgggatgataaggacttgaatatagaatggccaaaaatggaatacatcatttctgagaaagatcagaacggttcaacctttgcttctttaaacgttcaaggtaaataa

SEQ ID NO: 133413 - DNA, 771 bp, Enterobacter cloacae
gtggattgtgacgctgccggaagcggtgaaataagtttacccttcttgctaaaggctggggtatccccacaagataatgcctgcacagacggctccctctcccttgagggagagggctggggtgagggggaacatacggctgtggaggttattccgttcactctatgttccttgctactctgtaacggcatgacctgtgaacgtgccagggtggctcagtcgccaccaccctggcgacccgggctcccggcggtaaatcgccgcttcgcggattgctcgccccatccctggggctcaccctttcagggccagcgcaggcgctgtccaaaattgctcccggcaattttgtcctcagcttattccttcaggctatcgggtcgggcgtggcctgcatccctgcaggccacgccctctcggcgcatccctgcgcctcgcctcggccttacggaaacgcctcggcgatttacagccggaccagggcatcgctgtaagccattaatttttctgaagcaacattcatcgcttcaggttaaaaaattaccggggatccctcagccccacagaggagaggagatgcatagcggttatttcttcagccccgcaaacgccgcccgaatttcttcttccggcagctgtatgcctataaacaccatcacgctgtgcggtgcttcctcgccccagggtctgtcccagtcggcgctgtacaggcgctgcacgccctggaacagcaggcggtttggctcgccgtcaatccatagcatccctttgtag

SEQ ID NO: 133414 - DNA, 441 bp, Enterobacter cloacae; identical to SEQ ID NO: 133316

SEQ ID NO: 133415 - DNA, 540 bp, Enterobacter cloacae
gtgaataaatcaatgttggcgggtatagggattggcgtcgcggctgcgttaggtgtggctgccgttgccagtctcaacgtattagatcgcggcccgcagtatgcacaggtggtttctgctacaccgattaaagaaaccgtaaaaacccctcgtcaggagtgccgcaacgtttccgtgacgcaccgtcgtccggtgcaggatgaaaaccgcattgccggttctgttctgggtgcggtagcgggtggcgtaattggtcaccagttcggcggcggccggggtaaagacgtagcgaccgtggtcggcgcgctgggtggcggctatgccggtaaccaggtgcagggcgcgatgcaggataatgatacctacaccacgactcagcaacgctgcaaaaccgtctatgataagtcggaaaaaatgctgggctatgacgtgacgtacaaaattggcgatcagcagggcaaaatccgcatggatagagacccgggcacgcaaattccactggatggaaacggccagctggttctgaataacaaagtgtaa

SEQ ID NO: 133416 - DNA, 636 bp, Enterobacter cloacae
gtgcggttacgcaacaatgacagcacgcgtgaagagattctgacgcgctattttcctcagtaccgccttatcgcgccgcaggcccattccgggcttggcggcgcgagttgcattatagagcagggcgaacgacgtctggtcttgcggcaaaatcacgacccctctgctcctgcctctcattttcgtcgtcagtttcgtgccctgagacgtcttccggcggatctcgtacctgcccctcgttttttcagacagggctggatggccgtggactatctggaaggtgaagttaaaagcgcgctgccggacacgccggagcttgcggcgatgctgtatcatctgcaccggcagccacgcctggggtggcgaacgacgttattccctctactggaacattactggcagcaagccctgccagacagacgtactccagtgtggctggcacatctcaagcggctgcgtaaaacgggcgagccgcagccgattcggctcgcgccgttgcatatggatgttcatgccgggaatattgttcatacgccagcgggcatcaggcttatcgactgggagtatgcgggagatggcgatgtggcgctggagctggcggccctgggtcgtcatgttaatggctggctggtttga

SEQ ID NO: 133417 - DNA, 144 bp, Enterobacter cloacae; identical to SEQ ID NO: 29645

SEQ ID NO: 133418 - DNA, 150 bp, Enterobacter cloacae
atgaggtccgagagcatcacgcgtgtgaataagcgtttgctctggcaatacgttgctaagcatagacagcagaacattacgctcatcctcattatccgacaaaacaagaattatacgaaaacccgtttttatacgaaatctgatttctga

SEQ ID NO: 133419 - DNA, 1260 bp, Enterobacter cloacae
atgttatacatgctcttatgctgttttctgatgctcaacagtacattcgttatgttcagagcaatgtctgcaataagtaaaggatccgctaaagaaaaccggtctgaaatatcgctgatagtcctagcaacacttggaattgcatcaccattcattgtcgcaatgattactattaatgaaagtatgacatctaaaacagtaacagatttttctttgggtgctcagtggtccggaatggtttcagcggtagcgctaatggggttatatgctcgacgcgtttggaaagagaagaagtccttatttactggcgctttcctggcctcttccttaatggcctttatttttactgacagcgataaaaaggttatgtattcctccgtctcgaccaaaacgagcgttgcagatcgtatcgttgctgccgatggaacagaatactatggaaaggatatggttctaccggcgctcggagaagggacctttactgtagtcaatgaaactctggatattcgccagactgtagtgagcacatctacttatcatttcatcgttgatacaactcctccacgctataagagtatttatccgagtcaaaacgcaggttacgacatggtactttctgggccactttgggagttgggccgaggcggtagtggccagttttctatatttgcagacggtattgaggatgctagtggaattgccaagatccgtcttgtcattaaacgaagtaatggttctgtggtctccgacaataacctgagttatgacacagccaataaacgtgcgttctatccgtggattaaagatatgaacacccaggctggcatgccctcaagtgatcttgatgaagaattcaccttcaatttcatcgttacggacctggcaggaaatacgcttaacattcctccccagcggtttttatatgacgatcaaatgggagaatttacgccatttgcagttcatgactcacgtgtaagcaccagtgttgtacccggcatttcttcgggatacgtcccgtttaaacgaggccttacagtgctggaaaacccctacaagttggttatacgtatcccaagaactaactggaagccatatcgaaatggtggcatgagcattaccaataactatggcggagtacaggtcctttccgaagatgccacctatgtctacgtggaagttaagctgccacagggtgccttagatggaaactactatagacctgtgaatacatatcaatggtctggaggagatcttggttag

SEQ ID NO: 133420 - DNA, 588 bp, Enterobacter cloacae
atgaaagacttcgaggccaaaggcgcgaccgaaggtctgacgcctgaaatgcctgctaccgtcttcccccggggccgggtgctgttcggcatgacacggcatcttatggataacgtggccggacaatgtggcgcaacatggcagttcgtggacggtcagcgtcagatggtggcgaataacgaatatgttcacgacgcgattgtgctcaacagcgctacggggcttatcggtatgccgcagcagaccatcggcaacggcgtaaacgtccgcgcgctgattaaccccaacatccgggttaacgggctcattcagttggatcaggcttcggtattccgcactgcgctgtcgaacaacgatatcgcgatggctggtggccgcatcaccgaccagaacacggacgggaatatcacgctcagcggtaccaccgcgcagcctgccagcatcgcaacggatggcgtttatattgtgcgcgggattatgtacactggcgacacaaggggccaggcgtggtacatggatatgatgtgcgaagcgcgtggcgcggcggatttactctcgtcctcagcgcagcaaaggatttattcatga

SEQ ID NO: 133421 - DNA, 315 bp, Enterobacter cloacae; identical to SEQ ID NO: 133369

SEQ ID NO: 133422 - DNA, 1524 bp, Enterobacter cloacae; identical to SEQ ID NO: 118685

SEQ ID NO: 133423 - DNA, 2985 bp, Enterobacter cloacae
atgccacggcgacagatactgagcagtgatgaaaaagaacgcttactgattgtgccggatgatgacattctgctaaccaggatgtgctttttaagtgagcaggatctggtcctcatcaacaaacaccggagacccgctaaccgcctgggctttgccgttttactctgttatctgcgagggccgggttttactccagacaaaaacagtctccctcacgatggcgttatgtccagagtggcagagagattgaaacttcaacctgatttatggcgagagtacgcaacgagggaggaaacccgttgggagcatcttgccgaactctatcgctacttgggattagtgcctttcaacaggtcattgcaaaaaacatgcatccgccatttatatccgcacgccatgcggaccgacaaaggcctgattcttgctgaagagatgctcgcttggttgcacaacaacaacgttattttcccttccgttgatgtgatggagcgaacccttgctgaagccgcaacacttgcagacagagccgtattttctacactgacgacgcaactggaacaacgacataaaacagcactggataatctgcttgcatcaggtgatgagcaactttcccgtcttgcctggctgcttcagcccccgggtaagattaacggtaaaaacgtgctgcaacatattgatcggttgaatgccattgaggggttggcactgccggaaggtattacgctttccgttcaccagaaccgactgctgaaactggctcgcgaaggccggaaaatgagtagcagggacctggcaaaattctccggcacacgtcgttatgccgtgctggtttgtattatctcagaagcaagggcaacgcttaccgatgaaatcatcgaactacacgaacgtatcctgggtagcttgttcagcagggcaaagcgcacacaagccgaacggcttcagaaaacaggaaaactcatccagagcaagttaaggcaatatcttactgttgggcaggcgctgctaaacgcacgggagtcaggagaagatccctgggcggcgatagaagacgtacttccctggccggaatttatcaccagtctggaggaaacacagtttctggcccgaaaggataattttgatccgcttcatctgatcaccgaaaaatacagcacgctgcgtaaatatgcgccccgtatgttgtctgcattgcagttcagtgcagccccttcagcactgccactcggtgatgcgctggataccgtcagagaaatgtaccgcaaacaactccgcaaggttccgtcaacagcgccagtaaagtttatccctgagagctggaaaaagttggtaataacgccatcgggtatcgatcgccggtattatgaattctgtgtactgaatgagctgaaaggcgcattgcgatctggtgatatctgggttagaggatcacgacgctacaggaattttgacgattacctcattcctcctgctgattttgaaaaatcactcaaagagaaacagttacagcttgccattccgacagactgccaggaataccttcactcccgtatgacactgctggcgtcgcgactggaagaggtcaatgcgatggcgattgccggtgatttgcctgatgttgatatatcggacaaaggtgtgaaggtcacgcctcttgataacagcgttccttcgattgtatcaccgtttgccgacctggtttacggcatgctgccgcacccaaaaattaccgagatattagatgaagtggacagttggacgggatttacccgccactttactcacctcaaaaataatcacgtcagaccaaaagacaaaaagctgttgctgaccaccatcctggcagatggtatcaacctggggctgactaaaatggcagaatcctgcccgggaaccacaaaagcgtcgctggaaagcattcaggcatggtacatcagggatgaaacgtatgcagccgcgcttgccgaactagtgaatgcacaaaaaaagtgcccactggcagcatcatggggggacggtacaacgtcatcctccgacggccagaattttcgagtcggaagtcatggccgctatgccggacaggtgaatttaaagtacggtcaggaacccggcgtgcaggtttatacacatatatcagaccaatacagcccattttataccaaagtgatcagccgggtcagggactctacccatgtgctggatgggttgctctatcacgaaagcgacctggaaattacggagcattacaccgatacagcgggtttcactgaacatgtttttgcgctaatgcatctacttgggtttgcatttgcaccaaggatccgggatctccatgacaaacggctattcattcatggaaaggcggaaaaatattctgggcttcagtcaatcatatccacgaccagtctgaatctcaaagaaattgagacacactggaatgaggtactgcgcctggcgacctcgatcaagcagggcacggtaaccgcctcgctgatgttaaaaaagttggccagctaccccaaacaaaacggcctggcaaaagcgttacgggaaattggccgtatcgagcgaacgttgtttatgctggactggtttcgcgatccggccctgcgtcgtcgtgtgcaagccggtttaaataagggtgaagcccgcaatgcgcttgcgcgggccgtttttatgcaccggttgggcgaaataagagacagggggctggaaaatcaaagctatcgcgccagcgggctgacgctgttgactgcggcgatcacgttgtggaacacggtgtatatagaaagggccatcgaatcactaaaacgaaaggggctccagattaatgagccgttggtttctcacctgtcccctctgggctgggagcatatcaacctgagcggagattacatctggcgtaataatcttaagctgggatccggtaaatatcgaccgttacgcacagttgatgtcagtctgtacaaaaaagaggcttag

SEQ ID NO: 133424 - DNA, 1077 bp, Enterobacter cloacae; identical to SEQ ID NO: 97051

SEQ ID NO: 133425 - DNA, 609 bp, Enterobacter cloacae
atgggcttcaagtcggacctggggcgcttctgccgtacctattcctatatcgcccaactgattgattttggcgacccggagttggaaaactttgccgctttcgccaagctgttgcaaaagcgccttcagcacgaagcaccggaaaccgtggacttgacaggcctggtgcttactggctttgacatcaatgctcgacccgatgacgtagaagacgaaggcaaaaccccggtattgcaaccagcaggtgcaggcggtggtggcgcggcaggcgacaagccgaaattcgtcaaagagattatcgagaggctcaacagcctgtttggtgaggcgacgccgatccaggatcaggtggctttcgttaatcagatttcagcgattaccggtgaaagcgatgttgtcatggctcaggtggaaagcaacacccgtgagcaggctatgaaaggcaacctccccggtgctgttcagcaagcggttgttcgtgctttgtccagtcatcagaagctggcaacccaggtgctcaagtctgaccgtcagggcatgaccgcattggttgatatggtgtatgacctgctgcgcgaaggcaaagacatcgatctaggtatggattaa

SEQ ID NO: 133426 - DNA, 966 bp, Enterobacter cloacae
gtggtcacacaggtaggtcatgcctgcgccgttttcgcgggcatcggccagcatctggttaactgccgtccattggtgaaagcgcgggaaaatcagagtttctttcttcgaccagttgccctgaatatccaccacgtcctttttctcgacgtagacaaagctatggaaaatccgcagccaggcatccggctggcagaccgcctcccagaagtaggctaccgggtattcctgggtaccatcggccttaatttcacctggcgggttacccgcatgtaccgtgccgctttcgtcctttcgccccttattgaacggcaggaaaaaggtgttttctccatccagcttggtcgccatcatgatttcagagtcggacatggcgaaatgcaccaccgccccgcgcttgaaggtcagcaatggctcccggcgtttggtcttggcgtcatacggcagacgatcattgcggtactgatccatggccgcttcgcaggactgggtgaagtcggtcttcagttcgacggttgccaccggcagaccgttgataaacagcaccaaatcaatggcaaattcacgggccggctgatacttcagctccggcaccacgcgcaggatattggcctggtaacgctcaatgactgctgcattgcgcttgtcttccggtgcagcctcggtcatctcaatcaggccgcaaccggcaatggaaaaaccctggcgcaacacctgcatggtgccttgtttctccagtgctttatccaggcgatccatcagcacttcaagggttttggccccgttgagccgttccagcttgtcccatttttcctgctggccgctggttttgatccagctttccaagtcttcgggatacaccgcccgctcggtgtcgtagaacttggaatcacccagcttccagccctgatctaccaaccggtcgatgatgtattgctggaagtgtttttcctgatgtgctgctga

SEQ ID NO: 133427 - DNA, 1542 bp, Enterobacter cloacae; identical to SEQ ID NO: 30088

SEQ ID NO: 133428 - DNA, 2973 bp, Enterobacter cloacae; identical to SEQ ID NO: 56202

SEQ ID NO: 133429 - DNA, 261 bp, Enterobacter cloacae
atgtatgaccagacctttcagcgcgccttcaaacgtgccgtagaacaagcaggcatcacgaagcccgccacaccgcacaccctccgccactcgttcgcgacggccttgctccgcagcggttacgacattcgaaccgtgcaggatctgctcggccattccgacgtctctacgacgatgatttacacgcatgtgctgaaagttggcggtgccggagtgcgctcaccgcttgatgcgctgccgcccctcactagtgagaggtag

SEQ ID NO: 133430 - DNA, 354 bp, Enterobacter cloacae
atgcgatacagacgtgaagacgccgacggtgattacacctttggcagcggcgatgatacctggctgattaactcaccggaggccgtcgcgcaggctgtgaaaacacgattcgaattgtggtatgggcaatggtttctcgacaccaccgagggggcaccgtggattcagtcggtactcggtaagcagaagccggaaacctataacctggcgatccgtaagcgcatcctcgaaacgcggggcgttaaatccatcctctctttcaatacgacagtgaacactacgacgcgccgcgtccagttcttcgctgaaatcgacaccatctacggaacaacgacagtaaccagcgaggcataa

SEQ ID NO: 133431 - DNA, 756 bp, Enterobacter cloacae; identical to SEQ ID NO: 133375

SEQ ID NO: 133432 - DNA, 225 bp, Enterobacter cloacae; identical to SEQ ID NO: 133374

SEQ ID NO: 133433 - DNA, 234 bp, Enterobacter cloacae; identical to SEQ ID NO: 133373

SEQ ID NO: 133434 - DNA, 582 bp, Enterobacter cloacae
atgaaagacttcgaggtcaaaggcgcgaccgaaggcctgacgcctgaaatgcctgctaccgtattcccccggggccgggtgctgttcggcatgacacggcatcttatggataacgtagccggacaatgtggcgcaacatggcagttcgtggacgggcagcgccagatggtggcgaataatgagtatgttcacgacgcaattgtgctcaacagcgccaccgggcttatcggcatgcctcagcagaccataggcaacggtgttaacgtccgcgcgctgattaacccgaatatccgggttaacgggcttattcagctggatcaggcttccgtgtatcgcaccgcgctgtcgaacaacgatatcgctatggctggtgggcagatcaccgaccagaacacagacggaaatatcacgctcagcggcaccacggcgcagcctgccagcatcgcaacggatggcgtttatattgtgcgcgggattatgtacactggcgacacaaggggccaggcgtggtacatggatatgatgtgcgaagcgcgtggcgcggcggatctccgcactcaggactcgcttaatcgggggtaa

SEQ ID NO: 133435 - DNA, 261 bp, Enterobacter cloacae; identical to SEQ ID NO: 133358

SEQ ID NO: 133436 - DNA, 588 bp, Enterobacter cloacae
atggatattctctctacgctctttcagcagcagagccggaaaatagggatgattgtccccagtgtggttgtttctgagaagcataccgacacgctggagataacagagcaccctgttgaggtcggggccgccatcgctgaccatgcctacaaaaaaccatctgaagtggtgatggaggtcggtttcgctggtggcggatcgttgctggattttgccagtaacctgacggccaccagcctgctcgggctgagtcctcagcagacgtatcaggagatactcgacctgcaggcgagccgtattcctttcgatgtggtgaccggcaagcggatttacaacaatatgctgatccgtgcgctggaagtgacgacagacaaggcaaccgaaaacgtcctgtccgccgtcctcaccctgagggaggttcttatctcgcagacgcagcagatcaccgtcgcggataaaaccaacatgaaggacggggccagcacctcggcggtgctcaacactggcaccaaaaccactaagccgccaaatacctcactgctgcaaagcatatcgagtaacgcggcgtcattactggggctcggctaa

SEQ ID NO: 133437 - DNA, 372 bp, Enterobacter cloacae
atgcagtcgcaggtaatcttcctggccgaccgatttgcggtgatgtctcaggctggagggaccgtaacactgccgttcgttatccagaatgggcagacgtttatccgtgacaccttcattcaggatggcactatcaccaatgccaagatcggaaatgtcattcagtcgaataattacagtgcgggtacagcaggctggaccatcaacaagaatggttctgctgaattcaataatgtcacggttcgtggcggggtttacgcccaaaatgggcagtttggatttaccaactcaacaggaggagtcacgatcaataacaacggtgtcactgtcaatttgtcgaacggtgggcgcattgttctgggagagttttga

SEQ ID NO: 133438 - DNA, 894 bp, Enterobacter cloacae
atgggtaagctaagtgaaggagatgaagtaattgttcaggcgaatacatatatagcatctatacttgctattaccgcaaataatcttgtccccgttcttgtagaaccatctgaactaagtttcaatctttctatcgagaatataaaaaaggctatctcaccaaggactaaagctatccttccagtgcatctatatgggcaattaagccctatggatgagattatgaatattgctcaagagcatgggctattggttcttgaggactgcgcacaatcacatggagcttctatttctggccgcaatgcaggtaattgggggcatgctgcaggctttagtttttacccgggcaagaatttaggtgctttgggtgatgctggtgcaataactacaaacgatagcgagttttatgatgttgttaaagcattgcgtaactatggttctcataagaaatatcagaatatatatgagggcgtgaacagtcgtctggatgaaatccaggcagcaatgctaagagtcaaattgcgacatctagatgatgaaacatttgcgcgacaaaaaatctctaaaatataccgcacttctattgtgaatcgctatattactctccctgaaatttcttctggtagcgagagtggtcacgtttggcatttgtttgttattcgagctaaaaatagaaccaagctccaagagtatttaagtcaccatcgtattcagacgcttatacattatccaatcccaccgcataaacaacaagcatattcttcatggaataccttaagtttaccaataacagaagctatgcatagagaagttttatcgatacctttagattcaacacttagtgatgataatgtaaaatatatcgttgaaattttgaatggttatattgaatga

SEQ ID NO: 133439 - DNA, 258 bp, Enterobacter cloacae
atggcctgtgccagtccgtcgacagagatattgtcggacaccaggattccatacttctggccactaagtgccggagcggcggcaggtgtaaccgtcattgaggtggaactgtccacgcttgagatctggaaaatttgtaccgggctcgacatgacgataatcgtctggccagcgcgaacctggctggcgggtgccgtccagtttgtacccgtcccggtggcggtatttccgttgatagcaatggtgccagtgttataa

SEQ ID NO: 133440 - DNA, 510 bp, Enterobacter cloacae; identical to SEQ ID NO: 97269

SEQ ID NO: 133441 - DNA, 498 bp, Enterobacter cloacae
ttgcctctttatctcagccagttactgctgaaattacaacagcattatcactatcttgttgagcagattaaagatctggaatctcagttgaaacgaaagttggacgaagatgaggttggacagcgcttgctgagtattccctgcgttggaacgctgactgccagtactatttcaactgagattggcgacgggaagcagtacgccagcagccgtgactttgcggcggcaacagggctggtaccccgacagtacagcacgggaggtcggacgacattgttagggattagcaagcggggcaacaaaaagatccgaactttgttggttcagtgtgccagggtattcatacaaaaactggaacaccagtctggcaagttggccgactgggtcagggagttgttgtgtcggaaaagcaactttgtcgtcacctgtgctctggcaaacaagctggccagaatagcctgggcactgacggcgcgacagcaaacttacgaagcataa

SEQ ID NO: 133442 - DNA, 333 bp, Enterobacter cloacae
gtggtactgaaagcgcaaatcgcgattaacacctgggatggcacgatcggccatcttgaggacattctcgaaaccatctttgccggttccggaatagaaatgcagatcatcgacaaccaggacatgagcatcacgataaatgctattgccattaatggaatagcaaacacatcggctgagcttatttccgttatcaaagcaggcgagctgaatatcaaagctggtggcgtgagagttaaaaacctcaatgtcattgatcccgctcgtcctctgttcggttttgacacacagagtatcgctatagccggttatgacgccggatactggagctaa

SEQ ID NO: 133443 - DNA, 444 bp, Enterobacter cloacae
atggctttgtccgtttattacctaccaaagttggcttcattgagtagtgtggcggaaataaaaaaagaaattaattctgttttcgttgttatactgcctgtaataatttttgccgcactatgcatatatttacttcgagactatataattaaactgctttttacttcggagtttatggctgcaagagatttgtttgctatacagttgataggtgatgttatcaaggttatcagttggttgtatgcatatccaatgttggctaagaaagctactaagtacttcataggtactgagatcttcttcgggattacatgggtattattaagcattttctttataaataagcacggagtttccggagcgaatattgcctatgctgtgaattatagcttttactttctttttgttttctttaacttaaagcgagtgattttgcttaagtaa

SEQ ID NO: 133444 - DNA, 219 bp, Enterobacter cloacae
atgaacgcaaacgccccgaacactgccagttgcaccacctgctgcgtatgctgcaaagaaattccgctcgatgccgccttcaccccggaaggcgcggaatacgtcgaacatttctgcgggctggattgctatgaacgcttccaggcacgcgccaaggccgcgacagaatctgacattgcgcctgtcctgtcattttcagaagacgactgcaccagttga

SEQ ID NO: 133445 - DNA, 249 bp, Enterobacter cloacae
atgctgatccgcgcgctggaagtgacgacagacaagacaaccgaaaacgtcctgtctgccgtcctcactctgagagaggttcttatctcgcagacgcagcagatcaccgttgcggataaaaccaacatgaaggacggggccagcacgtcggcggtacttaacaccggcaacaaaaccacaaagccgccaaatacctcgctgctgaaaagcatcacgggtaacgcggcgtcattactggggctcggctaa

SEQ ID NO: 133446 - DNA, 225 bp, Enterobacter cloacae
atgtcgcgtaaaggtaactgttacgacaacgctccgatggaaagcttctggggaacgctgaaaaatgagagcctgagccactatcgttttaataaccgggatgaagccatctcagtaatacgggaatacattgagattttctacaatcgtcagcgtcgtcactctcgtctggggaatatctccccggcagccttcagggaaaaatatcatcagatggctgcttaa

SEQ ID NO: 133447 - DNA, 549 bp, Enterobacter cloacae
atgaaaatttctaatacttcgctcagtggtgttttgattatcgaacctcgagtgtttcatgatgaaagaggctatttctttgagagttttaacgaaaaaaacttcaaagaaaatatagatccaaacgtcacttttaaacaagataatcagtcaagatcttctaaaggggttttacggggtttgcactatcaagaagcaccttttgcccagggaaaactggttagatgcgttacagggcaggtttttgatgtagcggttgatatacgcaaagaatctccaacatatgggcaatgggtgggtgttattttatcagaagagaataaaaagcagctttggatcccagctggatttgcacacggttttttaactttaagtgagcatgcagaatttctttataaaactaccgattattattctccagcacatgaacgttgtataaaatgggatgataaggacttgaatatagaatggccaaaaatggaatacatcatttctgagaaagatcagaacggttcaacctttgcttctttaaacgttcaaggtaaataa

SEQ ID NO: 133448 - DNA, 411 bp, Enterobacter cloacae
atgaaaatcaattttatcccacttcaaaagcatggtgatgatcgtggttcattggtcgccttagaagaagagaataatatcccttttagtattaaaagagtttactacatctttgatactaaagaaggtgttcgtagaggttttcatgcgcataaaaaattaaaacaggttgcgatcgccgtaaaaggttcttgtcgttttctgttggatgatggaacagagaggatagaggttgttttggacaacccagcgcaggggcttctcattgagtcatgtatttggcgtgagatgtatgatttttctagcgattgtgtattaatggtattagctgacagtcattatgacgaaaatgattatattcgtgactatgatgcattcatcattcacgctaacgcaaagacagatatttaa

SEQ ID NO: 133449 - DNA, 519 bp, Enterobacter cloacae
  misc_feature (487)..(496): n is a, c, g, or t
gtgatatcaattgttattttgtcatacaatcatgagaaatatattgctgagactttggaatcagtttatcagttaaatattccaaaggaggtcattgtaattgatgattgttcaaaagattcttctctagatgtcataagaaatattgtgagtaaacatgatgcaagtatgtatacaaaaatagttgcaaaagagataaaccgtggtttagtcgactcacttaattcaggattagaaatggcaaattctgagtttgtttatttcatagcgtcagatgatctcgttgaatctgaaggttttaaattattatatgatgagctatgcaataatgatagcgctcaatttgccatggggaatgcttgggtattttacactggtcaaaaatcaacagagtttgtttataaaaaacaacatgatgtttttttctctggtgatgatgcgtcattgagaaagaaaatctttactaattttcctaaacctttattgnnnnnnnnnnttgctgcaagctacgatctttag

SEQ ID NO: 133450 - DNA, 180 bp, Enterobacter cloacae
atgtccgatcctgtttctggcactacggtagcggctggtggtctgctggtttcagtcctgtacggtgtctttactcatactgatttcggagtggtgtttggagcgtttggtggcgcggtgttttacgttgcgacagctgcaaaccttacgcgtgcgcgcctggctgcatacttcctgtga

SEQ ID NO: 133451 - DNA, 438 bp, Enterobacter cloacae
atgaaacccacttgccgggattccaccgactcctatctgttttttaagccactcagatatcgtctgggccgtcacctgatcgccacgctggtgaaacgtctctggctgtcgtacacaactggcttgcacattccggctacccgctggatcgggatactgcctaaggaatccccggaccgctgcggcacatgtgccatatgccgtactgcttactaccacaccggtgcagataactatcagtacccgtggtgtgatttaaatgtacctttagttaccttggtggtcaagcggcgaatgtactttttgttacctaaaggagtaaaaaaaatgccagaaggatatctggcattggaaatgaagaacttaaatgttctgggttatctgaactactttcccaacaattcggcaattaccgtctattgggatgggtttaaatga

SEQ ID NO: 133452 - DNA, 705 bp, Enterobacter cloacae
atgacattcaccaaagagagactgacggaattatccagacgtgaaaatgtcggggctattctcggcgaagaaattgcagagctggcgcgtattgcgctggcatcgctcgaagcggaggctggagaatacctgacgcacgtggttgatgacggatgcggtgaatttagtgacaggatgaattttagccttccagtcggaactaagctctactccgccactccagcgacggtatctgtacctgagtgcttcaagcgccttctccaccatgcttacggcatgacaatggggaattactggaacaaaggcaccatggcttggcatcatcgtgacaagctgtgtcgggctgttgaagactgccgcgccgccatgcttctgggttccgagcccgattttcgggaaatctcaaattcgtcaaccaacaattttcgggaaaacgcggaaacgtcaaccaaatgctggtgccacacctgccgcccggtgaaaatttccgacatgcgattcgtcgtctgtcctgattgcggaaataagcgctgcccgcacgctaatgaccaccggaatgcatgcaccggaagcaacgagccagggcaagaagggagtgcttatccagcagcaccgcagcaggaggttactcaggcactcgccaaagggatggagcgctatggcgacgccatgcaggaactggcgcagcaggaggtgaagccgtga

SEQ ID NO: 133453 - DNA, 615 bp, Enterobacter cloacae
atggctctttttacttttaatgatgacagctacatacttggaaatattcgtgaagtagacaccagaaaagtaactattctggtaaacactgataaagatctgcggaaggctagagttggacagcttgtagcagtccaactaagcggagcaactgaatgttggctcattggcatgattgataaagtaataaaagcagtagtcgctccgctccctgccctagaagtgcaagaagatgaagcagacgagatagacgcttttgaagatattgtaattaacacagtcaagattactttaatgggcggggcccgatgggatgcaattgagcaaaaatataagttttcaaggtcactagaccacgtcccggaaatagactcaacctgttatgtacttaaagatgcccatctcgaagagttcatgcgtgtgatttctgaatgtggtgatggagagcactcactggagctaggctcttataaacttaatgagaatgcacgcgcttatgttgatggcaataaattgttccagcgacatgctgctctacttggtagcacgggatctggtaaatcatggacggttgcctctgacctgcccccacgattagatacaacactcagttag

SEQ ID NO: 133454 - DNA, 456 bp, Enterobacter cloacae
atgtttgaagcagcacgcgttggtgatgatatcggccactccggtgcgctggccgggatgattgccggaacgattgtcggtggcctgattgccgccgccgggggcattctggcaggggccatgtttattgccggtctcggcgcatcctgtcttggcgtgggcgtcctgctcgtcggcgccagcctggccgtggggtattataccggggagctggcgaccgccgcccgggacagcatcgcggacgccggggcatccagcatgacgaagaaaggcgtcatcacctccggctcgccgaacgtgtttatcaacggtaaacccgccgcgcttgccaccgatagcatcgtcgactgttctgacgacggctcgcagcagatggccgaaggctctaagcgcgtctccattaacagccagccagcccccgcatcggggatcgcaccacctgcgacgcaaaggtga

SEQ ID NO: 133455 - DNA, 252 bp, Enterobacter cloacae
atgtggcttatgaagacattactaacatcggggtgtactaatcaacggggagcaggtcagtttaagtactcaggccataggtactatgacgcttcagtacagacacagaagtaccagaagtttgttaatgatacagggtacacgtttcaacctggggtagggattgataccagtatctacaagaacgaatggaacggtacgaaggtgatatgtgaaagcgtgctagtagattatgatggcacaaatctatga

SEQ ID NO: 133456 - DNA, 198 bp, Enterobacter cloacae
atgacgcttatgaagcctgtacagcctgtacaggcttttcttttattcccaaaaaatagtggcttcttttctcggttcgtttacttccgttctcttaacagtagccacatgctcctcggttttcctcttgatgagattatatgttattacttcaatagaatcctgaaaaccactttcctttctatgaacaaactttaa

SEQ ID NO: 133457 - DNA, 198 bp, Enterobacter cloacae
atgcctcgtcaaccggatattcgtgctgcttttattgcagccatacagcaaaacccgaagggctatctctgcctgcatacagacaaattcatcgctgaactgcaggagaggcactggcatttcagccaggcagatgcaaattcatggattgagcgataccagcccgacttcgccgataagacaacaaatggcagctag

SEQ ID NO: 133458 - DNA, 681 bp, Enterobacter cloacae
atggctaaagggataggtttttttgcccgcgccttgctctgtcagccagactcaacccagggttacaggaaaattaccagcccagtgacttcaaccgaacatttgccagtattccaccaacgattgatggagatcatcactgaaaatatgatacgacatgatgaaaataaaagggaatgcctctttttttgtcctgaggcggaacaacgaatgattgagttttataataaagttgaatctgagatggggatgcttggttttctttctgacttcaaagactatgcttctaaggtcacagagaatatggcgagagtagctgctttactgcactacttcgaggggagtggcggagatatttcactcattgctgttgaagcagccatacagataatttcatggtacgtggacgagtatgtaaggcttttctcaaaacagcaagaatcgacacttgtaggctcagaggctcacgatctttactgttggataaaagaatattgcgtgagaaatacgatcccttatctcagaaaaaacacgatattgcagtatggccccaatcggttcagaaacagagcgacagtgagcgaattactaagcactctttactcacagcgtaagataatggctgcgaagcgaggtaaaactatatttatccagcctgtggagaccactgatttggtttga

SEQ ID NO: 133459 - DNA, 633 bp, Enterobacter cloacae; identical to SEQ ID NO: 80482

SEQ ID NO: 133460 - DNA, 225 bp, Enterobacter cloacae; identical to SEQ ID NO: 80481

SEQ ID NO: 133461 - DNA, 237 bp, Enterobacter cloacae; identical to SEQ ID NO: 80479

SEQ ID NO: 133462 - DNA, 624 bp, Enterobacter cloacae; identical to SEQ ID NO: 80477

SEQ ID NO: 133463 - DNA, 1470 bp, Enterobacter cloacae
  misc_feature (1381)..(1390): n is a, c, g, or t
atgactgagtttgaaaaacaaaaactgggcaaaacgctctggaatatagccgatcaattacgcggcgctatgaatgcggatgattttcgcgattatatgctggcatttttattcctgcgatatctatcggataattacgaagccgcagctcaaaaagagctaggggtagactaccccaaacagaaagaggggcaacgtcaaccaccgctgactctgtggtatgaacaaaatgagcaggatgttcctgagtttgaaaaactaatgcgccgtaaagtgcattacgtaatcgaacctcagtatctttggacgagcattgctgagatggcacgaacccagcatgtgaaactgcttaatacattacaggcaggttttaagtacattgaggaagaatcgttcgccagtgtcttccggggtttgttctcggaaatcaatcttgcctcagaaaaacttggcaaaacatacggtgagcgaaatgaccgtctttgtaagataatcaaagagattgctgatgggttgaagcagttctccaccgacagcgacacgttgggggatgcttacgaatatctgatcggccaatttgcagcgggctcaggtaaaaaagccggggagttctacacacctcagcatatttcagacatcttatctgtcatcgttacgttggatagccaggaacctgccactggacaacgatcacacctagacagcgtgtttgattttgcctgcgggtcaggatcattgctcctgaatattcgcaaacgcatggggcagcacggtattgggaaaatatacgggcaagagaaaaatatcaccacctacaacctggcacgtatgaacatgctcctgcatggagtgaaagattcagagtttgatattttccacggtgataccctactcaacgattgggatatgctacgcgaaaccaatccgtcccgaatgcctaaattcgatgcggtggttgccaaccctccattcagctatcgctgggaacctacagaaacattagctgatgatgtgcgctttaaaaaccacggcctagcacctaaatctgctgctgacttcgcctttcttttacatggattccattttttaaaagaagatggcgtaatggcaattatcctgcctcatggtgtacttttccgaagcggtgccgaagcacgcatacgcacgaagctgctgaaggatggtcatattgatacggtaattggactgcctgcaaatctgttcttctctactggtattccggtatgtattctggtgctgaaaaaatgtaaaaaacctgacgacgtattattcatcaatgctgccgaatacttcgataagggtaaacggcagaatcagatttcgtctgatcatattaaaaaaatcattgatacttacaagnnnnnnnnnnttacaagttccgtaaagaagaaccacgatacgcgcgtcgcgttagcatggaagaaatcgaaaaaaatgattttaatttaa

SEQ ID NO: 133464 - DNA, 1173 bp, Enterobacter cloacae
atgaaatcgaagcatatttttgcggatctttcagtgttggccgaccagttgcgcgacaaactagagacgatgaaaactatcctgctctatgcctataacggtacagggaagacacgactgtcgatggcgtttaaagatgcaggtaaaaaaacaattcaccgccctttttcggttggtgatcatgtaggccagccgcctacaattaccgaaacgaccggcgataccttatatttcaacgctttcaccgaagatctgttccattggaacaacgatctggaaggtgatggggatcgccgcttgctgctcaatagggattcgcgattttttcagggactgtttgaactggaaatggacaaccgcatacggccgttgttgcagcgttatacagacttcgactttcgaattgatacagaagaatgggcgatacgcttttcacggactgtggatggtcaaattattgataacatcaaggtttcgcgaggagaggaaaatatcttcatttggtgcttcttcttagctatcgtacaattagcgcttgatggtgctgatgcttaccagtgggtaaaatatgtctacatcgacgatcctatatcttcactggatgagcataacgccatcacagttggtagccatctggcgcaactactgaacaaggctgataacccgttgaaagtgatgatctcgtctcatcatcccttattcttcaatgtcatgcacaatgaacttgatgttcgtaaatccagaaaggtcgcagcatactttttatcaagatccagagttgatggtagttattctctggcctatacaggtgcgacaccattctttcatcatgttgcgatactgaccgagttgtataaagcggagcaatcaggcgagttatatacctaccatttcaatatgttgcgttcagttctggaaaaatcagccagcttccatggtttctcaaacttctcagcctgcattgcgcaggatgcggatgaccctgaaagaattttacattcgaggctcatcaatattctgagccatggaaactattcgcttttcgagcctcagcctatgctcgatgaaaataaaacttatttcagaaagattttgcatgatttcctgaagcgctatccatttaatcctgatttatttcctcaacagattgaggaaggtgaagaaaaactatga

SEQ ID NO: 133465 - DNA, 1272 bp, Enterobacter cloacae
atgagtggaagcaataaacatatgctggtaccacaattgcgtttcccagagtttagaaatgcagaagaatggaccacctataatttaggccaactttcaaaaattgtaacagagagagtgggaaataatgattgtattccatatacaatcacatctggggttggccttattagccaacaggaaaaactaggtagaactattgcaggtaattctttaaaaaattacatactcctacagcataacgattttgcttacaataagagtgccacaaaagcatacccgcaaggatatattgcatgttaccagggacacgaacgagctgctgttcccaacagtattttcacttgttttcgccccaccacaaacttagtcataccagcttttttggataatctttttattgccaacttacatgggaaatggctaaagaatcgcgttgctgtgggtgcacgtgctaatggtgcattgcaagtcaataatgatgacttaatgaaagtccccgtaccattaccaattggttcgcagtcgctttccgaacaaaaaaaaatcgccgactgcctgtcttcgctggatgacctgctcacagcagaagtccagaaactggatgcattgaagaaatataaaaaaggcctgttgcagcagcttttcccccgtgaaggcgaaactgtgccacggatgcgcttccctgagtttctgagtagaggcgcgtggcttccaaaatctattggtgactcatgccagacatttagtggtggtactcccagttcaacaaataaagtctattatggtggtgaaatcccattcattagatcagctgagatcaaaaaatatgaaacggaactctatttaactaaaaaagggctggagaactcagcggcaaaaatggttaagaaaggtgatgttcttgtcgcgttatatggtgctaatagcggagaagtttcgctttcaaaaatagatggcgcaataaatcaagcgattctttgcttgaggcatgaatcaaataacgcatttttgtatcaatatttaatgcataaaaaagaatggattatcacaacctttcttcaaggaggacagggaaacctttctggagaaataatcaaatctatcaaacttttcttccctcaaccacctgagcaacaaaagattgccgactttctcttggtttttgatgaccaaattgatattcaaacaggaaaaatcgatattctaaggaaacacaaaaaaggtcttgtgcagcaacttatccccgtagttaatgaggttactgcatga

SEQ ID NO: 133466 - DNA, 186 bp, Enterobacter cloacae; identical to SEQ ID NO: 80473

SEQ ID NO: 133467 - DNA, 1077 bp, Enterobacter cloacae
atgctgcttacgggatttgactccaagtatctcaatacgctgtacgtggacaaaaatctcaaacaccatggcttaattcaggcattctcacggactaatcgtgttctcaacgatacgaagccctacggcaatattctcgattttcgtcagcagcaaaagtcggtagaaggagccatcgcgctattttccggtgagaaaatcgataacccgcgtgaaatctggctggtagaccctgcacctaaagtcattgagaatctgcaaacagccacgcaaaaactggccgactttatgcaatcacagggactgactaatgcaccggaagaagtcgccaatcttaaaggcgatgttgcaagagcgcaattcgttaacctgttcaaagatgttcagagactcaaaactcagctcgatcagtataccgatctgtctgaagcgcagaagcaacagatcgagaggatcgtgccgacagatcaattgcagggatttaagggcgtgtatctggaaacggccaagcgcctgaaggaacaacaggacaaggaccagacaccaccagaagtacaacaacttgattttgaatttgtgctttttgcctctgcggttattgattacgactttatcatgggtcttattgctaatctgactcagcagaaaccaggcaagctcaccctgaatcgcgaagaactcattggcctgatccagtccgatgccaagtttatcgacgagcgtgaagatattgctgagtacatccgtggcctgccggtaaatgaagcattaaacgaaaaacagattcgaacgggttttgaacacttcaaggcagagaagaaggcgaaagaactcaatgttatcgccgcccgacacgaactcgcacctgatgccctacaaatttttgtggatgaaattctgcgtcgccgtatcttcgacggcgagcgcctttccgaattaatggctccgctgaatctgggctggaaagcacgcacgcagaaagagctggcgcttatggatgagctgacaccgttgctacacaaactggcacaagggcgtgagatcacgggactatcagcctatgaggaagggaaataa

SEQ ID NO: 133468 - DNA, 1785 bp, Enterobacter cloacae
atgagtacgaccgaaaaccaaattgagctggatcttattgcccggctggctgaactaaaatacacactgcgacccgacattcgtgatcgggcatcactcgaaaaaaacttcagggagaagtttgaagctctcaataaggtgcatctgaccgatagcgagtttcagcgtctgctcgatactattattacgcctgatgtgtacaatgcagctcagacgctacgcaatatcaatagcttcgagcgtgatgatggaacaccactgaactacagcttggttaacattcgcgactggtgcaagaacgactttgaggtagtgaaccaattacgcatcaacaccgataacagtcatcaacgctatgatgtgatgcttctcataaacggtgtaccggttgtgcagatcgagcttaaaacactgtccgttagcccacgccgtgctatgcagcaaatcgtggattacaaaaccgagcctggcaatggctacggtaagacgctgctgtgtttcatccagctcttcatcgtcagcaatcgtactgatacctggtacttcgctaacaataatgcacgacatttcagttttaatgccgatgagcgcttcctgccggtctaccagttcgctagtgaagataacaaaaagattacccagctagagatcttcgccgacaagttcttagccaagtgtactttagggcaaatgatcagtcgttatatggtcctggttgccagcgaacagaaactattgatgatgcgcccataccaaatttatgcggtcaaggctatcgtcgagtgcattcatcagaattgcggaaacggctacatctggcataccactggttcgggcaagacgctgacttcgttcaaagcgtccactttgctcaaggataatgctgacatcgaaaaatgcctttttgtggtggatcgtaaagatctggatcgccagacccgcgaagaatttaaccgttttcaggaaggctgtgtagaagagaacactaacactgaaacactggttcgccgacttttgtctgacgactatgccgataaggttattgtcacgactatccagaagctgggccttgccttagacggcacaaataaacgtaactacaaagaacgtctggagccgttacgagacgcccgtatcgttttcatcttcgatgaatgccaccgctcgcaatttggtgagaaccataaggctataaaagaatttttccccaatgcccagctttttggcttcacggggacgcctatcttcgagcagaatgccagctaccagcaaatcgaaggtcagcaagccagcctgcgtaccaccgacgacttattcgaacggtgtttgcaccagtacaccatcactcatgctatcgaagatcgcaacgtcttacgctttcacatagactatttcaaacccgaaggaaagaacccacctaagcccggtgaaggcatcgctaaatccaaggttatcgaaaccattctttccaagcacgattctgcgaccaacggacgcaaatttaacgctgtcctggcgacagccagcattaacgatgccatcgaatattttgagttatttgccagtattcagacaaaaaatgcagaaaaagacgctgaattccggcttttaaacgtagcatgtgtttttcccccccttctgaaggtaacaaagacgttcagcagatacaggaagatctgcctcaggagaaagaagataaccagcaggacccagagggcaagaaagcggcactcacccgtatcattgctgattacaatgcccgtttcgggaccaatcaccgcataa

SEQ ID NO: 133469 - DNA, 867 bp, Enterobacter cloacae; identical to SEQ ID NO: 80471

SEQ ID NO: 133470 - DNA, 837 bp, Enterobacter cloacae; identical to SEQ ID NO: 80470

SEQ ID NO: 133471 - DNA, 684 bp, Enterobacter cloacae
atgacactggcggaacgccgacatgaccggctggcggtcaggctttcgctgatcatcagccgactgctggccggagaaacactgcatgtgggaaaactggctgctgaatttggcgtgtcggtacgtaccctgaggcgggattttcgtgaacgactgatgtatctggatctggaatacgaccggggaatgtgccgcctgcgctccggtggcagcgtatcgcaacgggagctggatattctgacctttgcctggcgctccgggatgggagatgtatttccggggctggacaggaagatggtcaacacgctgctggcgtgtgatgaatcgccctgcctggtctggtcatccccctgtaccagcacggcggcaggctctctttccttctttcggctgattcaggccattacggcgcgtcagcgtgtgacgctgctggccgaggggcaacgctgcgaaaggctggctccctgtcggctggtggcgcgggatggcacctggtatctgctggcggaatatggacaacgcatggcggtgttctcgctggatgagattcatcaggtcgttccctccactgaaacctttatccgtaatgacgccattttccgtctgccggaaaacgagcgttttctcaatgcattacctcattttcatttcatccagcgttctcttgatgcgctgtctctttaa

SEQ ID NO: 133472 - DNA, 3291 bp, Enterobacter cloacae
atgaaacgaaacctcaataccagttacaggctggtctggaatgatgtcctcggcgcatttgtcgccgtttccgagctggcgaaagcgaaaggtaaacgaaccggcgcggtactggcggttacggtcgccgggctggctggctctgctgccgcactggcggacggcagcaatattaccgtgcccggaggggagtccgtcactggtgtggtggtcagtaatcacgactctcatcaggtgtacggtcaggcagcaggctccattatcaacaccgggcaggaatacggagatgatgatgaaaacaatcagggtgggcagtttatccagtccggcggtgtggcaacgtcatccgtcgtcaatgccagtggccttgaggcggtactgaaaggcggtagtgccaccgataccattgttaatagcggtggtgggcaaagcgtgcatggcgaggcgacaggcactgtgctgaatggtggctcacaatgggtgcatgatggcggtgtggcaaatggcacggtcattaatgaagcaggttatcagttagttaaagcaggcgcgacagcttccggtacggtggttaacaccggatctcagggcggaccggatgctgaaaacagtgatggtcagtttgtgtccggtgatgtcaccgacaccctgattaatgccaatggtcgtcaggtcattttcgagggcggttccgctgacaccactaccgtgaaaatggggggcgaccagagtgtgcatggcgtggcaaaaaataccctgctggaaggcggcttccagtatgttcatgaaggtgctagcgccgaaggtacagtgattagccaaaacggctggcaggtggtgaagaacggagcgacggcaacggataccactatccttaatggtactggtaccgaggcggcaaacggcaacagtgcatcctcgcagagtgtgcaggctggtggctctgccctgaacaccactatcggtgatgattccccctccggcgaattgctgaccgacctgtcgtatcagatggtgaatggtggacgtgcggaaaacaccaccatcaataatggcggggtacagtcggtttttgccggtggtacagctatcggctcggtcgtgaatcgtggtggtcggctggaagtatccatctggcaggatgaacctgttgccggaaaaacggcggtggccgggtcggcgaataacgtcacagtggaagcggatggtgtgttgtcggtggatgcgggcacttccgcgatggatgtggtcatcaaacagggcggtgcattatgggcgaccaccgattccacggttaccgggacgaacagtctgggggatttctccattgatggcaccacgcataccgccaccaatgtcctgctggaaaatggcgggaaactgtcggttctgagcaacggtattgcagagtccaccaccgtaaacaacggcggggtattggcggtggccgccggaggtactgcctcagacatcgtgatgaacgatggcggcacgctgattgcggacacgggcgcaaacatcctcggtaacaccacactgaaagacaatgccgtgctggccggggatgtcaccaataatgataccctgctgttcagtacgggttcaggtgctgaagcccgtttcagcgggacattaagcggtgaaggttcgttgctgaaagaaggtgatggtacgctgacggtcagtgacagtaccgtgacacaatcgcagttaacgctgaatggcggcacgctggcgctggaaaacagcgtggttaacagtgatgtgattgcgcagtccggcaccagcctgttgctgaccggaaacaccgtgctgaacggtgccattgacccgaccgatgtgacgctggattccggcgcgatctggaatattcccgataacgccacggtaaaatcggtactggatgacctcagtgcctcaggcaccatcaatttcacgtctgtatcgggcagctttactcccaacacgctgaccgtgaaaaacctgattgggcatggaggcggcatcaatatgtccgtgcgcctggacgatccgactttccccaccgatatgctgattattgatggcggcaccgcaaccggcaaaacctggctgaacttcacgaatgtggggaatgccgggctggggcttgccacaaccggtaacggtatcaaggtggtggatgccatcaacggagccacgactgaagcgggggcgtttgctctggggagaaaactccaggccggggcgtataactataccctgcaacatggcacggcagatgaaagctggtatctgactagcgaagcggcttatcgcgcagaaaccgctctctatgcttctttgttcgcgcagacgctggattatgaccgtgtactggcaggcagttacagccagcgcagtaataatgcacagcgcggcagtgataacgcggtctgggggcgtattcagggcggtcatctggggcatggcgatcgtaaagggttggcgcagggaaccacgccggaaagcagcggcagttacggttttttgcaactgggtggcgatctgctgcgtaccgatgtactgacggcgggtgtttacggtgcgttgggtgaatccaacaacgaagtgaaaaacgatgatcgttcccgtgcggggtctgtgcgtgaccatgcgtacagtctgggcggctacctgacggcggtggacagcggtaccggtttatgggccgatatggtggcacagggttcccgtcacagcctggaagcaacatccgcagataaccgttttcatacccgtggctggagctggctgggttcactgggaagcggtttgccgctgaatatcggcaccagcctggtgctggaaccgcaggtgcagtacgtgtaccagtccacgtcactggataatggtcatgataacggggggtacgtgaacttcggcactggcagtgcccagcatgtccgcgccgggctgcgcttaggcaaccagtcggatatggtgtttggtcagggaacgtccacactggcaggttatgaatccaccatgaagcacagcgcggcagagcttccggttaactggtgggtcacgccatcggttatccgcacctttggcagtgatggcgacctgaacatgggaactaccacagcaggcagcaacgtcacgttcagtccgtcacagaatggcaccgcgctggatgttcaggcgggcgtggaagcgcaaatccgccagaatgtcacgctcggcgtgcagggcggttatacccgcagcgtgagcggtaacagcgctggtggttataacggtcaggccactctgaaagtcgccttctga

SEQ ID NO: 133473 - DNA, 390 bp, Enterobacter cloacae; identical to SEQ ID NO: 80467

SEQ ID NO: 133474 - DNA, 522 bp, Enterobacter cloacae; identical to SEQ ID NO: 80466

SEQ ID NO: 133475 - DNA, 645 bp, Enterobacter cloacae; identical to SEQ ID NO: 80465

SEQ ID NO: 133476 - DNA, 843 bp, Enterobacter cloacae; identical to SEQ ID NO: 80464

SEQ ID NO: 133477 - DNA, 1656 bp, Enterobacter cloacae; identical to SEQ ID NO: 132815

SEQ ID NO: 133478 - DNA, 147 bp, Enterobacter cloacae
atgctcggatgcaccatcagggagcagaacctgggtttcagttaccccgtctgcaatggcggacgcgatgaaaccgagtggtttaagcgaagcgacaaccgcagcgttaacatcttgtgcggttgtaccccaaagggcagcggataa

SEQ ID NO: 133479 - DNA, 744 bp, Enterobacter cloacae
atgacccccttgaaagaaattggcgagtgtgttatcggcgctggcgagcatgagtttttcttccggccgtcgttccgaaacatgacgcggataggcgagccagagcatatcgtccgcacgttctatgcactcttcaatgatgacgtggcgaaaatgcttgaggcagcgcgagaaattcacagcgctatacctgagcatcagcgcagattttacgcccactactttggagacgtaacgcatcctcgatgggcgcttgaagctgcaggttcagcggcgtttctacgtgaaactttactctccgcgatcaacgtcatccagtcttgctgcgatgaggatgtttctgaacttactggatggcatgaactatcccgtactgggcgacgtacatttgtatggcaccgcggttcgctacctcctgagaacctcattctcatagcccagtcgttgatgatgcatggcattatcggacgggccagagtcaggacgctgcagaagaacgaaagtaaggaaacaacttctgagtttcatgcgactgaatacatcatggccgcccgcaatcattttggcatcagtaaggaagaggctatggagctaaccatgaccgaattcgccatgatgctgaacgccaaatacccgaaccagaaaggcttcaccagggaagagtatgacgcggttatggatgatgatgaacgccggtggcaggaaatgattgagcgcgaaaaatcagcaaagaaagcagcctga

SEQ ID NO: 133480 - DNA, 516 bp, Enterobacter cloacae
atgttcgacttaattaagcacctcgttaaaaacgatattcagcacaccgtttctgataacggaaatatcaccgtcaccaacaatctggatctggaagatgttagcggcgtcgacgccttgccggacaatctgaccgtgggcggctcgctcgacctgcgcggcaccagcatcaccgcgctgccggacaatctgaccgtgggcggctcgctcgacctgcgcggcaccagcatcaccgcgctgccggacaatctgaccgtgggcggctcgctctacctgcgtccggagaagatcacgaacgtttcttaccgtgaaaactgcggttactccagccgcaccatcttcgctgtgtggaccggtaaagagttccggatcgctgcgggttgcttcttcggctccattgagcaattcgaacaggctgtagacgacaagtatgacggcagcgcagccgaagcatacaaaaaggccgggcgtgattgtgtggctgaactgactgaaaagctcaacccgaaagactga

SEQ ID NO: 133481 - DNA, 273 bp, Enterobacter cloacae
atgtgcaactgcattaatgaggtcggtgctcagatcgaagcgcgactgaaagagaaggttccggaaggtgctgaagtaagcgaaagcacttttgataccggctgggataatcaggttctttctctttccgaaggcaaactgtttgtgatgctgaaatacaaactggcgtaccgggccaaaaagaaaaacggcgaaatggctaaaaacctgaaccgcctggaaaccaacgtgaaaatgagtttctgcccgttctgcggcgaagcgcagggctaa

SEQ ID NO: 133482 - DNA, 216 bp, Enterobacter cloacae
atggaaacaatttcgcagcgcatcaagcaaaagcgagaggagttgaatctttctcaagcccaactcgccgagagagccggaatgaagcagcaatcacttcaagctattgaggctggaacaaccaagcgccctcgttttttgtttgagttagccagtgctctgcactgcgacccaaaatggttactgtacggtgaaaaacctaaccattctcaataa

SEQ ID NO: 133483 - DNA, 150 bp, Enterobacter cloacae
atgaaccatatcgaattcatcgaaaagcatgtgcgtgaagaactgctgaagctcggtttctctctgggagtggctcagggggggggcattccaggctatcgacatgtacaagcgcatgagccaggcaagcagaaaggggaagatttttga

SEQ ID NO: 133484 - DNA, 513 bp, Enterobacter cloacae
atggctttatcgcacgacgaactctgccagattgcctgtagatttctgcaaaagaatggttttaaggtagcttttcatgaccggtttcgcgcatggactccttatggagagcaggctgatgcaatcgggtttcggaatggggccagctgcctgatagaggccaaatgctctcggtcagaccttctggcagaccgtaagaaacctttccgcattgaaccagagaagggcatgggggattggcgcttcatgattagcgagccgggtattgtgaacattgaagacctgcctcttggttggggattgcttcacgtcgtcaatggccgggttaagaaagtgcatggttggccaggtaactgggaatgggtaaaccgtgacagcaagccatttcaggccaataaacaagctgagtgcgattacatgttcagcgcgctgcggcgcatggatttacgtgggcacctgaaagaagtttatgacggcgtaatagtcaacaaaccagaaggaagcgcagcatga

SEQ ID NO: 133485 - DNA, 264 bp, Enterobacter cloacae
atggaggtcaaagcgaagattttgcaggtgatgcgtgctcgcgccgcccaagaagaaaaggtgctaggaggtagatacgctttcacaatggcgacatggaacctccggttagctatggaagcagcatttcctgacgaggaatggaagtcggcagaattgcgcaaggttcttgccgagctggcagtggaaggtcaagtatccaaggatacctaccgcagccggattgggcaggcagtatggaagcttgaggtgcgcgatgcctaa

SEQ ID NO: 133486 - DNA, 267 bp, Enterobacter cloacae
atggtgagcaaactcaaacagcggcgcctgcgccgccttaaagccgatgtggcatggtggcgggaggaagcggaatacggtaaccgccgcatcctcgagctggccggagaaatcgacaggctcaaaaagctggttatccgcgtgccgatgccggtggtgttcccggctcagtctgcggcattcatcggaattgaccttgctggtggtgcggaccaaacatcggtaatcgaaatagaaaacggggaggttcggaaatggtcacggtaa

SEQ ID NO: 133487 - DNA, 180 bp, Enterobacter cloacae
atggtcacggtaacccaggaatcactggccgaaaagattaagcggctcgagtcactcggtaacgctgaatacgcattagggttaaccctgaacgaggaatatcaacttgcagcgtatcgcatgctgctcaagtatctgaccgttcctgttgaagctagtctggaggatgggaatggctaa

SEQ ID NO: 133488 - DNA, 435 bp, Enterobacter cloacae
gtggctgtaaaattcctcctgcgtgacgaacgcatccgaaaaaaccttatcgactacatcaaccagcagccgcttaacgctgaatttcctctcgtcattacgttctctgatcccgaccgtacattgccgcaaaactcactttttcacgcattgtgcggcgatgtgtcaaagcaactgcaatgggctggtaaacgccggaacctctcagagtggaaggttctttttgtttccggtcacgcggttgccactggaaagcctggtgaagttgtccctggtattgaaggggagttttgtgccattcgtgaaagcacctcaaagatgggtattaagcgcatgaacagcctgattgagtacacgcaggcttttgctgtcggcaatggtgttcagcttcgcgaggtgcgttattcgctggattacttcgggagggtggcatga

SEQ ID NO: 133489 - DNA, 600 bp, Enterobacter cloacae
atgcgtaagccaccccgtcgaaaatgcacagtatgccgtgaatggtttcacccggtcaggtccgagcaatacgtgtgctcgtatgaatgcgcctgcgtacacggtaaagccgccaacgatgcagccaaagccgagaagcagcggaaagagaaaaagcaccgtctggaggaagaaagagccgatcgccagcgccgggctgagcgccggatggcagtgaagcctctgagttatttcatcaagcaggctcagcacgctttcaacgagtttatccggtaccgtgacagggatttgccgtgtatcagttgcggacgtcaccatgacggccagtatcacgccggacacttccgcacgaccggggccagccctgaactgcgctttgatgaggacaactgccataaacagtgctctgcctgcaataaccacatttccggaaacctcaccgcataccgccctgctctgatcgccaaaatcggccaggcacgctttgacgcgctgatggggccgcacgcattaccgaaatggaccagggatgactatatccggatccgcgacgaataccgggcgaagctccgcgacctgaaaaagcaggaggccgcgtga

SEQ ID NO: 133490 - DNA, 690 bp, Enterobacter cloacae
atgaacgaacaatatctgcaatacgtccgggaagaaatcgcgctggccactgctgactttagcggtcgcacgaaggggcaattagtcgcgctggtggaacaactacagttcacccacgaacggtatccgcgaaaacgacagttcatcgttgatgaggtaacgggaaagaaaatcatgctgcgcaatcctccggtaccgggcaagcagtcgcacgctaaaggcacgtctatcccccaggtcatcccggtggagttttcaaccgcaagctggcgccgcgctatagcgaagctggaagacactgaaagcgcctgggtgaaatggaattatctgcatgacactgatttcagcctgcaaaccgtgatcgttcagcatggctggcagttattcagcgagacgattaaaggccggcgcatggcaggcaagaccaaagaaaagctcaaggcgcttatctggctggcggcgcaggatgtcaaagagcaactgtcagggcgcgaaacctacctcaatgaagaactgtcgggatttgttggcgtcgctcctgataactggacgcacaactatcgggactactggaaagctatgcgcggcgtatttctgtctctcgataggcactcattaatttcgatagtccgatcacgttctcaacaaaaatcagctttttcgcagcagggtgttgcaaaagtcaattaa

SEQ ID NO: 133491 - DNA, 726 bp, Enterobacter cloacae
gtgagcagacttgcgataactacaatcgtattttctctttttttaacttcatgtagttgggatcctaatggtgcaaaagcccaggaaaaatggctagcccaaaaaaatgaagaaaaacaagcgtacgataagcaagttgaggagggccagaaaagcaggcttcaaacacagcgcgaagaaaattctcaatttgaagtttcacacccagaggttatcgttgctggtgttggggacgagcttacaagtcaaggagcagagtctttgcgagatgcgtacaacagcattccattcgtaactcgttatccggggactacggaccctaataaagtttatacctatgtcggtgactacaaattaaatttgcaactggttaactcatctgtgctttctcagatctcagattgcaaacgaatttcagcgtatgccgatgttgatattaatcgtacttgcttcaatcaaattggaaatgatttgagtttgtttgcatctgtaattaaagacaaaaatattaccggaattgcaaaaaaagcagctctacgagattcaacttacggaaccaaaattgattttggtcatgcagcgcgtttagcaaaaatgcatgccactttatgccaaaagcagggcggtaaaggatttgtcgaaatgtcgactgtggctgtgccttgcggttcttcaggcgatgtacttaactctcgaagcgccggtaagatggggcttataaactga

SEQ ID NO: 133492 - DNA, 753 bp, Enterobacter cloacae
atggcagtatctgaccagacccgcagcggtgaccttgccgaaacattcaaatcggagcgggaaaccacaaagaaccagatccgtgtcgctttgcctggcatcgttcagtcattcgatcctgacgcggttacggcggttgtgcagcctgctatccgttcggttgaaactgataacgacgggaaccgcattaccaaaaattacccgctgctggtggatgtgccggtgttatttccgcgcggcggcggctgcacgctgacgttcccggttaaagccggtgatgaatgtctggtgattttcgccgatcgctgcatcgatttctggtggcagaacggcggggtgcaggagcctgttgacgatcgggtgcatgatttatcggatgcgttctgtatcgttggaccgcagtcacaggcgcagaaaatcagcggaatcagcacgggggccgctcagctgcgcagcgacgacggaagcacgttctttgagctcaaccccactacgcagaaaattaaaatcgtagcgcctggcggtctggatgtacttaccccgcaggccgacttctcggcgaaagttaccattcacgggctcctgtcctggctgggtggaatggtgggctctgttgcttctggcgttgcatccaaaatcaccggcgcggtcgagtttatcggtaccgttaaagctaacggcaagtcaattgatgatacgcacactcacggcggcgtgcagcacggcaccagcaacacagacggggtgaactga

SEQ ID NO: 133493 - DNA, 234 bp, Enterobacter cloacae
atgcagatcatcgacaaccaggacatgagcatcacgataaatgctatcgccattaatggaatagcaaacacatcggctgagcttatttccgttatcaaagcaggcgagctgaatatcaaagccggtggcgtgagagttaaaaacctcaatgtcattgatcccgctcgtcctctgttcggttttgacacacagagtatcgctatcgccggttatgacgccggatactggagctaa

SEQ ID NO: 133494 - DNA, 471 bp, Enterobacter cloacae
atgacgatttataataaagaagcaaaactatattccattagtggttataataattatgcatggtcagcatcaaaaaatgtgttctatcttattgctgacttagttgcatatatccgagcgggtaactggccagatgatgctgtagaggtatcagacgatgtttttaacgagttcgcttccttccagaatggaaatggaatgatcagaggtgtcggtagtgatggtcttcctgcatgggtagcgccacctgaaccatcaaaggagatgttgattagaaatgctgaggtcaatcgtgacacgcttaccgcaaaagccagtctggaaattgaaattctgacggatgcagagtctgatggatcgattactgatggggaaaaagacatgctggcaaaatggaaaacttatcgtctcgcacttcgtcgacttgatttaacaacggccccggacatcgactggcctgaacaaccatag

SEQ ID NO: 133495 - DNA, 1020 bp, Enterobacter cloacae
atgacacgaagagataattgctttgatatcatacgtcacattgcagcttatacagtgcttgtctctcatcactttcgattatccggatttgatgagcctattttcgccagatggaacacctatggtgcgctcgctgtagcaattttcttttgtctttctggatatttaatgcctaaaagttttcaatcctccgaaaactttatggagtttatgaaaaaaagatgcttacgaatatttccagggttgattttttgttctttcgttctttacttcttgattgcggttgttttcaacacttctaaccaggtagaatatttaatttcgtctaaaccattaatgcatacactgaggaatattctttttataagagattctgtagatggtgtttttacaagttacattttccccagggagatagatggtagtctgtggacacttcctattgagtttgcttgttatataattataggctttgctctttcaatatcatttagctgggtaacccctgcgctcctattggtgaccggaattatctccagtatattttttagcttttatcctgacagcgccacttattatagcattccttttaaatggttagcatttttctctatacctttctcatttggcgcacttctttacatgacatctaacgcatggatgaaatacaaaaaatggatgttaggaatcgccattgcattcatatttgcaaagattggagaacctcaggtatcaacaatcattccactttgcgtcacaacaataattattgtcttaggcctttcttttaaagaccgaatcattaatggtaggtttgatatatcttatggcgtttatatttatgcatttccagttcagcaaataatgattaacaatactaatttaaacctctatgtaagcatggccgcatgcgcactcataaccacgattttagccatactatcttaccgttatatcgagcgtcctttccttcacaagaaaaaagtggatgcaatgctggaaaagcctataaccagctga

SEQ ID NO: 133496 - DNA, 2523 bp, Enterobacter cloacae
atggcaacacaaaccctcggtataagtgataaacgcgaggccctgggacgcttctttgagtcctatattgctgagtacgccccgtatgcaataagtgatttgtcattattttttaaaggctaccagggacataagtgctccagtgaagagtttgagcaaattataaggagcactgttgccgcatccgcgaacattcaaaaaggcatgaactatgcttatgaattcattgattttgttgtcaaagacgttttttcggaaaaagataactatggcaatttagttccattggttttaaatccactccgaaaaattaaaaaaggatatgttgctacagaaacagtgcgcaaccccttaccatatcgctatattcagaacctgcgccagatcctttgtccattaccggataaaactgaactcaccattatcggtcagaatcttaaacaggaagaaaaattacttcctgcctggcattaccgtcactttaaatactgggtttgggcgcagcatgctgggagcgactggtttgaagtcgggccagaactgattgataaaaatgaccccgactgcgtatggcgtaccagagaagtgacccgtaaaggtaaaaaaatcaccctttatcaaatctggtcgcctgtaaaagcaatgatgattttcattaagctccacctgccacttcgttcctcgcaggttcgtatgctggacagcggagaagccgatacgtggcgctatgaaaatggtcgatggattcttaacactcgacatgatttcgcccttggcagtgcaaagcgcccatttggaaaaggcatattccgtcggatttacgataccatgactggactatactcgacggggttgtacatcaataccaacaagactgctgaccagaataaaaatgaactggaacgtggttacatcataccgtggcaaaacgaagaagtgctgtactggctggagaaattgaggaactggcaagaaaaatacaatccgattgcgaagcctaccgaatgtactttgctgctgagaaagcatatacaccaccagggatcagacagacaactgaaaagtatgggagaaatcgcttttctgttccgtgacgcatctgccagaggcgaggataaacaaaaacctattccttataacgcgtcagattcattctggtatcaattgctgcttgaattagaaaatcaactcgcagcccgcggggataccctggataacgacgagcgtttgaagctggttgtggattatcccgagggaagaatgaaaggtacagccacgctgtttcctcttcacagcctgcgtgtctctctcatcactgcgtacacaatggacacacaactgccattacctgtaatttcaaaactcctagcaggccatactcgcctgttgatgaccatctattacaacaaaatcacaccttctgtcatggcagataaaatgagcgaggcacatgacactctggatgttaaatccaggctgtcggttcgcaactttctcaaagatgcttcaatggagcagattcagtgcaggatggcatatcacagcgaggggagtatccagacagctctggttaatcgtaacccgattggctgggaagagcgttcgtgtgggctgtgcctgatgggaggtaacaccgtgaagcctgatgaaattaataccctaggaggatgctggaatggtggggtattgataaaagactcaggctccgctgccagccgtatttatgaaagtgtcccccatgggcctcaaaactgtattcgttgtcgatggtttatcaccgaggcccggttccttcctgcgctcaatgcccaatttaaccagctgagttacagggcacaccaggcttctgccttatctgtggaaattgaaggtgaactggacatacttaaagatgaacagtttttctttgaggaacaaggaaaaccctttatcagacatgatgagctaaaggcactacagcgccgttatgaaatacagcaagcagaagcagatgagtatacgaaagactggattgcgtgttttgaacttattaacaaaatcattcgtgtcgaagaactcaggaaggacggcgacctcaaagataaattgattgcggttggctcagagcaggacgtttgtcatgctctgaagtttatcgaaactgactcggaattattgcatctgtctttattgtgcgaggatgctgagttctatccagatttgctggatgaacttcgcaaaacaccggtcattcaaaagcgttctgtgcagctgagtcgggtattaatgaaaaaaggttttgagcctgttttcatggaaatggacgataaacagcagcttattgctgccaacgcaatgctgcgccagatggctaaaatagctgatcctgacgataaacttgaaggataccgcaaggtggtcggttatattgaggcaggtgaatacctgactaataataaccttttttctgaggggattcagtcccttaccagcaaagccattcaccttagtcacattgccctgcctgacttactggagaactaa

SEQ ID NO: 133497 - DNA, 585 bp, Enterobacter cloacae
atgtcatccattaacattgatgttgcccgcccaactggaatttattttatcattgaacgactgtattcccgcgatggccttatgccttctgttggggaaatcagcccctctttgacacaggtgcaccgtaccgtcattcagctaaaacgcaagcaagatatgtttatggatggtgttaaggttatccctaaagatattaccctttggcaacagataaaatatattacaggttcaaaagtaacgaccaaagatacagatgcgttagtgtatacgaccgattttatcggctcccttgttgccacaacgcctttgggtaatattgagcatgaaaatattcctcgcttcctcacgacagagtctatccactctcttccgcaggcggtgagttatgggcgtgatcccatcccacaagttcttctttatggtcgtaaggatattgtcttctttatggacaatggtggtaaaggtacgccaactgctattgcaaaatataatcacaacactcgtgatcttgccataatcaaagatcagctagaagccagtaaaacgatgaaggaactgctatctaagggagcaaaattatga

SEQ ID NO: 133498 - DNA, 555 bp, Enterobacter cloacae
gtgaaaaattacaaagttattacgccactttttccaacctatgcgcagattcaggcaatgatgaaagccgtctccggctattcggtgaattctgtaagtaacatgatcaatgcaattcaggaacaaaccggcacgccgcaaaacccggttgactggtccgaacctgatatgtggatcaacgaacgcctgaaaggcgaagatgctgagatcgcgctgcggatctggaatcaggataaccacatcctcaatccgcgccatagttacggtagctatttgtttctaaactcttcggtcttcgaactgatggaaacgacgccgaaagatacctgggtacccaccgagagcgggcagcaatttctgaataatgatgatgccacattacgcacgctggacgacaaagaagggttactgcatcttcttgaactgctggcggacgtgaaatgtcccgtcgtgctgacttactcccggaatggcaggcttttttacaccagcattcaaaattcgcttctaccagctccatcaaaagcacgctctactcgcgcctctataacctga

SEQ ID NO: 133499 - DNA, 1287 bp, Enterobacter cloacae
atggggagtaagtgggaatacataccattaggtgaattaatcactttacaacgaggccatgatctaccatcacagcacaggattgatggtccagttcccataatgggttcatctggaattactggatttcacaatatcgcaaaagctattggtcccggtgtaattgttggtcgaagtggtgactcaatgggagttgttagctttattgaaaaagattattggccactgaatacctgtttatatattactgatttcaaagggaatgatatcacctatatctattatcttttaaaattagtgaattttgataattttaattcaggaagcgcacaaaaatctttaaatagaaatgccgtatatcctcataaagttcttgctacaaaagatagagagttgcagaaaaaaattggggcaatattgtcttcatttgaagaaagaataattaattcgaataaaatcaaccaaaccctggaacaaatgtcccaaaccctgttcaaatcttggtttgtggatttcgatccggtgattgataacgcactggatgcgggaaactcaatccctgaagcgatgcaatctcgcgccgaactgcgtcaaaaagtacgcaacagtgcagatttcaaaccgcttccggcggatatacgtgcactattcccggctgaatttgaagaaacagagctgggttggacgccaaaaagttggaaagtttccggcctaggaaaagaatttaacattactatgggacaatcgccctcgggctctacctataacgaacatgaaattggcttaccttttttccaaggtaaaactgattttggattccgattcccgtcaaaacgtatttactgtactgaacctaaacgtctagcaaaaaaatttgatactctgctaagtgttagggctcccgttggagttacaaacctagcctcaacagaatgtataatcggccggggcttggctgcattaagacataaatcaggaaatatcgcttttacatattattccgtaaggaatttatctgattacttttccatttttaatggtgaaggcactgtttttggcagcataaatcaaaaagatttaaaacagcttcccctaatttgcccttcaacaaaactgattaacaaatttgaagagttttcagggaaatgggaaaggatgatttctgttcactgcaatgaaattgaaagtctttctaacctccgcgacaccctgctccccaaactcatctccggcgagctgtccctggaggatctccccgacatcatcaaacaaacagaagccgcataa

SEQ ID NO: 133500 - DNA, 1389 bp, Enterobacter cloacae
atgaagccgggctatcacgagatttattcccgctatcgcgacaacatcacgcgcggcgtgctgaagccgggcgataaggtgcccgccatccgcgtgctggcggaagagctgaaggtagcgcgtaaaaccgtcgaaacggcgtatgccattctgacgggggaagggtatctggtgagccggggcgcgcgcggcacgcgggtcaacccggatctgctgttgccggataagagtgcccctgctgaacagcccaccggcacgcttccggcatcgctcatcagccagcgcgagcgggccgggtttctgcgccccggcatccccgcccttgacagctttccgtataaaaaatggctgctgctggcgggacaggcgacgcgcgccatgcgtcaggaggagatgctcaatccgcccgttctgggctggtatccgctgcgccaggccatcgccagctatcttaatatttcacgcgggctgtcctgcagcgccgaacaggtgctgatcaccagcggctacagcggcagcctgcggctgatcctcgacacccttgccagccgcagcgacaaggtggtgtttgaagatccgggctattttatgggccagcagctgctcaagcggatcgtgccgcgcctgcacaccgtgccggtcgatcgctgcggcatcgatacggactacctgctccgtcaccatcgcgatgcgcgttttgccatcgtcaccccatcgcaccagagcccgctggcggtaacgctctccctgccgcgcaagcagcagctgctcgactgggccagccagaacgaggcgtggattatcgaagacgattacgacggcgagtttcactacacccgcaaggtgctgccgtcgctgaaaagtctcgatcggcacgaccgggtgatttttatgggcaccttcagtaaaaccatcatgccgtcgctgcgcttgggctacgtggtgatgcccgccagcaccgtcggggcctttaccgactgcgcggacattaccaccagcggccagccggtgctgacgcaaaagatcctcaccgcctttctcaacgaagggcattttttccgtcacctgaaaaagatgcgcgcgctgtatcagacccgccgcgactggatgattgcagccctgcgcgaggtgtatggcgatctgtttttcaccgagcaaaatgacggcgggatgcatatcgtggcgttcctgaccagaggaagccgtgaccgggaagtggcacgctgctggcaggaacagcagctgcaggtgaatgcgctttcggagtggtatcgcgggtcgggcaaacgctacgggctggtgatgggctataacaacgtgcggtcgtatgaagaggcggtggaattgctggaaaggccgaagcggcagacgcttgcgctgctgagctga

SEQ ID NO: 133501 - DNA, 792 bp, Enterobacter cloacae
atgtcacaactgagttttgaatccctgttcctggcagaccagattgatccgcagccgcagggttctgcgcctgcccggatgctgtcgccagctgaggcgcgtaaagagttcgccagtgtcttccgtcagacggcgaaaaatatgcgccgttccgaagtgttccgcgacttcatcaccctggcagccagcgagctggatatggctcgtattcgctcgccggagaacatcgaaaacagccgtcgcatctgcgaacggtatcagctggacgatctggacgccatgaagcagctgttctgcctgttggtggaggggctggcgggtgaaattcatgatttcctcggcgctctgtatatggagcaggagctgggcgcggacgaaatggggcagtatttctccccgtcctgcatctcccgcctgatggccggactactcatgcccggcgctcaggagacgataaagcgtgaggggtggatgacgcttgatgagcctgcctgtggtagcgccggaatggtcattgcctttgcatactggatggctgaagcgggatataacccgtcagaacagctgtatgccacctgcacagatatcgatcagatggtggctgatatggcctttatccagctgtcactgctgggtatacccgcgaaagtcgtgaccggtaatacgctgaccctgaaagcaaatcgcgtgcgttatacccccgtttattacttcaatgactggcagggacgtctggcgttccgcagccgtttcgaagctatgaaaaactttctggccaccgtggccgcctga

SEQ ID NO: 133502 - DNA, 294 bp, Enterobacter cloacae
atgtttgcacgtaaaaaaacatcgcagagaggcaagccagaccgcaaagcaaatgatgtgaaccgtcggttaaggatgaccgttaactggctgtattcgatttgctgggtcctcgggtgggtgtgctttattgcgctcattatcaaaggagttcgggaggaatatgcattccgcatccttggcgcattactttttgccaccatcttgattcgaatacgaccacccgtctggccagatgacaccgccgaacccctcccggggccgaccgacgatgacaaaagggagtgcaaatga

SEQ ID NO: 133503 - DNA, 423 bp, Enterobacter cloacae
atgaagggagcacgcatagatgaccgtatcaattttctgaggggtattgaacgggactggaaagactggtctgcacggaaaaacacaaaaccccactggatatttttggtaggggtattaaccgctacaggggggctgatttttagcttctggacaggcaatcagaggcttaccgtggcttccattgctgttggaatggcttttcttctcgccgcattgctacaggcatgtgaaacatgggaagaaaaaatacagcggaaaattcgggcatatgagccgcttgatattgatgccatgcgcaccctggccgtttctgtttttcacaaggataagctgacacgggaagaactcagacagtggctggacgcggagttcagcgccatttctgatgctgctcttcgtgggggaagccgtaatgcgtga

SEQ ID NO: 133504 - DNA, 423 bp, Enterobacter cloacae
atgcatattgctgaatgggaggctggccggcccactccgcaaggaaataagtacattttcctttggcttgcaaccttcatcgttgtactggtagctacggtttcagtgttccgcccgtcattgtttgcactgtgtttcctcattgcctggttttttctgagtcaggagatatttaagcgaattatcccgcgttacaacgaaagctgggaggaggtattcgacaggttactttctgattatgaacccctgaacctttctgcctgggaacacctgaagcaccaggctaaaacagaagggctgacggccagaattgtcagcaactggcatcgtgaggaagccaggtccgtctggccagaaaagaaacctgacctgaagttcctccataaagtcactgacggtaacgagaaaattggagagaaatga

SEQ ID NO: 133505 - DNA, 396 bp, Enterobacter cloacae
atgtctgccaacatggcacgctatccattactcaaaaccctgcatgactatcgctttatcctcattcctgcactggtattcactatcgagctgacagtgtgggcagtgctcaatcttaaaggcgtgggtgatatgggctgggtctcctggcgagtgtccctgctcttaagcgtgttcctcgtatactttagtggcactgcctttaacaaacgcgatgactggtactttatgtatggttcagtcgttccgtggggcggaatgctgatagtggcgagtatttatggctttatccagatggacctgaacttcctgacgctggatatgttttatgccggcgtgtttggcagccttgttgtgcaactggttttcactgtgattcagtgcaactgcaaataa

SEQ ID NO: 133506 - DNA, 1860 bp, Enterobacter cloacae
atgaagaaaatatttttcgccatgatgatgctgatcccgttcctgacggtggcaggtgacccggcatttgaggctggtgcaagttttgggaaaggtaatgcctctgccggtaccggagccctgaaaaaccccggcgcggtgaccggtgccattccgggatatacagctaacccgccggagaaagggtattacggcggcgtggatggcggcgatggagggctggccagcaagggacaggctgccctgcaggggaataacgcggcacagtcagtgatcagtgcaggaaccaaaaacccgcctcctgccatcgatccaaatgccccctttatcactgtcgggaaaaatgcggaggggacggcaggtgggatcatggatggcagcagccagcagtgtaaggagacgacggtgtccaaatcgacgtttgagaactacacctgcagcgccgatgtcgcggtgtccaaaacctgtacccgtgatacgcagattgacggccattacgaagagcaggtgtcctctaaaaccgtcgttatcccgccagaaacgctgaggttcaataaacttgatgaccatacgctggagtttacactgccactgaacgagccgggcgcaacaatgctggaggggtcaatcaccacctcccagaaaaacagcgtcagcaatccattttacagctccaccctgacattctacggaacatcaaagcaactgaagtccgtgaacaataccttcgccgttaatgtttcccagaaggtggttccggatgatggcctgctccggggaacgctgacaaacagcgtagatcagtatattgacatgatgccgcacgggatactttcagcccagtatccaggtagtgattttctggcaaaaataactgccacgataaccctggtgacgaccattaaggtctgggttccgtcaaccaccacgccgtctgtctgtccggacagccctggcggaaagaagatcagttcagtctgtaccattcccgggggtgaccggcaggtagtggctgaggggaaaacacagaccgttcacagcgactgctggcagtacaccgatacttatctggtcagcgagaacacgaccggcacctgcgcttccctgatgaataatgcctcatgcaccaaatctggcgaaacgtgttcagagtatgtggatggcacctgttcccataaagactacacctatcagtgccagacggtgcattcctctacggggctggtctgcggtggcgaatacatctgcaaatcaggtgactgtgatgaaaccaatggcgctggcgacaacggttttgatacggcagtagccaaactggccggtctggcgtcagcggcagaagatgtcagggatgagaacagcaccatcgatgtgaaagcctttacgggcaaggccatgagctgccgtaaggcgtttgcgggattctctaactgctgtaaggactccggatggggacaggacacgggcctggccgcctgtaatgacgacgaactggcactcggtaaagcaaaggccaagaaaatcaccgtcagcgtgggcgagcgttgtgaccatcaggttctcggggcctgtatccagaaaagccaggtctactgcgtctttgacggcaagcttgcccgcatcattcaggagcagggacgtcgcgaccagctgggcgttaagttcggcagcggcgacagtccgaactgccgggggattacggtcccggagctgcagagtatcgacttcgacaaaatcaacttctctgacttctacgaggatttgatgaagaaccagaaaatccccgataccagcgcgcaggtcaagcagattaaggatcgcatcgccgcgcaggtgaaccagcagggaggtggcaaatga

SEQ ID NO: 133507 - DNA, 246 bp, Enterobacter cloacae
atgtctaaatataaatttgaaactgttgataccagtacaccgcctaacgccgaagacgttgcttatgccctcatgagtgcatttggggcgctcgcttcaacggttgtagggacggatgaagaaaaacaggctgagctattcagtaaacttgacaaggcactggctcacaacgaaggagctagtagctatgtggaacttgcccgtcttgcaaaagccactaaattttccctaaccggacagcagtag

SEQ ID NO: 133508 - DNA, 207 bp, Enterobacter cloacae
atgaagcttgaagacctgacaggagacgaacgtacgctcgtaattgtggccctgcaggcgctgcatcgccagcgggtttcagcatacaactcgaccctgacggcatgcagcttgtcgggaaagaatccgcctgcagatgatgtttttgggctgcatgaagtgcaggaggcactgcgcagaattggtgcggcaccggagagccgttaa

SEQ ID NO: 133509 - DNA, 213 bp, Enterobacter cloacae
atgtctgatcaacaacagtatggccgcttacctgccgaaaggcaaggagaagtcagctatgaaactgccgcgaagtactgttatctggtgcgtattaatcgtgtgtttaacactcttaatattcacattcctcacccgaaaatcgctctgcgaaatccggttgaaggacggagagcgggaggtcgctgccgttctggcctacgaatccggtaa

SEQ ID NO: 133510 - DNA, 1041 bp, Enterobacter cloacae
atgaataagctacaaaaaatttcagaccatgaaaaaaaactgcttaccggagaagctgtagcagaatctccacgccagataatcagggatgtctcatcaggaaaaatcctgtctaatggcaaagtcgagcccgtcaatctgcctgtttttctgatccagaggacagaaaccaacatctggtataacgacattgatgtccagtcgcttatcaaagaggtccgcacccaggccagctttgtgaccgaggtaattaaagattctgagttcgagggcgccggtgaaaagtatcaacagtttctggataattttgcggtatgtatggagacgcctaccgaaagatatcttcatgacgtcagagtcatgggggtacatctttatacaacccttcagacccaggtaagaaggctttctgatgcgatacaacccataaaaaatcccggtgaagagacagaaaagcggttctgcgcagtaatagaagcgaacctgaatctattttttcacatgttgattatcaatctggcaatgtctaaccgcatcgatgattccaccggggttttacgtgaaaagctaacctcgctggaagcgaccctgcgtcaattactgagtaagcatgtgtttgctaaaggtgatggaacacctcatccatctggagtggatattcatgacggtaaacttctttacgggtggattttgctgaagaatggcgatattgactcggcagaatcgatttaccgatatgactataatatgagagagcaggttacgttttctgatttgttcaaaaaagttatgagccttattaacgaacgtccgaaaaaatttcaccaggaattaactttccgggaaataatgaatgatacattcggaatggggggtgtcccagaatcccgggtacgtatagcattgcagatcgcctattacctccagcagtgtgaaacaatccggaggtacattgaggaactgactaacggcagcgatgatgatatctcctgtgcgccggatctcgatatgcaatccctgcttacgtcccctactgactaa

SEQ ID NO: 133511 - DNA, 1104 bp, Enterobacter cloacae
atgtttgatgatgatgatgatgcagaccaggaaccccgggcccctgaactcagccaggatgttcaggccctgatcgacaacgggctggcgtttctggataaggcgcgtgaagagctggaagcatctaaagcgaagttctcggtcgtcagcttctggaccgcggttgagatcctgctgaaagtccccctcgtacacgaacactggacactggtctgttcaggtaaaaaagttgtccggagtaagtatgttgcaggcgattttcagtccgtgacttacgatgaaacctgtacccgcctcggggacatcctcgagaaacccttgcctaaagaaacaatgaccgttttcgataaagtcaggcagcaccgcaaccgggtggttcacttctatcatccatcattcactgacgctgaacagaatcagatccaaagagaacaggcagatgcctggtttgccctcaaccgtctcatgcgggatgaatggaagtccatcttcggcgctaaagacagctacagctggaagctggcgcacggtgaaacccgactgctcaggggaagtgagttctatgctgccgttcggctgcggcaagttaaagaagaactggatgcgctggccaaatccggtaagcagatagccgtctgtgatatctgcaaacaagaagcacaggttacccaatctcattccaccgggagtgaggaacgaacgctgttcattacccgatgccatgtctgtaccagtcagtcccgtcatattttattcagttgtccaaactgtgacgagcgacagtccttacctgaaggtgatgaaccttttacctgtgacaactgcaacgaggtcgtcgatcgaatgacgcttctcgatgaggaaacattccggagcgtcgatgaacaggattactccgtactgcctgccggttgcacaaactgcatgacacctgacagtgtctgtaaactcggtgatggttatctctgtactcactgtctttcttactatgaagaactgcacgcgtgcgggttctgcaaccacttcagcgatagcgtgcctgaactgagtcattttagaggatgtgaattttgcgatggtgacagccgttatcatgatgattaa

SEQ ID NO: 133512 - DNA, 1245 bp, Enterobacter cloacae
atgtcaacgtggaccagtatctctatcggtaacttcactctttacgatacgcagaatgactattatcagtggtattttcagcagggcgaccgtgtcagggagattgtcaaagaggaggacggaagctggtcagaagagacgtttatcggctatcggacgaccgtagcgcagatgcgccggcggttacagctgaacggatatgaccggacggctctcgaaagggatttttctactgccattgagtcctggaaagcggattctattgcggaacttgaaagcgaactccattccgaagaagggggcgcttatcgaggtggcaaaattgcgtggctggagcacatcatcccggttcttgacaatgcgacgctggatgactggcttgaccggttaaaaaaggcggcgtgttggccaagcacagagagtgatgacaacccgtatatgaggtggattaaaacaggtgatcctgtcctttccctgatggtcagctgggtcgacgaagattgctcctgggttcgtgatacgaactttaatttcccgtgtacacaacaagacttttacgctttagcgattctgctaatcactgaggatgacgctgtatgcgaactggacctgaaatggctcatttctgccggatggactgatgattttgacgatctggaagaaaaacatgcaggagccactcaaccgcttagacatgccagacagagcctttcagagttaagtacactggtcgcctctgcacccgaaaatcctgtactggtgagaatgtgttactccggcataattaccgttatggaagcttaccttgcagatattttcatacgggcagtaaagcatcctcctgttaagcgacgtttcgttgagagctacgaggcattccagaatagctccaaaaagccactttcagaggtcttcaatctgctcgattcgctggacaagactatcgagacggcattgctcagcctgtcgtttcaccatattgcgacagtgaaaaaactctatcaggaatgtctccttgtcagtttcccgcccgatatattgaatgatatagcgcgttcagtgatcgttcgacacgacattgttcaccgaaatggccgtgataagaatgggaagcaccacttaattgagggctatcatgtaaatgagctcgaggagctcatgcacgtgtttctggctggtatagacaaacagattctggatgggcttcagctgcaattcgagaataaaaatgacgtacaaatgtaa

SEQ ID NO: 133513 - DNA, 1359 bp, Enterobacter cloacae
atggaactggtctggaaaaaaaatcccagagggcggtttgagaggaaactgactctggctgaaaaggaagccctgcttcacgtcttcagtaatgggcgaaaaccaggccaggcagatttgcgcattgtgaatatggttctcaacgagatggacagacaggaactgtggatcaagtgcgactgtgttaaccctgaccctgaagctgaaggcccatttaattgtgaagtgaacgtagccaaattacgtcatgtaaagaccacaaggccgcatgacgaacagtgtccgctgtttcgtctgaaaaaagagaaagacgctgacaacacggttgttgaaggtaaaacaagcccactgaatcctgttggcggggatgactggctaccggacaagaagaaggatgtcagagctgccaacgtggaagaaccggtagaaccacgtaagcgcaagcgaaaaatgctgaaacccgttccggctctggggcgtaaattactgacgcttatccaggctgcgggcctgaaccagcttgaactgattcctgagtaccagagtcctgggcttacgggggcgatcagcaggctcaaagacgtgctggaagaccactcaatgagcaacggcacacctctgagcaagttattcagctgtgtaccctggttaagcatcgagcgtattggttgcatgctttcagagctggaaacgatgctgggtatcaacagccagaaaaaagaaccgtgcgtgtatgtcatcgggatagcgacagacgtcagccgggaagaggtagtcttcagcgttcgtgggaaaaacttcgtgcaccgaccggaggctagggtcagtatcaatggtgaaaacacatacaatgtcggcagccgcgccccttactggacaattctggaataccggaggggaggagatggtaatgtttattgccatgaaggctacgctcatgccgcctacacgcttgataatccagttcccgtcgacagtaacagggagcgtgaaaccctgaaggtgatcatcaacgccagcagttatgccggccgtcaaccaaatcatccgaatgcgatcagtctcagcaaacccttgttcacgacaaaaagcatcaaggacggtgaggaggaagacattcaccccgattttatcctgaacgtagctccggccaaagaaagttcagtgacgaccttcatcattgaaacgatggggtatgagtccagggagtacatcgagcgcaaacacaaaactcacagctggatggcgcaagaaggggtgttgttaacagatcctccgggctggccagcggcttcagataaaacgtttaatatcgttctgctcagacacattttcaccgctggaaaaatgcggagatag

SEQ ID NO: 133514 - DNA, 264 bp, Enterobacter cloacae
atgacaaaccggattgcggttgtgggccgggaggccctgcttatggtcggggcgatggccggagggctgtgtgtgctggccgcgcatctgctgaaattgttctggcgcgtgctgccggtgtttctgctgctctacgggttcgtgcagtttctggcgaggaacccggcgatccgtgactggttgttcctgcatttcgggcagggaggcacggcggcgatcctgatcggtggtacccttctttgcctgcgtcgtctgatgaaatga

SEQ ID NO: 133515 - DNA, 180 bp, Enterobacter cloacae
atgacgaaacaggaaaaaaccgccctcaacatggcaaaattcatcagggatcagtcgctgctgttgctggaaaagctgaacgaactggatatggataccgcggccgacatgtgcgaacggctgcacgaggacgcggaaacgctctggctggcaatgcgggaccagctcggggaggaataa

SEQ ID NO: 133516 - DNA, 282 bp, Enterobacter cloacae
atgaccggttcaaacaacaagacacgcgatatcactagcaaccgcaagtatctgatcaagaatgcacgcggccaggcagcctataaagcacgtatgcgcgaggcgggttataagcaaattgcggtatgggtacgagaagatgtcagagaggcaggacgacaagccggactggaatctgacgcgctgttgtcaggggctgcgcagcatgatccattaggctggatggtcggttttgctgagggactcaggcagcgagaaaaaaaagacagcaacccgcagtaa

SEQ ID NO: 133517 - DNA, 741 bp, Enterobacter cloacae
atgtctgttcataaaatttcggctagattttacgcgagcctgagtgtggaatggccatgcccggcatgtgcccagaaaacactggttattgataaagagactttccacgctaagtcactgctggaaagtcgacaaattcagaatgaggattggtttgaacctgaaatggatgagaaggttttcagctgtatggcgcactgttcacgggcaaactgtaatgaagtggttgtctgcattggtaagggaggctggcaggaggaatgggacgatgaaatgagtaatcgtgattatgttgcctggtataaaccaatgagctttgttccgacgttgcatccatttgcacttcccggagaatgtccggaggagattgcagggcctgttacagcttctttttctgtctatctcagccagccaggatctgctgccaatctaatcaggatctcggttgagagaatgctgacggcaattggtattcctgaacatggtaataaagggaagcgtatttatctccatcaacgtatcgaactcctcgacgggcaatatgccccctacaaggacacgctgatggcaattaaattcctgggtaacgccggcagtcatacctatgatgaagtgaccaccggggatatcgaagcggcattcgagattatggagtatgtcgtgaatgacctcttttccggtcgtaaggagtcgattgcagtccttaccagacggctgcatgacaagttcggaaatcagtga

SEQ ID NO: 133518 - DNA, 357 bp, Enterobacter cloacae
atgccattatttcagttcaatattacagtaaacaaacattatgcacctgttacgcaacatatcagtacacgcgcccaccaccataatgaagagtctggtcagtccggggggaatggacgtaaacctgacaataacgacggcaagaaagtcactatcgtcgatgtcattatggggggcatttttgccactatccagagtttctggaatacatcaatgatgcagtgggtggtcggcattctacacagtcttggtatgccttcagaatggacaggtctaacagcaactttgattatctcaatcggggtcagtgctttacctgtcgcgttccgctggttaatgcgtaagttgtattgctaa

SEQ ID NO: 133519 - DNA, 846 bp, Enterobacter cloacae
atgtttagagctaatgaagattcggaaaaactgcgcgccaaggcattcgactacctgctaatgaaagagagctttccatggcgtaaggacaatagcgggtctaattcaactgaggacaggaatcgtgcggagcacgctttgactgtcattcatgaaaagtttgggccttttgttacgtcttatcctgagtggcatccgattattgctcttggccgtgatgtgcataaccattcaggaactcaaactacgccccgcttcccgcatcttgatcacacgaggtatatggcaaatgcaattattacttgcccatatggcagcacggatgagctgattgctacagttaaaacgtcttaccgggggttagttcagtacctgaatagtgatgatgggcgttatagcagcatggctggctggttacgtatggccgctgattccattgaattacgtgctgcgtacatcactgatgaattaatcgaatcgtttgcagatggtaattatgactacgacgatagtgatgttttcaatgatgtttctgacttaattcccctgtatacacaaggcgcaggaccaatacttatatggtggagttggaataatcaccaactggagcctgacggcacaatttcgccagctatcgctgttccgttaatgctttcccgtaccttggctgatctgtcatatgccgagttctctgagtcgtgggaagatatgcgctatctgcttcttggaagcccacatggtgcccgttcctcgctattcctcaaccaactgacggtgaaacagcttcgcacgatgtttaacgggttaatggaatctggcgcgtttgggccgttaaagcacaaatga

SEQ ID NO: 133520 - DNA, 1137 bp, Enterobacter cloacae
atgacggttcagaacagtacttcaagcaattccccacgcagtgaatcaactgacgtaagcacccggtcaacgcaggccaaccttatacgaaccgaatatacggaggtcattaacgatagtgacattcgaaaaattctcgccaagttcgttaaatcgggagtcaaaaaaataccaggattcggtaccgcactgacgctgctggaggaaggttatacggaaataatcgcaatggaggaaaagcaacggcgtgcccgcgtcgaaaagttcgttaccggcatacaccagaagctgccggaactggcagatatttcttctgaagactttcttgccgtactccgcaaggttctgcaggacgatgaggatgagaaaacttggctttatgtacgcctgctcgttcagctgggcagggggacactggataaagaaactcgtttccactttattcatatgacgcacaacctgaccttcggacagcttaaatttatccgggagttgtatcttcgcaagactctggaactaaagggatataactccaaaggagacgcagagctagcgctgacagataaaccggaggggatgacacagcgtgccatcagtactttaattagctggggtctgatcagagaagatcgtagcggagaagtccggcgtgctcctttttatcttatgaatgatgatatgcataccctgattaatctgttgtttagcagcaaatcgctgcagcctgccgaaatagaaatggaagttaaagaccaacccgatgtcgtgatacttacctcgttccactcagacagagatctatatgttactgaattgcctgaaaagctggaacgtcaaaaactgaaggtcgcaataatcgaaaataacagtgaccatcagaaaacaactctcgccggcttatatgttttcctcaccacaggggaagaggagatccattttcgtcgggaagaatgcacgtatatccaggtcagagacaccccggcaaaggacggtgatccccttatgagagtaagagtcaagtcatcgatattcaacggttcagacatctcaaaaacctccattgacatattacgggacgttatcaacagggttgcggatggtgtgttacgtcttcatcaggcgaaggccagtaagtaa

SEQ ID NO: 133521 - DNA, 216 bp, Enterobacter cloacae
atgacggagctggaaaaacagttgctgagcgcattagagcagctacagcaggactactcgaaaaggctggacgagtgggagagcgccttcgcggaatggcggacgatgtctggtcttatgcaacgggagaacgcagcgctgagcgagcgcgtcacgggcttgagcaggcaggtgcagagtttgagcgagcagctgcgccggttgtcgagcgactga

SEQ ID NO: 133522 - DNA, 588 bp, Enterobacter cloacae
atgagccatcaactcaccttcgccgatagtgaattcagcactaagcgccgtcagacccgaaaagagattttcttgtcccgcatggagcagattctgccatggcaaaacatggtggaagtcatcgagccgttttaccccaaggctggtaatggccggcgaccttatccgctggaaaccatgctacgcattcactgcatgcagcattggtacaacctgagcgatggcgcgatggaagatgctctgtacgaaatcgcctccatgcgcctgtttgcccgattatccctggatagcgccctgccggatcgcaccaccatcatgaatttccgccacctgctcgagcagcatcaactggcccgtcaattgttcaagaccatcaatcgctggctggccgaagcaggcgtcatgatgacccaaggcactttggtggatgccaccatcattgaggcacccagctctaccaagaacaaagagcagcaacgcgatccggagatgcatcagaccaagaaaggcaatcagtggcactttggcatgaaggcccacattggtgtcgatgccaagagtggcactgttgcaaatagtcggtggtga

SEQ ID NO: 133523 - DNA, 1386 bp, Enterobacter cloacae
atgttcaaattaaaattactcagcatcagtaccatattcatcctggctggttgtgtttctctggcacctgaatatcagcgtccgccagctccggttccccagcagttttcattgtctaaaaacagtctgacgcctgcggtaaacagctatcaggatacgggctggcgaaacttttttgtcgatccccaggtcagcaggctgatcggtgaagccctgaataataaccgtgatttgagaatggctgccctgaaggttgaagaggcccgggcccagttcaacgtcacggatgcagatcgttatccccaactgaatgcctcatccgggattacatacagcggtggtctgaaaggtgacaagccgaccacacaggagtacgacgcgggtctggagctcagctatgagctcgatttttttggcaaacttaagaacatgagtgaggctgatcgccagaactactttgccagcgaagaagcccgtcgtgccgtacacatcctgctggtctccaacgtttcacagagctatttcagccagcaactggcgtacgaacaactccgtattgcgcgggaaacgctgaaaaattatgaacagtcttatgcattcgttgagcaacaactggtgaccgggagtacgaacgttctggcgcttgaacaagccagggggcaaatcgaaagtacccgcgccgaaatagccaaacgagaaggcgatctggctcaggcaaacaatgccctgcaactggtgctgggaacgtaccgcgcagttccgtcagaaaaagggattaaaggtggggagatcgcaccagtaaaattgccaccaaatctgtcgtcacaaatattgctgcagcgtccggatattatggaagcggaataccagttgaaagcggctgatgccaatattggcgcagcgcgagcggcttttttcccgtccattaccctgaccagtggtctctcctcaagcagtacggagctgtccagcctctttacgtcaggaagtggaatgtggaattttattcctaaaattgaaattcctatatttaatgctggcaggaacaaagccaatctgaagctggctgaaattcgccagcaacagtccgtggttaattacgaacaaaaaattcagtcagcctttaaggatgtttccgacacgcttgcgctgcgcgacagccttagccagcaacttgagtcacagcagcgttatcttgattcacttcagataactctacagcgtgccagaggattgtatgcaagtggtgctgtcagttacatcgaagtgctggatgcagaacgttccctcttcgcgacgcagcaaaccattctcgatcttacctattcccgacaggttaacgaaattaatctgtttaccgcgctgggtggcggttgggtagagtaa

SEQ ID NO: 133524 - DNA, 681 bp, Enterobacter cloacae; identical to SEQ ID NO: 133357

SEQ ID NO: 133525 - DNA, 1482 bp, Enterobacter cloacae
atgcatagcaaaccgtccagacgacctttctcactcgctctgcggctgaccttttttatcagcctgtccacaatactggcgtttatcgccttcacctggtttatgctgcattctgttgaaaagcattttgccgagcaggatgtcagcgatctgcaacaaatcagcaccacactgagccgtatactccagtccccagcagatccggatgaaaaaaaagtaagcaaaataaaggaatcgatcgccagctaccgcaacgttgcccttttgctcctcaatccccggggtgaggtgctgtacagctctgcgcagggggcagcactacgcccggccgtgaattcagccgattttagcgagcacagccgcgcacgggatgtctttctctggacggtggaggatactgcgagagcgatggataccgggtccggaatgaagatggaaacgtaccggattatcgcctcctctggccaggcgacatttcagggcaaacagcagaactatgtcatgctgactggcctctccattaatttccatctccattacctcgatgcgctgaaaaaaaatctgattgcgattgccgtcgtgataagcctgctgattgttctgatcattcgcattgctgtccgtcaggggcacctgccccttcgtaatgtcagcaatgccattaaaaacatcacctccgagaatcttgatgcgcggctggaaccgacacgcgttcccattgagctggagcagctggttatctcgttcaatcatatgattggaaagattgaggatgtttttacccgccaggccaatttctctgccgatatcgcgcacgagatcagaacacccatcaccaatctggtgacgcagactgaaatcgctctgagtcaggatcgaacgcagaaggaacttgaggatgtcctctattccagccttgaagagtataaccggatgaccaaaatggtcagcgacatgctgttcctggcacaggcggacaataatcagctgatacctgacagggttcggtttgacctcagagcagaagtcatgaaagtcttcgagtttttcgaagcctgggccgaagaacgcaatattatgctcaaatttaacgggatgccctgcctggttgagggagatccacaaatgttcagaagagcgatcaataatctgttatccaacgccctgcgttataccccagagggacaggcaatcaccgtctcaataagagagcaggagagcttttttgaccttgtgattgaaaatccggggaaaccaatccctgaagagcatttatcaaggttgttcgaccgtttttatcgggtggatccgtccagacaacgaaaaggagaaggcagcggcatcggccttgcgattgtgaagtcaatcgtggaagcacatcacggaagagtgcaggtggaatcggacgtacactcaacgcgttttatcttatccgtgcccagactggagaaaatgattccggacacccagtgctgggaataa

SEQ ID NO: 133526 - DNA, 666 bp, Enterobacter cloacae
gtggccagcgacctgactgccgcgctcgatgctgtccgcaaccatccaaaggacggtgtggtctggcagaccagcgatgaacctccttcagcctaccttctgaaagtcagtggtggaagtctcaggcgcgaggaggaaggacttgctcagcgtatcaacgccaaagagagtgacatcctgctttcggcaaaagctgaacgtaatgaaaccgcatcagaaacagtggatcttaaagctgccctggctcaggaagaagcaagacgccagcaacaggagcctcttatcagtaaggcactgttacaggagaatgcgacaaaagatgtggaggagaaattcatgtatacagatccggatgttattcacattcggcctgatatgctcacggacagtgatggtactgaatccataaaacctgacagtcgggtattgaaacaaattgctgccagtgacagtaacgccgccagtgaagcaggaagggaacttcgtcacgagagccagcctgaaactgcccgttcaggcaaagaacaacatgcagcatcactgattgttaatcagcttgccaacagtgaacgggatattgttcgtcagccggacgccggcgaacgtgggcgtatgccggaacatgacgaacagaccctcagtcgtaccattcagaaagaacgttaa

SEQ ID NO: 133527 - DNA, 789 bp, Enterobacter cloacae
atgaaagcaaacaaattagctgcattaatagttacaacatacattggctttatttcaacggcacacgcttcggcccctcagccggtattcagtccggagcaggaggctcgtatcggcgaaatcgctgccgactatctggtgtctcacccggagattctcgtgacggtcagtcaaaagctgcaggaacagcaggaggcacgtaagcagaagatgttcgcactcagcgtgatggagaatcaggcgaaccttctgcatgatccggacacaccggcttacggacctgataatgcaaaggtcgcggtgattgaattctttgattaccagtgcgtgttctgcagccgcttcgcgccggagctggagaaggtcatgaaagcgcagccggacgtccgctacctctttaaggattggccaatatttggtggtcgctgggaagcttcacttcaggctgcgcagcaggggctgacggtctggcaaaagaaagggccccaggcctatgtcacctatcacaatgccatctacgccaccggtcataatgaaggcaaactgacggcggaggatattcacggagcagcgtcaaaggcgggactgaccaccccaattcctggcgaccataccgcatcccttgagaaaaacagtaacctggctgaggcgctgggactcaccggaacgccggggatcatcgtcatgcccgttagcggagccactccggacaccatcactgttttcccggaagctgttaccgctgacaagcttcaggctgcaatccgaaaagccacccgagtcaaatga

SEQ ID NO: 133528 - DNA, 237 bp, Enterobacter cloacae
atggcgggtatgggtgattttatcaagcacgggcaccttaatggccttctctccaagttccccccgcgcagcaagcacggcatgaatgccggcatttatcgccttacggtcggcgttcagctgcgcaatgatgagcgtgcgggaccgggcctccggcgtccggtccgtccagtcctccacgatatcgttaacgggcgcctccgtttcctgaatggcactctccgggagcgcggctga

SEQ ID NO: 133529 - DNA, 1038 bp, Enterobacter cloacae
atgaataaattaaaaccaacatggcagttattcgaggaactcgtttgtcacattctgaaggcaaacaattttcaaataaatagaaatagttgcagaggagacgaaggatttgattttctcggtgattttggaggagaaagatgggctattgaagttaaattctaccgcacagctcgagctcagccctcacttattgatgcagctgcgactcgcattaccagcaatggcgtagccgcaggtgttaacaaaggaatgttagttgtttcatgctttctcacacctgagttgcgagaggctctggaaaataaattcagtattacttttgtggatcaggctgacttaagaatttggtgtagttcacatcctgaactagcggaatcattggatgcactattagaagtaaatctagatgaagctcttacgacgcacctttctcgtaaagagagtaactctatcattagagatatggctcttaataagagtaaccggattgagcgacaaaaaaataaaggaacaaaactttgccttgaactaaagagtattaaaaaagggaaagcatcttggcgtcaatatgaaaaaaaatgcgaggaaatccttaaatatctgtttcctaatgatctacacggctggcattcacaaaaaagaactgatgatggtttaaaccgttatgattttgtatgtcgaattagacccactactgaattttggaaatttgttattgaacacctaaatagccgttatgttctttttgagtttaaaaactatttagggaaaatcaagcaaggccagatacttaccacggagaagtatcttttggaaaaaggactcaggcgtatggcaattattatgacaaggacgggagcagaggcacatgcattagctatgacgcaaggagctatgagagaacaaggtaaacttatactcattgtaaacgatgaaaaagtatgtgaaatgcttcatatgaaggaacgaggggaagatccaactgattgccttttcgaaattgccgataactttttactgacactccctcgttaa

SEQ ID NO: 133530 - DNA, 162 bp, Enterobacter cloacae
atgaagaaagaatcccaggggcacaagctggaaaggaaaaaaatggcccttttaacggtgagttttctagattgctggtccgaatggctagtcgcttacaagatcgacgttatgggtttcttttcaatagtccggataaatacaatcaatacggttcgttaa

SEQ ID NO: 133531 - DNA, 474 bp, Enterobacter cloacae
atgcttgcctacttcttccacttcatggccaagagcttcaacccgctcacgcagcgcgcttcgataaattttcccgagggtgacctggtgcttcatgacggtttcgataaagccggcgttatggatatagtccgtggccagggctttccatttacccgcatactctgtcatattggctatcaggagatgggtgtgcagctgcgggtcgagattgcgcgaggtatcatgcgtataggcggctgccaccatcttgccggtgtgtacgatggacgtaacgccgtctttcgtgtcgcgggccgagatgagcttctccacatagccggctgccacgcggacggcatggttatgtgcttccaccatttctttatcgttgccgatgagagccagaatggacacgctcttgggagcggaaaaggtcaggtcatggcccggacggtggacgtgctgcccgttaacctctttacccagccgtga

SEQ ID NO: 133532 - DNA, 717 bp, Enterobacter cloacae
atgctcctgactcagcgcctggatcgagagttcatccagcaggtgaatacgggaggtgaaaactcctttctcactgtccagcggcacaatcatgccgtccttcagcgccgcatcgatggccacgcgaatatcctgaatctccggcagctgctcgctcagctccgccgtggtcatcatcagctcgccaaaggtgaagcgcgttttactgtcgctgagctgcgagatggccagccggacagcctcagtcagttccgggcgaggtatttcagtgtccagctgcgctgcaggaaagctcctggccgctggcgtctttttgggaccggtctgtgccggctgactcagcgtgtcagtctgttgtggtacttgctcacgggactggctctcccgttctgcgggttgagcaggtgtgtcggcgctcttttctgccgtggacgacgtctgcagagaagcctgttcaggcccggcaggaaccggcttagcctgatgatctcgctccggctgagtcgcggtctcacgaacacctgcttcacgcggcaccacgctctcctgatactccttcaggtcaaatcccttctccttcatctggcccagccagcgttccatcaggcgcatccgcgaaggatcaactttcgccctgcgggtgtctttggcggccacatcccggctgcgcagcgtggcttcagcccccacggccccctgtatttccctgccccgtga

SEQ ID NO: 133533 - DNA, 924 bp, Enterobacter cloacae
atggcgcacccaggcgcggccaatggccgttttattcaccggctgtcccattgcccagatggctttcgcctgtttacgctgcgtttccggtgccagcgcatcgtgcgccgttttgatatcccgctccggcgtttttaccgccttaacccagtccgccttcccgtcggtataaatctggacgtgctctttcacgcgcgaggccgagatgtagaaggcgcgacgggaggcaagtgccttacgcccgccttccgtgccctcaagcgcaatgacatagtcgctactggccccctgagcaccgtaccctgtgacggcccagccgtagtcaatatgctgctgcgccctgaccgcctgaggattgatggtaatgcggccgttttcccccttcagacgaatattgcccgtttcgctgaccgactccaccgtatagcgctggctggccatctgtccctgctccttgtctgtcgccgtgaacttcagcagatcgccggcacggacttccctctcgctgcggcgaaacagctgcacgtcgccggtgatgagttccttcggggaatacagtccaatcttcccctcctcatcgcgtaccgtgaccgtactgccgttgcggtcaacggccagcacgtcctggtaacgatcgccgcgtttaaccaccataccggcttcccaggcatcggttttattgaactcatgacgggtgtgggtgattttatcgagcaccggcaccgtaatggccttctcccccagttctccccgggcagccagcacagcatgaatgccggcatttaccgcacgacggtcggcgttcagctgggtgataatgagggtacgggaccgcgcctccggcgtccggtccgtccagtcagccacgatgtcgttaacaggcgtctccgtttcctgaatggcactccccgggagcgaggctga

SEQ ID NO: 133534 - DNA, 1005 bp, Enterobacter cloacae
atggaaaacattgcgcttattggtatcgatctgggtaagaactctttccatattcattgtcaggatcatcgtgggaaggccgtttaccgtaaaaaattcacccgaccaaagctaatcgaatttctggcgacatgcccagcaacaaccatcgcgatggaagcctgtggcggttctcactttatggcacgcaagctggcagagttagggcattttccaaagctgatatcaccgcaatttgtccgcccattcgttaaaagcaacaaaaatgacttcgttgatgctgaagctatctgtgaagcagcatcacgtccatctatgcgtttcgtgcagcccagaaccgaatctcagcaggcaatgcgagctctgcatcgtgtccgtgaatccctggttcaggataaggtgaaaacaactaatcagatgcatgcttttctgctggaatttggtatcagcgttccgcgaggtgctgccgttattagtcgactgagtacccttcttgaggacagtagtttgcctctttatctcagccagttactgctgaaattacaacagcattatcactatcttgttgagcagattaaagatctggaatctcagttgaaacgaaagttggacgaagatgaggttggacagcgcttgctgagtattccctgcgttggaacgctgactgccagtactatttcaactgagattggcgacgggaagcagtacgccagcagccgtgactttgcggcggcaacagggctggtaccccgacagtacagcacgggaggtcggacgacattgttagggattagcaagcggggcaacaaaaagatccgaactttgttggttcagtgtgccagggtattcatacaaaaactggaacaccagtctggcaagttggccgactgggtcagggagttgttgtgtcggaaaagcaactttgtcgtcacctgtgctctggcaaacaagctggccagaatagcctgggcactgacggcgcgacagcaaacttacgaagcataa

SEQ ID NO: 133535 - DNA, 825 bp, Enterobacter cloacae
atggcacgcaagttggaagagttggggcattccccaaagctgatatcaccacaatttgtccgcccgttcgttaaaagcaataaaaacgactttgtcgacgccgaagctatttgtgaagctgcatcgcgtccgtctatgcgttttgtgcagcccagaacggaatctcagcaggcaatgcgggctctgcatcgtgtccgtgaatccctggttcaggataaggtaaaaacaaccaatcaaatgcatgcttttctgctggaatttggcattagcgttccccgaggagctgccgttattagccgactgagtaccattcttgaggataatagtttgcctctttacctcagccagttattgctgaaattacaacagcattatcactatcttgttgagcagattaaagatttggaatcccagttgaaacgaaagttggacgaagatgaggttggacagcgcttgctgagcattccctgcgtcggaacactgacagcgagtactatttcaactgagattggcgacgggaagcagtacgccagcagccgtgactttgcggcggcaacagggcttgtacctcggcagtacagcacgggaggtaggacgacattgctgggaattagtaagcgaggtaataaaaagatccgaactttgttggttcaatgtgccagggtattcatacaaaaactggaacaccagtctggcaaattggccgattgggtcagggatttactgtgccggaaaagcaactttgtcgtcacttgtgctctggcaaacaagctggccagaatagcctgggccctaacggcacgacagcaaacttatgtagcataa

SEQ ID NO: 133536 - DNA, 831 bp, Enterobacter cloacae; identical to SEQ ID NO: 119722

SEQ ID NO: 133537 - DNA, 126 bp, Enterobacter cloacae
atggaggtgcctgaagttaagcgcctgaagtcgcttgaggaagagaacaccagactcaagaagctgcttgccgaagccatgctggataaagaggcgcttcaggtggctcttgggcgaaagtactga

SEQ ID NO: 133538 - DNA, 969 bp, Enterobacter cloacae
ttgaaggatcagatcacgcatcttcccgacaacgcagaccgttccgtggcaaagcaaaagttcaaaatcaccaactggcccacctacaataaagccctcatcaaccgtggctccataactttctggctggatgatgaagctattcaggcctggtatgagtcggcaacgccttcatcacggggaagacctcagcgctattctgatctcgccatcaccaccgttctggtcattaaacgcgtgttcaggttgaccctgcgggctgcacagggttttattgattccatttttacactgatgaatgttccgttgcgctgcccggattacaccagtgtcagcaagcgcgcaaagtcggttaatgtcagtttcaaaacgttcacccgaggtgaaatcgcgcatctggtgattgattccaccgggctgaaggtctttggtgaaggcgaatggaaagtcaaaaaacacggccaggaacgccgtcgtatatggcgaaagttgcatctggcagttgacagcaacacacatgaaatcatctgtgcagacctgtcgctgaacaatgtgacggactcagaagccttcccgggtcttatccggcagactcacagaaaaatcagggcagcatcggcagacggcgcttacgacacccggctctgtcacgatgaactgcggcgtaagaaaatcagcgcgcttatcccgccccgaaaaggcgcgggttactggcccggtgaatatgcagaccgtaaccgtgctgttgcgaatcagcggctgaccgggagtaatgcgcggtggaaatggacaacagattataaccgtcgctcgatagcggaaacggcgatgtaccgggtaaaacagctgttcggaggttcactgacactgcgtgactacgatggtcaggttgcagaggctatggccctggtacgagcgctgaacaaaatgacgaaagcaggtatgcctgaaagcgtgcgtattgcctga

SEQ ID NO: 133539 - DNA, 774 bp, Enterobacter cloacae
atgaggttctcatttctgtcacggtggataacgccttgtattatgtttttgctgctcattttttgtggccagcaaggctatctcacctttaaagattataaaaaagttatgaataagtttgctaattctgacctacagccgctgaaaaaaacgcgcgaagacaaacccttcacgctttttacggctgccgtccgtcaggagaacttatcggctgcggcaaaacccccgctggcggcggagattgaaggcattgtgcgcagtgatgacgcctggctctccttcgctgtcatcaaaaccccgggcggccagcgaagctaccgcgagggtgaaccgctcgccgggtttaacgacgcatttattcaggaaataaacaaagataatgtggtggttaattatgaaggtgctacgcaggtactggcgttaaataaaccggactattttaaggggggcgtggagagcggcccggttacaaaatcgacgaaagatgctggcgcagagagtgtgcatcttgatgattatctggtgttaaaacccatcattgaaaaaggccgactggaaggctacaggataaacccaaggaatgcctccgccttttacagtcagtcaggtctggaaaaaggcgatgtggcgattcaggttaactctgtcgatatgaccgatgaagcaaaagcgaaaagcattattgccaactggtcgaaaatgaaagaagcggaggtcatcgtacgacgtcacgctcaccttgaaaatattcgggttaatgttctaaataattaa

SEQ ID NO: 133540 - DNA, 2643 bp, Enterobacter cloacae
atgacgtctatatccgtgaggacaccccggcgttatggcaatgacaaatttgccctggtggaagtcgatcaggctgctcaggattataacaatcttgtcaaagtgcataacgatggcgtggatgtaaaagttgagtggaacgtctggagtggtgatgcgccaacttctgcgaaagttttgctggacggacagaccgtatggaccggcgcagccggtgcgacgggctctgcaacgtttaaagtgaaaaaaggcgggcgttatcaggaacaggttgaagtctgtaacgccagcggctgtgcgaaaagcgccagtaagctgattattgtggctgacaccgacggtagccacctgctgccgctgaatacgtctctccaggagaacaacaaagcgttcgcgaagcataccgataaagtggttgcggcctacttcccggaatggggcgtttacgaccgtaacttcccggttgataagatccctgcggcaaacctcaaccacattctgtacggcttcattccaatctgtggcggtgacggcatcaacgacggcctgaaaaccattgaaggcggtaacagcttccgcgtgcttcagaacgactgtaagggccgtcctgactttaccgtggcgatccacgacccatgggctgcgctgcaaaaaccacaggctggcgtctccaactgggatgacccgtacaaaggtaactttggccagctgatggcgctgaaaaaagcgcatccggacctgaaagtgctgccatctatcggcggctggacgctctccgatcccttcttccacatgggtgacccggctatccgcgcacgctttgtctcttctgtgaaagagttcctccagacctggaaattctttgacggcgtggatatcgactgggaattccctggcggcggcggtgtgagcgaaaacctgggcaatccgcagcaggataaagcgacctataccgcactgatgcacgacctgcgcaccatgctgaacgagctgtctgcacagacgggccgtacctatgaactgaccagcgccatcggtgcaggtcgcgataagatcgaagacgtggattacaccacggctcagcagtatctcgaccacatcttcctgatgagctacgacttctacggcggctggagcaacacctttctcggccaccaggctgcactgcgtgcgccagcatggcgtccggacacggattacaccactgaaaacggcgttaacgcgctgcttgcgcagggcgtacagccaggcaagatcgtggtgggtgcgggcatgtatggccgcggctggaccggcgtgcatggctacaccggtgacaatccattcaccggtacggcaactggcatggtgaaaggcacctgggaaccgggcgtggttgactatcgtcagatcgtgaacgaatacaaaggcaaaccaggctgggaatacggctacgacacgaccgctgaagctccttacgtcttcaacaaatccaccggcgacctgatctcgtacgaagatgcgcgttcaaccacggcgaaaggcaagtatgttctggccaataaactgggcggtctgttcgcgtggtctatcgactctgataccggcgacattctgaatgcgatgaacgaaagcctgctgggcggcgactcgactccggttgatccggtggtcaccaaccacgcgccaatcgcgtcctctgccgatcagaacgtgtctggcccggcaaccgtcacgctcgatggctctgcttccagcgatcctgatggcgatgcgattacctacaaatggactcaggtctctggtccgtctgtcaccatcaacaacagcaccaaagcgaaagcgaccttcaacgttgcggcagcgaccaccgaccagaccatgacgttccgcctgacggtgaccgatgcaaaaggcctgagcaacgcgattgatgtccaggtggtgaacaaggcgccgaaagctaaccaggcaccggttttaaacccaatggaagcgatcacgcttgaatctggtgaaacctatgcgctgcatgcccaggccgcggatccagacggagatgcgttgacctacgcctggagcgtaccagcagatatgcacgccaccggaactgactccgcgaacgtgaatatcacggcgccggaagtgagctcgacgtctacctacaccctgagcgtggtggtgagcgacggtaagaccagcgtgcagtctaacgtccaggttaccgtgaatccgaaagcggcgcctgcaccggtacctgctgacgaagacactaacccggcggatgacgttacccctccggctgatgatgtgactcctccgtctgacaaaggaagctgcgatgcccctgtggatgctaacgccagcaaatacgcggcgtgggaatccagcaaaatctacaacggtggcgataccgtaagcttcgaccatctggtgtggaaagcgaagtactggactcagggcaatcagcctggcttcggtgtggatgcatgggagctggtgagcaacgtgaagatgaactggcgttctgacctggtgtacaacggcggcgacaccaccacctatgaaggtaacgtttaccgtgcgaaatggtggacccgtggtgataacccagccaacagcgacgtatgggtaaaagaaggcgcatcaacagattgcaaataa

SEQ ID NO: 133541 - DNA, 840 bp, Enterobacter cloacae
atggggacggattactaccgcactatggaacagggcgggaagaaagcagcagcggccacgcgtgaaactcagcggtctttggctgacctgaattctcagctcgcaactgtacgttcatcagcggctgggcttgccggggcatgggctggcgcatttgccacgcatcaacttgttcagtttgctgatacctggaaccagctgaatggccgtcttcgccttgcgtcctcttccagtgaggattacgtgcaatcccagcgcgtgctgatggagattagccagcgcaccggaacatccctcgaggcaaacagcaacttatacagcagaattgcgcagtaccttcgtgatgccggttacgcttctgctgacgtcgcaaaagttacggaaaccgtagcaacctcgctgaagctgtctggcgccagtaccgaagaggcgagctctgttatcactcagcttagccaggcgcttggctcaggcgttttgcgaggcgaagaatttaactccatcatggagaacggtggccgcctggcgaaactgctggctgatggtctgggtaccactgttggtggcctgcgaaatatggccaacaacggcgagctgacgaccaacaagatcgtcccgctgctgaccaacgttgagatcctccgtaaagaattcgacaccttacctgcatccatcagcggatctgcacagaaagtgcaaaatgcttttctcgcctgggttggcggggcgaacgatgccgtcggcgcatcctccacgctagcctctggcagatatttccgtcaggccagcgtagtggtgtgggtcttctcatcagcaacagcactgacttcacctcaataa

SEQ ID NO: 133542 - DNA, 927 bp, Enterobacter cloacae
atgatcaaaaaaaaggcatttaaatttctgcttgaaccaagtaaaagtcagatttctgacgttttggtttttgctggtgcctgccgttttgtctataataaaggccttgctctcctaagcgaaaactataataacggcaagccgttcctgaactataataaacttgcacctttattagtcgagtggaaaaatgataataagttggagtggcttaaattttgtccatctcaatgcttacagcaatcattacgtgatctcgatagggcttttcagaatttcttttcaggaagatcacagtatcctcgattcaaaaagaaaggccgcagtgattcctttagagtcccatgccaaagagttagattagaccaagaaaaaggtttggtatcattgcctaaattaggatgggttaagtaccgtaaaagtcgtgcaatcactggagatttgaaaaatgttacagtgtcaagaaagtttgataagtggtacataagttttaatactgaggaggttgtttctaatccggttcatccatcagttgataagacaagaattttactcaatgatggatatgttaccctgtgcacggggggcgatctttcagtcaaaaaatttactagtctagttgatgaaaaaaaaataaaacgtcttaataaagagttaagtaggaaagttaaaaacagtaacaattggctgaaaaataaaaagaaaattgacaaaataagattaaagtcaggtagtttcagactggatgccatacataagataactacgacaatatgcaaaaaacacgcagttgtggaagtggttaacgtaaagaattttgtatcggataaaaataacattgcaacaagtatgagatacgaacttgttaggcaattattgtataaacaggaatggttaggtgggaaaataattcatctggatgcttag

SEQ ID NO: 133543 - DNA, 249 bp, Enterobacter cloacae
atgcgtgtcgagatctgtattgccaaaaataaagcgagggctttgccgaaagactccagtaacgcgctgactcaggagctgacaaagcgtctgagtacgcattatgaatacatagagatgatcgtcaagacggcaagcaatgatggcttgtccattgtgtggcttagaaaaaagggaataagacatatgtacaggaagtgtcacaagaagcgttggaaagcgcagatgactggtttacaggatgattga

SEQ ID NO: 133544 - DNA, 1221 bp, Enterobacter cloacae
atggcaggcttacctaccggcgtggaaattcataacggtaaactgaggatatcattcaaatacaaaaacgttcgctgtagagaggttttgcgtgggtggatagttaatagttccaacatcaaaaaagcgggaaatttgagagcattgatatgtgctgaaatacagttgggcacattcaaatatgaagagcgttttccggagagcaaggcacttaaaaagttttcgcaacctacaaaaagtgtactaactttcggtgaactgtgcgacgcatatcacgctgttaaagaagttgagatttcatcggcaaccatgatgataacgcgttcggtaagcgctctttttacgaaaataattggtgagcatactgccattgaagacatacaacttaatgacatgctcctctatcggaaacagttgcttgagggggcgtttaaagccagatccgaagggcaacgtacagtcagaactgttaacgccttcatggggcaattatgcagaatgctcagcttcgctcaccaaagcaactatattcagcataaaccttttgagaacataaaaagcctgaagacctcagagcttgatccagacccattgctgaaagaagaattccaggagttatcaaagcactggcacggtcagcatctgaacctctggacatttgcagtgtatacgggtttacgccatggtgaattgacaggtttagcatgggaggatgtcgatctcgtcagtggtgagatacatgttaaacgcacaatgacgctaactaaaaaatttgggccacccaagacaaaggctgggttaaggacggtcaaactgttaaaaccggcactggaggctttaaaaaggcaattcgagcttacgggacataaagagcctaccgaaattgaattttaccaccgcgagcgcggaaaggttgaaaagcagagcctgagattctgttttgtacctaattataatgaaggcacagtgagccgacattattctcagaacacgattaaccttacatggcctaaggcggtacaaaagtctggtataaggtatcgttctccatatcacacaaggcacacatatgcgtgctggatgctctcagctggcgcgaacccgtctttcatagccagtcagatggggcataaaaatgcacgcatggtttataccgtatattccaaatggatcgtgcgtatgaacgaagaccaaatagatatgttgaacagaaagatttag

SEQ ID NO: 133545 - DNA, 942 bp, Enterobacter cloacae
atggcgattgttatgcaagccatgcagtggggcatgaacccttacgcggtggcgcaaaaaactcacctggtcaacggccagttgggttacgaagcgcagcttgttaacgccgtaattaccagttccagtgccatccatggccgttttcattatcgctacggcggcgactggaaacgttgcaccaaaaccaaagaagtgacccgtgaaaaaatgggtaagaacggaaagtacactgttgccgaacgcgttcgcgactggactgatgaagacgaagaaggtctctatgttcaagtcggagcaattcttcgtggggaaagtgaaatcacctgggataaacctctttacctgtcgcaggtggttacacgaaattcgccgctgtgggtttcaaagcccgaccagcaaatagcctacctcggcgtgaaatattgggcgcgcttgtactgcccacacgtgatcctaggcgtttacacgcctgatgagattgagcagcccaccgaaagggaaattaatccggcgtcggctcataaaatgagcctggctgatatcaaaggtgaaaatgtagtaaacacgcaggatcctcaggagccatctgtaaatatcgacaccctggcccaggatttccgcgatcgcattgaggccgctcaggatgtggatagcgccaaagcggtccgtgccgacatcgaaacggctaaagcgacgcttggatccgcactgttcaccgagctgaaaaacaaagccgttaagcgatactacctggtcgatgcacgtaacaaggtggaagcggcgatcaactccctaccttctccggaagaaccggacgcggcagagcggttcgtggaagccgagcgtgtgctcgcatcttcaaagcgtcacctgggcgacgagctgcacgatcagttcagcatcaccctggcggatatgagaccggaatacgtggactaa

SEQ ID NO: 133546 - DNA, 399 bp, Enterobacter cloacae
atgaacaaccccgattctcagtatgttgctaaaatggggttcgagaccgccagatactttagtaactacgtgcgggaacttatctgggaaaatgtgcgcaagtcagagtttaacgatttgccctccaggcaaaaatgtatttggctggctcaaggtgaagacaatttacagttttggctaagtcgcatcggtaaatcttcgaaagatattaacgtgttcaaagttgttcccagcggtattttacactcagccgatgaagagttattgctgaccgatatagagccctatgacgaaacactgattaaagcaaggcagtactggagcggtattattaccaatcagaattcgaaagaagtgttgtttgagggtagtttgaagattggggagctcatttcttaa

SEQ ID NO: 133547 - DNA, 357 bp, Enterobacter cloacae
atgaaagatgatgaagttcaagaacagcttttaagcgataaaaaaattcgtgaagtaatcctgtcagttattaaggagaaagagtctgccaaaaaaacaaatgaggaatttcaggggcttaaaaaaaatttgttttttggatgtatagttgttacatcctttattggaacgcttttatcaatgttgtgcaaagacaccaccacttcttttgtttttatggggtttacttgggcaggtgtaagcgcagtaatagatttttggaattatccatcaggacttcagaaaaacatctgctcaggaattataaaagtaattccaattattcttggtgtgattaaatacaacttttattcgtaa

SEQ ID NO: 133548 - DNA, 585 bp, Enterobacter cloacae
gtgaagcttatccttgggatccacatccctgatgagggcaggatcagggcatttggcatattgcatacgcatccggattattttcaggttcgtcagcgtatcggtaccgtactgcaggatgaccatcttttcaaaggttctgtagcagataacattatttttttcagtgatgaccgaaattatgaacgaatgatccagtgcgcaagactggcacttatcgacagcgatgttatggcaatgtcgatggggtatcagacgctgattggtgaaaccggcggagggctttccggaggacaaaaacaacgcattctgctggcaagggcgttgtacaagaaaccgggattcctgttactggatgaagcgaccagccaccttgatgttgagagtgaaatccggataagccagaccttacgtcaactggggcttcctgttctgctgatagcccatcgcccggaaaccatagcctctgcagaccgggttttgtatctggcagacggctacttaacggagctgaatctccagcatacagtcaataatggcgagtctgtttgtgaatatactaatgacgtgatggcaaaaaattaa

SEQ ID NO: 133549 - DNA, 1863 bp, Enterobacter cloacae
gtgagtttccctctagaattgacagcacaaattgctggtcacaatgaaaactttattcgtaaggtcatcttaaacagaggtcttacagttctactcggaccaaatggttctggaaaaacacatcttttgagggggctaaagcaaagtcttagtcagcatacgaatggaaagcgtgtgcgctttctatctgccgggcgaatgggcatgttggagcagtttagatcagactatgacgggtatcgtggaggctcaccacagtacgacgacgcatcttatggtagcaagagcgatgctgttcgtagacatcagatggaaactattaatggcgatttccaaacgcttgctgaacggactgatattttaattaaaattcaggagaggcttcggaaattattcaagcgcgacattcttattgaatgggatggtggatccctaaaaatattattttcgcgattggacatagaagcaaaatcatactcgtcaggcagagaagcatctggattgatgcatctagttgggattttagctgcactctatgatgatgatgtaggggcgcttcttctagatgaaccagaggtttccttgcatcctcagttacaggcatttcttcttcatgaaatcctaagtgtatcgggccatccgtctgagggaggtaacaaaaagattgttatcatcgctactcattcaacagaaatgcttcaaattcagaaaccggaagatttactatctcttgttttctgttatgacctgattagtgagccagtgcaaatcccagctgacgctggagagatcaagaacaaaaaagtacaaaacttaattgctcgtctcggacaagagcataagttatcattgttttctaaacagcctttattagttgaaggtccctctgatgtaatgatttgcagtgcgctagcaaacaagcttgatatacatcttgaagctgccggatcacagttactacctgtgattggtaaaggacagatgccaaccgtggcaaaattattgcgtttactcggcaaaagccctgttgcgttggcggacgctgatggaatcgctgatggccttgatcttgtcaactcataccttaatgataatcccaccgcagaaaggcgagcaagtgagctagggtatcgatcctcgcaacaaatggttagtgctatattcacagatttttgcaaattggtagattcccgatggaatgaaatttctgcaaccgccgaattgcacccgtattgggtgaacaagaaagccgaggaagaggcgcaagcaaagcgtcgctctgctttctgtgcacttttcattatcgatgataatgaattagaaaatttagctaaggataatgagtggagtagtataaagatccgtttaaaagtgctacttgacttgctggaacagtgtggcctatttattttacgcaaaggttcaatagagtcttactaccaaaattcagatccatttacttcaattggaaagccaagtgcggctgttggtgaaattgactatatcaatcagttaccgcatgacgatgttaacaccgcatatgcagatttgatccgctgcgtccagtatgcctcgagcactgaagtaatatgtgaggctgatgccctgagagatcttttactttcaattgttgcccctgcacatgccagactaaagagtggtgaatcctcaacaaactttaatattttggctcgttcaattttgggtgagcgttctaaaatatttggcttggttattgaaggtgaaaaacttgttatttcaatcgagagtaacattcttaacgttaaaggttttcccgtatctattggtaaagatgatgatgtgctgaaatgtatcaatgcagcccttgcctctaatctttaa

SEQ ID NO: 133550 - DNA, 336 bp, Enterobacter cloacae
gtgaaaccttacgaatcgaagaaatcacagttcaccagaaacctgatccggcggcgccacgctgaatggtcagaaaagaccttcggcaatgtcggccccatcggaccgctgaagcacctttcgaaagaggcgctggaagctgccgccgatcctagcgacctcagcgagtgggctgatatgcagttcctgctttgggacgcgcagcggcgcgccggtatcaccgatgagcaaatcaccgcggcgctggaagaaaaactaaaggtgaacataacccgccactggccggaacctaaagacggtgagccgcgtcttcacatcaaaccatgtcgcaactga

SEQ ID NO: 133551 - DNA, 939 bp, Enterobacter cloacae
atggccgctctgctgatcccctgcattattgccacgctattcgcgcctgaaccgagcgatgtgattccggtcccccgctcgctggagcaggccgtcgccgcaccgctccgcgatttctttggtcgcaataatgcctggctgatcctgctgctgattgtcctttataagcttggcgacgctttcgccatgagtctgaccaccaccttcctgatccgcggcgtcgggtttgatgcgggcgaagtcggcgtggtgaacaaaaccctgggactgtttgccacgatcgtcggcgcgctgtacggcggtgtattaatgcagcgcctgacgctgttccgcgctctgctgatcttcggcatccttcagggcgcatcgaatgccggttactggctgctgtcgatcaccgacaagcatataatcagcatggcgacggcggtattctttgaaaacctgtgtggcggtatgggtactgcggcatttgtcgccctgctgatgacgctgtgcaataagtcattttccgccacccagtttgcgctactgtctgccctttctgccgtcgggcgcgtatacgttggccccgtcgcgggctggtttgttgaagctcacggctggccgacgttttatctcttctcggtggtggcggcggtgccggggattttattgctgctggtctgtcgccagacgctggaatatacccagcggacggaacacttcatgccgcgcacggaatatcaggctgcctatcggtttgccctgcgtctgctgatggctggttgtcttgcgctggtagtgtggctcgcggtactcatcttgaatgcgacgaccaccttgtcgcttccgtttgaaacccagctgcttgatgcaggggtgttactcgccatcgtgggtatcctgaccggtgggatgctggatttcatgtcattgcggaaaacgcagatgacatga

SEQ ID NO: 133552 - DNA, 837 bp, Enterobacter cloacae
atgaaagctgtagatttaataaaaaaaatggaattgtacgtacactctgcactttacgcttgcgaattatcaattgctgctggatctgctatgtccttctcaaaggaaaaatggaatgttgggcctagtttgcatagtgctgcaaatcgaccacaattaaacaataaaatacttcctttgacactgaaaacatctgatatattccaacttgcattgcatgtaatgaatgatcttaaagttccgcagaaagaaaaaaatggtggtcgtcgaatgtttaatatcaacgacttaactcctccagatgagataatgtctgcacaaactatactttatcttttttgcttgttagaggaatacgagtttcttacttatgagaatgcacttacatcaaatctaagtagggtgtgtcatagtgatcagtacacactgaaaaatctagaggaattaggggttgaaggagtaaagaaaaaaagtattgaaaggcacatggctacatatcaattttcagcatgccgaaaaagaattaagtattggggtaaaatggggctaaaagagttaccagagggcaaaatcgctctatacgagcaaatttcaaaaagaagaaatgaattaacacatttatctacaccaacccctgcatcaagatttgaggcagtaaattattatttagtttgccgaaatttagtgcgtgatatagcaatatctttcgcagatgagagtatcaatgaacttgatattgaatgggatatttggagtgaacttgaacatgatgtacaaaatgatagtttagttcatgacttagcaaaagttataaacaataatcaaaatcatagttag

SEQ ID NO: 133553 - DNA, 564 bp, Enterobacter cloacae
atgaacgaaatggggaagcaggcaattgatagtttatacacggattttgtagaaaactatgggagactcattgaaattggcgaagtaagtttcgccaactcttataaatctcagtttgctaaagtgattcttctggcatgcgccagctattttgaatcagcaacaacacttgtaattcactcaatgttaaacccaacacgttgcaatataacaagacaattcattgaaaataaggctttgagtagacaatatcacgctctttttgattggaataatcgctctgtaaacaagttttttgcatttttcggtgcggagtttaaagctttcatggctgcaaagataaggcaagatgctcatataaaaagaagtatagataatttccttgagttaggagatttacgaaaccagttagctcatgaaaactatgcattatttagattgaatcttacgcctgaagaaatttatgaaaaatttaatgatgcccatacatttatagataatttaaatggttatatgaatgaatataaggaagcgttacaggctcagttggctcaagagccataa

SEQ ID NO: 133554 - DNA, 1164 bp, Enterobacter cloacae
atgtctttacttgataatgataacgatatttttgaaatagaagatgaaacatatccaattgatgaattcgaattaacaactactcccaacgattttaacatgttgactataataagttttattaggtcgaaagtgtttaaaattccttcttttcaacggcactttgtttgggatataaagaaatcttccaagctaatcgagtcgctgttaataggcttgccaatcccacagatttttctctatgaaaaagggaaaaatgagtttttagtaattgatgggcaacagcgtttaatgtcactatattatttctttagtggtagatttcctaagatggaaaaaagatctgaattaaggaaaatttttgataagcatggatatataccagatgaaattctggctgatgatgattattttgtaaagtttaatcttaaactagatggtattgtcgatggtcagttaaataaattcaatggaagaaattacgacactttaggtgagtttcaaacgacgttgaatcttgcaaccatccgaaacatgattataagacctgttgccccggactctgaagatggagcaatgtttgaaatttttaaccgtttgaatagtggtggtgtaaatcttgctccgcaagaaattcgaatgagtttatatcattccgaatttttagagatgcttttaaacttaaatgagcatccgcattggcgattaatattagctaaaaaagtcattgacgtacgattaaatgatgtagaagcgttattacgttcctttgcgatggctatataccttgataactataaaagctctgtaaatggattcctgaataatttttcgaatgctacgaaaagcttcccctctcattacattgcattttatcaggacttatggcgtgcctttatggatgcctgttccgatctcaatgaagaaagttttagaacaggaggaagccggctcagtatcacactcttcgaatctgttttttcagctagtgttgaagaatcactacgttcagggaaaattgatatcaaaaagatatcccctgcttatatcgaacgtttgaaatctgatgccgccttcataggctatagtacaggaaaaactactagaggtgagttcgttaggggacgaattaaaagggccaaagaaattctcaaggagttttaa

SEQ ID NO: 133555 - DNA, 210 bp, Enterobacter cloacae
atggcaaagattaaaggtcaagttaagtggttcaacgagtctaaaggttttggtttcattactcctgctgacggcagcaaagacgtgttcgtacacttctctgcaatccagggtaacggcttcaaaactctggctgaaggccagaacgttgagttcgaaattcaggatggccagaaaggcccagctgcggttaacgtaactactatctga

SEQ ID NO: 133556 - DNA, 579 bp, Enterobacter cloacae
gtggaagacatttttaaagtcatcggtgcggcatctgggcttgagcagatccgcaccgattctgatcctaccaagacatcccaatccaaaaatagcaatcccaaaacagaatcttcaaaaggaagcggttcagctgaagaaaagggtaaatccgaaacttctgacggagctgcaccaagcgaacctgacgacaaagcagaacgtgaagcggaagagtttggctctaatactggcgcgttgcatgaattcatgcagcaaaatcgtatggatagcttgcaagcacaactggatatgttgaaatcaggtgtgcgagataagattgctgatgcgaatggtaaagaaattgacaacgttcttcgtaagaagatggcatccttcacattttcatttatggtttgctggtgcctattcgttggtactatgtttgtttcttatcttatcgcacatgaagggaagcctcctcctgaaaccatgattgctttacttggcaccagtacactttcgattgttggacttgttggctttgtagttagtggcctgtttaagtcgcgcaaagaaggtagtgaaaaagagaaataa

SEQ ID NO: 133557 - DNA, 471 bp, Enterobacter cloacae
atgtacagtccggtacaggtagccaatcgatttgttatgttgggcaatcaacatatgaatcctctgactcatatgcaacttcaaaagttgacatacattgcccatggttattatctggctttaacagggcgtccgttaatcaatgaacctgtttctgcttggaagtatggccctgtaattccaggaatgtatgacgcatttaaagactttggaaacaggccagttacaaaccctgtcatgagtccttacggaatgggagtattcgacccgcaagcggaaagtgtcattggtgcagtattccaatattacggcaacaagggcgggattgaattgtccactttaacccatttacctggcactccatggtccagagcatacaacgggtttagttctacgattatacctgacggtgtaatcaagtcttactacgatgatcttgttgccaatcggcaaacttgtcaaggcctctga

SEQ ID NO: 133558 - DNA, 318 bp, Enterobacter cloacae
atgggttttccttcaccagctacagattacgttgagcagcgccaatcaccggcgatgatttgcaatatgggagcagaaagtcgtgtgctggaaactgatataggttttgcggtgattgagccagcgagcaagaagttgccaggagatgtgtttctgatcttatgtgacggccatacccagcttgcatcactgatgggccaagcacttattacagaagacggagaggcaatagagggtgaagctcttgaggatgtccaagcgcttgggagagtgacattctttatcaaccgagcaacagagtatactttgccattttga

SEQ ID NO: 133559 - DNA, 261 bp, Enterobacter cloacae
atgacaaacaactttaagttttcccagcgcagtgaaagcaatctcaaaggggtaagccaggcaaagacggtgagaacagtgctgatggcatctctgcgtaccagatttgggttgcggctcaggaagagggtgccgatacatcagaagatgcttatatcgcgtttcaggcgggcagggatggaaaggatggtgcgtctgcttatcaaatctggctggatgcgggaaacgagtgaaccggaagcgattttcttgaatggctga

SEQ ID NO: 133560 - DNA, 348 bp, Enterobacter cloacae
atgcagaactacaccccgctagagggtcggggtccagtacttcattttttacacgagaaccgaatggcgattcaggacgcattaacggcgttctttatcgcgttgcttttctctttgcgggatggggtagcctggtggcgctcaatcaatgctgggcttatctgcggattcgtagcgctagcggtggtgagctttcttgcgcagttaggcgttacagatatggactggtcatttgtcacaggcgcagctgttggtggtgccggtgttgaccgttgccgttcactgattaacgcggctgtgacgttatttgcaagtaagaaaggtattaacgatgacaaacaactttaa

SEQ ID NO: 133561 - DNA, 435 bp, Enterobacter cloacae
atggcttggcagggtattccatttcttatgcatgaatttgaccaaacgcttggaaatgcttttttgggctttcagcccttaaaggtcttagttgagatgtcacccaaagcttcagcggataactccgctctttgggcggcatttattggtgcagctgtatctggcttagttgctttattatctcaatatatttcaatgttaagtcgaatagaagatagaaatcatcaatctcggttaatgaagtatcaattattgctaactatcaaacagacttgggctgatgacttaaggaatgaggttgcaaatctaataagtttatcaaccgctgtttataatttatactcaaccttaaatgagttgtttgataaaaatcttgccccaagcgaatcttatgataaagcttttgaagctcaaatggaaaaaaacaagaaatag

SEQ ID NO: 133562 - DNA, 516 bp, Enterobacter cloacae
atgttttacaaagacctcctggatatctttgacgaaagacctatctacaaatctcatgaagctatcgagattcttcggaacaaatattttctagatgctccggaacccgtactgagtgagatttattatggattagcgggttatgaaacattccaggaatcttacggacacattgatttaaacaccataaaatggaagcttgtacatcttccgattgagtctttgcttgaagtaaggcatgccacctattacggtatgcttaatgaagaaattgaagcatatcccttacgaggtggaattgatttctacgggcctgaaatagcatcgtattggcgtacgtacgggacatggttagaaccacctttctttattgagcgatccattatcgagagcaatgcatccggcctccaccttatcgaaggacatacgaggttaggtgctttgctaggtgaatttaaccatcaatccattacgttagccaaaactcataaggtttttttagcacaccgaaactaa

SEQ ID NO: 133563 - DNA, 747 bp, Enterobacter cloacae
gtgggttgcctgtatcgcgacggatttaatgaaattaactatctggtttctgtggcgatgagtatgtatgaggaacgcgagactgagcacgccgaagctattgaggaagacaagcgttttacctggctggccaatcgctggagtctgttttgggcaggttgtgactacttcacccgccgcacgatgatcgaagatgctcacgctgaagccctgcgaattgatgcggaacaatacgcagctcccgtcaccagcttcatcttccagcgtaatgacggcgtacagctggctctggatagctcatgcgatgctcggttcatccgtaccagcaaaaacgggaaatggtttaaggcaggtttccgcaacaccgatacccagataaaaacgggggcaatgattgccataccgttatccctgtcactgaatggaatacgtctgagcgcaatcattgatcgctgtcgtttgctgagcactaccgattttctgataagtgccggcaagcggaaaaacagtcctgacggagctattcatttggacagtttgacgaaaggttttgtgaaggcgaggaaattgtcggggctggagttttctgaacatcccccctctttccatgagatcagaagcttgtctggtcgcacgtatgaagcgagtcggggaaaagatttcgtgcagaaactgttcggtcatacatccaaaaaaatgaccgaaaagtacttggatgtgcgggagaaagtgtttacattgttgtaa

SEQ ID NO: 133564 - DNA, 3285 bp, Enterobacter cloacae
atgaaccagacgtacacgccaaagttccaggaagaatacagtgccaaaattccggcactgacgctactgtccagcctcggttggtcgtttttatccccgaaacagattatggattatcggggctataaacaggatgaggtggtgctgcgtccggttctgcgtgaagagctgtcgaagcgttcctttatggcgggtggcaaaacctgccagttatcggaaaaagcactggataacctgatatcacaggtctgttctccggcgctcaatgaagggctgctcaaagccaatgaacggatgtataaccatctgctctacggtatcgcagtgaccgagtttgtcgatggcaagaaggtcaaccccaccattgcgctgatcgactgggaacatccggaaaataaccagttccactttactgaagaatttacggtattgcggtcaggtggtgttgaaacccggaggccagatattgtctgctttgttaatggtatcccgctggctgttattgaagcgaaaagcccggctggtcatggcaagaaagggccaaccattgacgaggggatatcccagagtatccgcaaccagttcaacgatgaaatcccgcagctgtttgtctatagccagttattactttcaattaacgggcatgacggacgctatggtacctgtcatacaccaatgaaattctgggcggcatggcgcgaagaagatattacttacgcgcagatgtatgcgctgcgcaaccataagttatcgactgaacaaattcatgcgttgtttgatcatcgtccatcagccgatctcgactggtaccagcagttaatcgccgccggtgaactggctgtcagtggacaggataagttgcttatcagcctgctttcgccggaacgtctgctggagatgacccgcttcttcactctgtttgataataagaccgggaaaattgtcgcccgctatcagcaggtgttcggtattaaaagactgctggagcgcatcagtacccgcagacccgatgggggcagggaaggtggtgttatctggcataccaccggctctggcaaatcgtacaccatggtgttcctcagcaaggcgctgattcttcatgacagcctgaagcggtgtcgtatcgtggtggtgacggaccgtatcgatcttgaagaacagctcagcagtacctttgcatccggcggcgagttggccgggaaaaaagacaaagccaatgcaatggcgacatccgggcagatgctggcgaaacagattggctccggtaaagaacgcatcattttcaccctaatccagaaatttaattcagcgacaaaacttcctgaatgcgtcaataccagccccgatatcatcgttctgattgatgaaggacaccgtagccagggtggtgagaaccatgtgcgaatgaaactggcactgccgaacgccgcctttgtagcatttactggtacgccattgctaaaagaagataagaccaccaataaattcgggccgattgtccacgcttataccatgcagcgagcggtagaagataaagccgttacacctttgctgtatgaagaacgtattcccgaccttgaggttaacgatcgggcaatagatgcctggtttgaccgtattaccgatggattaagcgaagcgcaaaaagccgaccttaaacgtaaatatgcccgtaaaggtgaggtctacagtgcagaggaccgcatccgtctgattgctctcgatattgccacacacttctcgaaaaacattgatgagggactgaaagggcaacttgcctgcgacagtaaaatctctgcaattaagtataaaaagtatctggatgaagcgggattatttgaatcagctgtagttatcagtccgccggatacccgggaagggaacaccgaggtggatgaaagcaaactgccggaagtgacgaaatggtggaaggataatgtcggcacgcaggatgagtccgcgtatacccgcaatatcatcagtcgtttcgataccgatgataagctcaaattgctgattgttgttgataaacttctcaccgggtttgatgaaccgaaaaataccgtgctgtatatcgacaagccgcttaagtcccacaaccttatccaggcgattgccagggtaaaccgtctgcatccactgaaaaagtttggcctgctgattgattatcgcggcattctggctgaactggacacgacgatcggtaaatatcaggatctcgcctcccgaacccagggaggatacgacatcaaggatattgacgggttgtacagcgccatgagttctgaatataaacgtctgccgcatctgtataaccagctgtgggccatatttgccggtgttaaaaacaaaaatgatactgagcagttacgtgcggtactggtgcctaaaatggaagaacgtgacggagagatggtcgatatccatcagaaaacccgtgatgatttcttcgaggcgttaacggcctttgccggatgcctgaaagtggcactgcagtccgctaccttcttcaccgacaagagctttacggaacaagaccgaaatctctataaagaaaccgtaaaacagatgtccagccttcgccagtgggcaatgcaggtaagtggagagcaggtcaattatgacgactacgccgagcaggtgaaaaaactgctggataagcatgtcactggcgttgaggttcgtgaaccggatggcgtgtatgaagtaggtaaaatgggcaagagcgaaaaacccgaagagtgggataacaataaaacccgcaatgaaaccgacatcattaaaacccgtgtgacgaagatgattgagcaggagctgcgtgatgacccgtacgctcaggaggcattttccagactcctgcgcatggctatcgaagaagcagaaaaactgttcgaccatccactaaaacagtatctcctattccgggagtttgaagaaaaagttgaagcccgtaagctcagcgacatcccggatgcactggcggtgaacaagtatgctcaggcgtattacggtgtatttaaaaaagagctacctgaggtttttgcggtaaacgatgttcaggtgcaggagaagtggacgaagctagcctttgaggtggacagcattatcgtcaaagcagtagcagaaaattccctgaaccctcaggatatagagaaagcggtcaagacaaatcttttacctctgctgtttacgtcctgccgggagataggggctggaatgatccaggtgaaccgtattgtggaaactatcatccagatactgcgcgttggtttgatgaaatcatga

SEQ ID NO: 133565 - DNA, 1269 bp, Enterobacter cloacae
atggtgcctaagggatggaagaagcgtgacctacacaagttaattacgattaaacatggatttgcattcaaaagtgaatatttctcaaatgatgggcaatatgtacttttaaccccaggaagttttaatgagtcaggtgggttccggaaccaaggtcctaaaacgaagttctatagtggacctatacctaatggttatcttttaagcaaaggtgacttacttttggcaatgactgaacaggctgaaggtttgttgggtagtcctttatttgttcctgaagataataaatatttacataatcaacgtctgggactagttgagattaattgtccagataagatttgctccgatttcctttatcttttatttaatcatgcagatagccgtaagcaaattacagaacaatcgacagggacaaaagtaaagcatacttcacctgacaggttgtgttctgttattggtttaatccctccacttttagaacagaaaaaaatcgcccaaatcctgtcaacctgggataaggcgatttcggtgacggaaaagcttctcgccaatagtcagcagcagaaaaaagccctgatgcagcaattgcttaccgggaaaaaacgcttgctggacgataatggcaataatttccatggtgaatggaaaagttttcagataggcactcttttaaaagaaataaaacgtcccgtgcaatggaatgacaatgatgagtacagtttgctaagcgttaaacgtcgatcggaaggtgtagttcttcgtgaaaaattaaaaggtcatcagattctcactaagaaaatgaattatgtaaagagtggggattttttgatttctaagatgcaagttgttcatggtgcaacaggtttagtaacatcagaatttaacaatcatcatatttcagattcatatattgtcttgaattcacgaaacccttcaattcttgatatacagtttttttcttggatatgtaagcaaaaaataatgtatcacaaagcttatctgtgtagttatggggtacatattgaaaaaatgacatttaacttgcaaatgtatttgcaggaaaaagtgtgcattccgaaaacttctgaagaacagcaaaaaatcgccaccgtcctctccgctgccgacgccgaaatctccatcctggagaaaaaactcgcctgcctgaaagatgagaaaaaagccctgatgcagcagttgttgaccggcaaacgtcgtgtctcactgccagtaaaagtggaagaaaaagaatccgttagcgcttaa

SEQ ID NO: 133566 - DNA, 1176 bp, Enterobacter cloacae
atgttcgaaacttatctgggccttaccaaccgcgacgccaaaaatgccagtcttctcgaaaagtatcagccggatattgacgccctgtgtgaacgcttctctaaagaaggcttgctaaatttgatgaccgtaactgatcaaaataacgacaggcagatgaaacccgccagtgggatagttgatgtcatcagctcattggccgaaaactctaatcagattagtttttttcaggatgtggctattctgaaagaatggtgcacgcaacaaagccgggaattttatcaattagcactaaagatttatgctgatgaatcagagtatcagaatagaatacctggaagagtaataagacggataaaaaaattcatagacaggggatgggctaatgatcatattccccaccctcttttacgttcttttctgaatgtactggatgatatgcaggatccccataccttccatgattatcctgacaataaaactggcattaatacattcaataaattcgtagaagaacatcctaaagcagtcactgagtatttaacttctgaaatctggttgaatagcattcccaaagacctgctccttaaggctaagagccgcaacgaacgtgagaacgttggaatgtgcaataaatgcaaggagcgtgaggaacgcatgcgagtttcctggctggtattctctattttttgtgcaaaaaattattttcatttaatcatttcaactcttgattccatgcagcgcaaagatattatatgtaccactaaacttcatcatcataagatgattccgttaattacattagcgatactaccttatatcgtaatggtccctgtcatatcaaaaaaccaatacaacattacgattacctgtcctgatgaattcattgtaaaaaatgtgatcccgttcggcaaagccaatttgacaggctataaaaaagatactgaacaactctttcgtaagctctatatttatatagctttgctcatcaacccgaaatgggctcctaccgctaatgaattaatctcttttcttgaaggtagcaacgagaaaataacaggatcacttaattttaaatccacatccagaaatcgcaactcgaaaaccaataatataagctcactgggcaggaccgaatatacaaaaaaactgctcaaaagggcgaaaaacaaataa

SEQ ID NO: 133567 - DNA, 1122 bp, Enterobacter cloacae
atgcccattatcgatatccgcttcagccataaatcactgtctcagctacctcatccacctgccgggtgtcaggaataccgcgatactttgtgtccccatctcagggcactcgtatatccaaaacggatcacactcgcccttcgctgtacaattaaaaacaaacgcatctacgaaaccctcggtactttccctcttctcagtgtggatgctgcccgtcaatacgttcaacaactgctgactgataagcaccggcttcaaatgcaatcacattcgcatactattgagcatgctgttaatagcctgtggcttcctgatatgcgcttgtataaaaaaagcccccagtctgaactttccaaactccatcgctatatcctgcccagttggggtagccgccagctgcacgatattactgctggcgaaatagagttgtatgccgcatcccttcgagaacaattgcgcccggcaaccatcaaccgcattctggccattctgtcaaaaatatacactcttgctgtcagagccggttggatcacccactccccaatggggcacgttcgctatcttaaagaaaataatattcgctatcgcaccctttctgacaccgagatccggttatttatagacgctgcaaaaaacctgcaaaccccggccgccgatgcgatcctgcttgcgctctataccggcatgcgtattggtgaagtctgtacgttgaattgggattattggtaccctgaccagaatcagctgatcctgcccgataccaaatcggggcacccgtttacctgcccacttgcaactcctgcctttaatctgattcgaaaacaacaacaactggcactcagtacaacgtatatctttccgcaaattacagataccaccagaccactgggttatccgcgtggaaccttttcccgtatatgccgggatgctggaataagtggtttacgtatacatgatctccgccgaacctttgcgactcgtgtgctgcacgaaaccggtgacatcgacatgacctcccgcctgctgaatcatcattcgctctcggtcacccggcgttatgctttccacaacaccacggcaatgcagagcattgccagtcaggttattgataaatatgagtaa

SEQ ID NO: 133568 - DNA, 189 bp, Enterobacter cloacae
atgtatatcaactccaggcaacttgccgcccgctggggtattgcacccagcaccattgccagtgacatcacccgtaacccgaccaagctccctccgttcatccggctgggacgtgcgatccgttttcccgtggctgaggtggaagcctgggaaaagcagcaactaacaaatacacaaacttcgcgctaa

SEQ ID NO: 133569 - DNA, 900 bp, Enterobacter cloacae
atggtgctcaagatgaataatacagaaactaaaaatcgaaatcctgtgaaggatgctcttgaaatattacctgaaaatatcagggacagtattgcccgacgcatcaatgacgttatcagttatgagccggtcattggcattatgggaaagaccggagccgggaagtccagcttatgtaatgcgatttttaagggtgatatttgtgcagtcagcgatgtcgtcgcctgtacccgtgaaacgcaggaaatgcgcatccagtttggcaaacgctcagtgcggttgattgatattccgggtgtgggcgaaaatgctgagcgtgacgctgaatatgaacaactttatcgtgatctgttaccacagctggatctggttctctgggtgattaaaggcgatgatcgcgccttttctgcggatgaacatttctacaaaaatgtgctggcccctgctggcggtgaggctaaaacactgtttgtgcttaatcaggtcgacaaaattgagccattccgtgagtgggatgttgtcaacgcccggccttctccatcccagatgcaaaatatcctcgataaagaagcatatatcacacagcgatttgggtttactgaccatccggtgatcgctgtcgccgccagtgagggatacaatgtgacccatttggtggaggcaatggttcgtgcgctcccaaagcacgctcaaagcggcgtcgcttctcaggtgagagacgagcacaaaacccgtacagttacagaagaggcaacggaaggatttggtgataccgttgatcgcgttcttgatgatattattgataataccctgccagtgcctttgcgcgtggtcgtaaaagccgccaaaaaggccgtagtcagtggattaaaaaaggcctggaactggattttcggatga

SEQ ID NO: 133570 - DNA, 462 bp, Enterobacter cloacae
atgaaatttaaatatcttgcgttatccctactcgtaagcttgcctgccctggctgaatcatcccttattgcgtgcagccctaaagacaaaagtggggatgactctgcaagtatttggccgagcccctatttgtcacaaaacaaactctgtttcaacataagtgccaattcaggtagtacgtgtgttgctaacgggaaaagtacttcctggtttactgaagccgtaattgttgatattgatggcgaaccacaaggacgtgatgatacctggttccgggttgtacatcccataatcactgatgaaaaaatagagtatgtgatcgagggttcaagagataaaaaaaattgggggggtgtatcacatgtctcgattaacagacttacgggagaagcggtagactggtttatcgccgaccaaggtggaacatcttatcagtgtcatctggaaaaacgaaaaatctga

SEQ ID NO: 133571 - DNA, 393 bp, Enterobacter cloacae
atgaaaaagattgttattacattttttgttataggattttctaccacctcgtttgcagccaaaatatcgcttgaaacggcagggctctgctatgaagcgacccgacaatcaacaaaaatggccatgctattagacccggacgctgctgaatataaacatctcaataacaatacgaaagagttattcggaacgctgtcggggggcgtgggagaaaaggattcaaagaaaatacgggatgcctggaaaaccgtcctggataatgccggaatggaaggtcgcatggctaaatctgatggatatcgggaaatgaaccgatatccacaggaggtgattatgcaggaagccaataaatgtgtccgtctggctcttaaagcaggacttgttaaaccctga

SEQ ID NO: 133572 - DNA, 228 bp, Enterobacter cloacae
atgcaccgaacacgaggcgagaaaatagccgagagactgggatggatcttacttcagctttatacgggcaataccctgtcagtcgatgacatttgccagcagttttccgtgtgccatcgcacagggcagcgtgacttattgagagtggaaaccgtaacagaggtgattgcacccggcaaagtgcgactggcccctctgataagagagcgcgtcagacagggtatctga

SEQ ID NO: 133573 - DNA, 270 bp, Enterobacter cloacae
atgcggacagaaaaaaccccgccgaagcggggtttaagcgtaatcaggcgattagccttgcagcagagacagaacctgctgaggaacctggttagctttggacagcacggagttaccggcctgctgaacgatctgcgctttagacatgttggacacttcggtcgcatagtcggcgtcctgaatacgggactgcgcttcagacaggttggtggtggtgttgttcaggttggttacggcagagctcagacggttctgaaccgcacccagtga

SEQ ID NO: 133574 - DNA, 1629 bp, Enterobacter cloacae
atgttaaataaacttaaaatctataccgtaatcagcctgattatcggcatgatctcttgcatgctgtttggcgttacggctttttccgtttataactcggtgacgattaataaaaattttaaacgcgttgtggacgttaatgacagcaacgcctacatgactaacgccgcatataacattaactcggtggtggcgaatacgaacgggatgatgcttcagacgtcgctgcataaaccactgtcgccagagatgatcaaacacacccacaacctgctgaaagaggcgcgcaaggagatggatgctttcgcgcaggtgaaattcaacagcctggcagagacaagggctgctgaggagcttcgcgccaaatttgacctggtttataacaccgtccaaaccaagctcggctatcttgagcgaccggaaggatacccgggctcgatgaacggtgatatggaactgcgtaccgagctgcgtcaaaaaattgagaagtattcagaaatctcatctgaccgggggtacgaatatgtgtcagtagctgaaagcagctacaagatgatgatttgggtcagcgtggtgatgatggccatcgcgatttgcgtattgttagccgttcgctactggttgcgtattgcgctggtgcgccggatggaaactaccgttgagatgcttcagcgcgtagcggcaggcgatctgagtcatgccatagagactggcgctgataacgaaattggcaaaatgctcagggagcttgagaagatgcgtgtctccctgaccaacaccattaccggtatccgtgaaggggtagtgaatatccattctaacgcccaggagattgctcagggcaacagcgacctttcctcccgtaccgaagaacaggctgcggcccttcaggagacggctgccagcatggagcaaattaaaaccaccgtacgccagaatgcggataacgcacatgcggcgcgcagtctggcagaaggggcaagcatgaatgcccaaaatggcggtgaggtgatggtaaacctggaagctatcatggcgcagattaccgaaagctcccgtcagattgctgatattaacggcgtcatcgacagtatcgccaatcagaccaacattctggccttgaacgcagcggttgaagccgctcgagcgggagagcaggggcgtggctttgcggtagttgcggaagaagtgcgtaacctcgccaagcgcagcgccgatgcagcgaaagagattaatcagctgattaataccagcgttaacaatattgatacaggttcgcgccaggtaagccaggcgagcggcgtcatgcaggacatcgtgacttcggttgctgaggtgacgcagattatgggcgaaatcagttcggcctctgacgagcaaagtgcgggtatcaatcagatttcgcaggccgtgaacgagatggatctggtgactcagcagaacgcggcgatggtggaagaagcggccatggcggcaggcaaactggaatctcagtcggacgagcttgagcagcttgttgcccagtttaccctgcgagatgaaaaagttgaaaaacgccatacgcccgcgccggaaaaaatgacgttgcgtcacgttgaaaatgataatgcgcagtgggaaacgttctga

SEQ ID NO: 133575 - DNA, 321 bp, Enterobacter cloacae
atgaaaactctacctgcaacgactttgtgggcggctaaaccatgcccgtcaccagtgatcgtatggcaaatgcttctttcacgcctgctggatcagcactatggcctgacactgaacgacacgccattcagtgatgaaactgtgattaaggaacatatcgatgccggtatctctttagccgatgcagttaattttctggtggaaaaatacgaactggttcgcatcgatcgtaaggggtttagctggcaagaacagtcgccttttattactgctgtagacattctaaaagccagacgggctatgagggaaatgagaacctaa

SEQ ID NO: 133576 - DNA, 318 bp, Enterobacter cloacae
atgaggaacatcacatgggggctgcagcgggatatcacgccacgactgggagcccgtctggtgcaggaggggaaccggctgcattatctggctgaccgggccagcatcaccggtaaattcagtgacgtcgaatgccgtaagctggatgaaacattcccgcactttatcagccagatggagtcgatgctaaccaccgatgaactgaatccccgccatgcccactgcgtcaccctgtaccacaatggtttcacctgcgaagccgacacccttggcagttgcggctacatatacatcaccgtttatcctactcaacgataa

SEQ ID NO: 133577 - DNA, 477 bp, Enterobacter cloacae
atgaaacagctttcctttttacccggcgagataacgccacaggaccggcgtctcatccagcgggcactcagggttctggacagacatctgcatgagcccggggtggtgttcacctccacacatgctgtccgtgaatggctgcgactgcatatggccgcgcttgagcgggaagagttccgggtgttgtatctggataaccagaaccagcttatcgcccatgagacgctctttagcggcacgattaaccgcaccgaggtccatccccgggaagtggtcaaacgtgctctgtacttcaacgcggcggcggtgatactggcgcataaccatccttccggagagacgacgcccagccaggctgacaaaaccctcacgcagcgactggtgcaggtacttcagttggtggatatccgtgtccctgaccacctgattgtcggcggcaggcaaatctattcgttcgcagaacacggtctgctgtga

SEQ ID NO: 133578 - DNA, 459 bp, Enterobacter cloacae
atgacaacacagacacagtacgagttagttcccgctaacgaatcgcagttcaccctcagtgccacgctggtacccgacgaacagcgtctcgatttctggccgctgtactttggcgctatcccgcaatggataacgctggaaccccgtattttcgcctggatggagcgcttttgtgatgagtacagcggtggtatctggtccttttacaccctcagcaatggcggcgcgtttatggcccctgagtctgacagtgatgagacatggcatctgtttaacggcatgaacggcaatggtgcgcaaatgagtgcagacgctgccggtatcgctgtctgcctgattgaatacagccaccatgcctgccgtacagagtgtgacgcaatgaccgcgcactattaccgtctgcgggactacgccctgcagcatccagaagcccacgccattttgcgcatcattgactga

SEQ ID NO: 133579 - DNA, 240 bp, Enterobacter cloacae
atgcctgaatctcaattactgccgtcgggttcattcactcgccagcaggccgaagctgttacccgccggtatcacaacatcgccattgaagacgaccagggcagtcacttccgtctgatagttcgcgaccccgaaggccggatggtctggcgggcgtggaactttgaaccggatgccggtacggccctcaaccggtatatagggcaggatggcatttgcagagcattatccaccgactga

SEQ ID NO: 133580 - DNA, 615 bp, Enterobacter cloacae
atgaaattacttactaccacggcgctggcgctctgtctgtgcgcgggtaccgttttgccagtagccgctgaaaatgtcttagggacggttaaggcctggcaatacatgcaggctgacggctggaaatcagccgatggtctggacaatcacaccctcagcaatgcgctctacggtgccagagtcattgataattacccctggacccggcagtttctgctgcggatgggatacaacggaggctattttgtcgctgacaaaaacaccaaaacggtacgcaaacttacactcaaaacggccagtggttcccccgccgatttgacatccgtgtaccagggcgagggtaaggcgtgtgggttcactctgattgatacccaggcctcgctgctggacgaggcgcaacagagatcggggggtacagataatccgacagaagcgttgaatcatgcccggtctacctacacaccgaaagccctgctggtcgtgcctgataattgcgtcaatccaaaacaacaggccgcgctggcggctaagcgttctcaaaaagaccgcgaactgcagcagtgggtggcgaagcagagcatggctgaactgtgtcgccgtaccggtaactgctga

SEQ ID NO: 133581 - DNA, 705 bp, Enterobacter cloacae
atgtctaagactgagcgccgccatgagcgccttgcggtccgcttgtcgctgattatcagccgccttgtggcgggagaaacgctgattatgcagaagctggctaccgagttcggcgtgtcagtacgcacgctgcgtcgggattttcgtgagcggctgacctatctcgacctggagttccgtgacgggcagtgcagcctgctgtccggtagtcgccagcgggagctggcggtgcagaccttcgtccgccactccggcgtggaggcgctctttccggatatcgacaaccagctggttacctccctgttgagtgctagtgaatctccctgccttatctggcacagcgctacctcccgggcactggcacggcctgaagtgtttacgcgactggttcgcgctatcactgaacaccgtcgggtgacactactggcagaaggcggtcattactccgggctggctccttaccgcctggtgtgcagcgatggctgctggtatctgaccggtgagctcggggggcatataacggttttcccgctgggcgatattcacacggtaaccttccatccggcactgttcgtgccggatgcacgggtgcgtaacctgctgtcacatcccggttttcttcgggtattaccccactttcagactttccactcactgctcgttgtcagtgacgacgggttttcacctcaaaaggaacagatatga

SEQ ID NO: 133582 - DNA, 861 bp, Enterobacter cloacae
atgatatctttacgtaatgctgttagcgaagaggactggcttagcagcatgatgctattattcagaagtaagatgtatagccatcgtatacttatcatcgtcgaaggtattacagatatcaaatttttcaatacttatcgtcttgataacagactcatatatgagtcacctgaaaatggaaagcgggaagtcatttctgccgttaatgaattaaggcaagcaggcaatgatgctgtatatgggatctgtgatgcagattttgatggcctaagcggagtgatccataacgcaattttttatacagatactcatgatttagaaatgatgttagtaaaaggtggagtggttgataaatttataatgatgcatactaagagagagttcattcaaggtgacatggcggatactttctgtcgtgatattaaaataaatattctctgtgcctgttatcgaattggactgttgaagtggtataattaccttaatcacagcaaactgaatttcaaagggatgactcataaggcatttgtttgcatcaataatacagaagtaaccgttgatgatggtgcatacatacatcatatccttgccagaagcaaatcatccgaaaaagatttaaatgtgtcatgtttgtataatgaaatgcgtaagcttgaattaatgtcacctgaccatttttcaatatgcaatggccatgatttcacctgcatacttaaaatgatgtatgaaactgatatttcaattaataggaatatgcgtctagatgaaatcgataattatttgcggatgagttatgatcatccaacatttaaaaccacaaaactgcacacctccttaagtaatttactaaaaacgcactaa

SEQ ID NO: 133583 - DNA, 1245 bp, Enterobacter cloacae
atgaagttaacacagttaaggataagtaagctatttggaattcttgattatgatataccactggatcaaaatgaaataaccatgcttactgggccaaatggttatggtaagaccatgattcttaaaattattaatggtattttatcaaatgaattaaatattttatgcaagataaaattcgatcttataacgttaatttatcaaggtggagcggtctctattcgacataatacggggccaaacacattatatttagaacattttggtggtgacttaaatttactaaacacagaggatttggagttagaaaccgaagaagaaaaaacagatagcttcattgtttttcactggaaatcagaagaaaataaacgaacgcaaaagcaactggtagaaaaaaagttaagttctgagcatttaaaattagtaacatcaaaaaaaatagtttcttttatccgtgctgatagattgcaagttacaacggaggatgaaaccgttattgatttatgtgcctccaggctaaaaaaattaatggaaaatgctcaggatgaatcagcagaattaagtcagagattagatgctacatttcccattagactctttgatcgattagaacaacaaaaaagattttcttctgaaaacattcagagtcgtttaaaaggcatacaagataaacgtcgtaattatatgcattatggcttaattcaggcagaagatgatctaatgcccgataaaaacacttctttaaatagtagtaatgaatatcttggcgtgcttgatctttatatagaagatgcactaggaaaactatctccattccagatattacatcaaaagatcgatctatttgaatcaatactcaaagataaaatattagcctttaaaaaaattgttattgacaaaaacaatggattttttttcaaaagcttaaatggtgatgttatcgactgcaacatgctatcatctggtgaacagaaccaaattgttttactttttaacttgatattcgatcttgcctctcaaaaaataatacttattgatgaaccggaaatatccctacatgttgcttggcaacaaacattcctcgattcgctaaaaaaaattcaaaaaattaatgaatatgaaaaagtcatcattgccacccactctccacaagtaatcagtaagaattgggcattgacatttgacctctttgaaatgcttgaaaataaagatgataatcaagaatattcagaaggaaataattga

SEQ ID NO: 133584 - DNA, 1953 bp, Enterobacter cloacae
gtgagccttcaaataactagtctagtaatttatagccatgccggagagcatcgggaaattcccttttttcctggacggttgaatattctgactggcgcatccaaaaccggaaagtctgccattattgatataatcgattacgtaaccgggcgaagcgaatgcaatgtggcagatggcataatccgtaagagttcacaatggtacggaattctattccaactaaatgaatctcagatttttatcgcacgacgtaatcctgaacccggctcccattcacacggtgacatatacatggccaggggaacatcagtagccattcctaacggagccgttctctacaaaaacaccaccgtcaacgctgttgaaaaatttctgggtgccgcaataggcattagtgaaaatgaacaccgcccaaacgagcctacccgtccctctcttgaagccaattttcgtcacgcgcttctgttctgctttcaggatcagaatgatatcgacagtaaaaaacgtctttttcatcgtcaggatgacagcttcatcgcacaggcaatccgagatactctcccttacttccttggagccatagatgaagacaggttgctgcttcaaactcaattggacgatgcacgtaagaagctacgccagttggaaagacttgtaagggaagctgaaacgctggatgacaacactttccccctagctagagcactacttgaagaagccaaaatggcagggctcgccgacgacagaaccgtaattacagattatgaatcttgcatctcggtactgcaccgtttaattgatcatactgaattttcagatgtagtagtggcgggcgatcatgaagacatgctgatgcgattacgctcagaacgccaaggtctacgtttcgagttagaaaggctcaataccgatattcgtgaaacgcgtgcttttacatcagaatctactgggtatgagcgtgaagcgcgtgagcaacgggcaaggttgagtgcgataaatcttataaaaccttccgacagcctgcacaactgcccactttgccagagtaaacttgaaaatgcacctcccgcagtccatcaaattcagcactctcttgttgaactgagtgaacaattagcaatggtggaatctgaaaatccccgactacaactacgtttggcgcgtctattaaagcaggaaaatctactacatgacaggcttcgagagaaccagcagcagataagcacctgtattcagcaggccgaatatctgcgtgtgcaacaggaatcctttattctgcaggcgcgtattataggtaaaatttcgcagtaccttgagacaaccggtcatgcagatcagagttctagcctgcgcgttcgcttggaagaacagcggtcacatgtcctgctgcttgaaagcaagctggatcatgatgctgttcgagaaaaactgggtaccttcctgaatataatcggtcgttacatgactgaatactcgcaacagcttgatcttgaacatcagggtagcgatcttcgacttgatattcgtagacttacagtggttgcggataccttggacggaccggttcctctcttcaggatgggtagtggtgaaaactgggttgggtatcatgtcctagcacacttggcacttcatcgctggtttcgcctgaaaaagaggcctgtaccaggatttctcatccttgatcaaccctctcaagcgcactatccacctgagaaagatgatgagggttctatcgaggctcttactaatgaagaccaaaacgcagtgtacaggctattcagccttatcagcaacgccgccgcaaagcttgcgccggatttacagataataatcatggaccatgctgatctgaaagatgactggtttcaggttgctgttactgaacgctggcgtaatggtgttaaacttattccaatgacttggataactcatcagattaaaaaagtgtga

SEQ ID NO: 133585 - DNA, 504 bp, Enterobacter cloacae
atgatacagccatggacttctcggcccatagaagaaagctacctctttaatccggcgttttgtgttctgttgattgctggtgcgtcatcagaattcacaaaaaaaacaggtcgaccactccctttcgcgctggctttccttattctgcctattgttttgcatcagaaaactcgtcagacccttccaagtacaaccgtaacttcattcttgacctggattcaggataacaaagatatgctgatcaacttttctgaaagagtcaggcggcttaatgcagtgacacgtgagagtttattatttggttctggatacggagccctattgctcacagaggatggtggtataaagaaagggggaaaaattctgtcacccactgagaaacgcataccactattgaccgaagaggctcgagaatgtattgaacgcgccgcatttctcgggcgttggttagcaggggcaggtaccaccgcaactatctatgccgcttgggggattacaccgtga

SEQ ID NO: 133586 - DNA, 1188 bp, Enterobacter cloacae
atgggtaacactcatgaagctagcgcttcggcaacaggctacctgtatcaatgccgctatgcgttactaatgggactggaagcaacactagatacgccagaacttaagatttctattgagaagtttgacgacatcgcttttgaagtcggtagtaaaccaatccaactcatccagaccaagcaccataaaaatagaacaggcaacctgactgatagtagtgctgacctttggaaaacacttctaatctgggcgaagcaaatcactactggtgatggaaatactttcaggaaccgctatttgctaattactacgggtaaagcgcctgctaattcagcgtcctctctacttcgcaccagtaatcgtaacgaggttgaggccgatactttgctgctaaaagtggcacgcacttcaactaaccaagccctcaaagaggcatttagtgcctatcaagcactgcctgaagtagtgcggcttaatctacttcgatcgttatacgttcttgacaattcgccctctattaccgacgtacgtgaagatatccatcgtcagttacatcgagcggttggaagagaacaaattgaaatcttcgctgagcgtcttgaaggatggtggtttgatcaggtgatacgcatgctcagcggtttatctccggaaagtatctccgtgctctcgattgaagcccgaatcgatgaactcagggaggattttaggcgggcctcgctaccagtagattaccgagcattttccccaccgcaggacgtaatagcccaactcgacagtcgaccttttgttcaccaattgcgtaagataaaaataggcgaatcacgcattgaatttgcaattcgcgattattatagagcttcagagcaacgttcgaggtgggctagggaggaattactggttgggggtgagcttaactcttttgaacaggaattaattgaagcctggcaaccccggtttgctgctcaggcggatgaactcaaccccgagagcgatgagtcagaaaaaataaagactggaaaaaccttgtttgcctgggttgagcaagaagcttgtttttccctgcggagtgtgcgcgatcgttttctaactcatggcagctatcatattctagcaaatcgctatgccgtgggttggcacccagattacatgcaggataagtgtgatgaacaacaggaaaatgactga

SEQ ID NO: 133587 - DNA, 1890 bp, Enterobacter cloacae
atgaaatccgaaacactaaccgtccaacaaattttccaggatcgccgacaatactgcgttcccttctatcaacgtgcctacgtatggacacaacgaaaccagtgggccgccttgttggaagatatcaccgataaggcccaggtccggctcttgggggcaacaccaaccccccatttccttggtgcagtagtgctggagccgcaactcaaaaacggtttgatgggtgtggatactctgcatattatcgatggccagcagcgtctgaccacgcttcaatatattctggcgtccatccgactggcactgcgtgcaactgacgtttctgacttagaggcgctagtgttgtcttgcttgcaaaacacaaacgaagcaacaatgcgaaataaagaggtcgaacgcttcaagctgtggccaacatttcgcgatcaagctcactttattcaaagtcttaacgttactcatgtcgatgaactccgcaaagtattctctgatagcttcacgttgcatgggacgctgcgtaagtattttagccatcctccgtcactagaggcgctgtggttttttagtcgcgcttttattaagtggattcgcgcggaaggctactccccacaagaaaatgccatagcgctgattgaggctgttctgacagacctaaaactggtcagtatatctcttgaggctgaggacgacgctcaagtcatttttgaaacgttaaatggtcgtggtgctgaacttcatgcaactgatctcattcgtaactatatttttatgcgcgctgaacatgatgatattgatgccgctgcgttatatgagaataagtggaaaccctttgaagacgcatactggtctgaaaaacaacgccgtggtcgtatcaacaaacctcgcatggagtggttaatccacgcaacgctacaagcagaaaagcaaggcgaaatagacctgtctcgactttacaatgagtaccgggattatgtaagcaaggatctgccttcacaccgggccgatcagcaggtagaactcctcaatagatatgctttgcgatataaagagttgatctgtggtttgggggggacacctatcgctcgcttgggacgacgcatcgcagcctatgacgtgacgacgctttatcccctagcattactcatttcagttgctaacatctctgatgacgaaaaaacagccatgtacaacgaccttgtctcgtatgttgttcgaagagcggtatgtggtctgacacccaagaactacaacaacgtatttatgaatgtcttgcgccacttggctaaaacggacatttccagcaaagagttacgcaacacacttaaaagcttgaatggtgaagcctcccgttggccggaggactcagaatttctcaatgcttgcatcactgcaccactatatactggcaggctcgatgcgcagaagatgcgctcaatgctgacagagattgagggagaacttcgtcgctcagtgaagactgaagagccagtttccccagacctatccagtctcgatatcgatcatttaatgcctcgaaactggtatgcccattggccacttgaaaacgggcataccgtgacagattccgacgctatggctgtgaatcaagttgttcttactggtgccgagttaacccccgaacagcaacttgtcagaaagcggcaacaagccatctcgacgcttggaaatctgactttgctcaacctcagcttgaaccgttcgctccaacattctgcgtttctgaagaaacggaatggcctcattgcccatacaagtttgcgtttgaacgtgccaatgatagctaaggataaatgggatgaggatgagatcctcgcccgaggtgagttgttggggaatgctgcactgaaagtgtggtcgaaaggtgattaa

SEQ ID NO: 133588 - DNA, 699 bp, Enterobacter cloacae
atggaatctcaatattcacttaccaacgaagaaatcgatgacctggtagaaatagcctccagaaggtatagatcgcctattagcctcgatattttcaacccactgcttaacatggtctacagcacattagggcagcataaccgaatactaggtattcgtactgacacgaggttagctctgtctcatgtaccgggtgagcccgatctaccaatatgcttccagcgcgatgatgcgcaggcaattacccgctgcttcgagtcactgaaaagccagctacgggcagatcataaccggtccagaagaccgggagatccgacattaccatcttatggatggtgcagggaacgtgatacaagcgtacacccgcattatcaccttgtgttgttgttcaatgccgatgtctatgggtatttggggaattaccaggaccccgatgctgacaatatggctacccgaatacagaaagcttggtgcagtgctctagggcttgattaccctgattacgcaacattagctgaattcccaccaaatgctgtttacagatttagtagatttgatgcactggatcgtaatccagtctactgggatttcctgattcgactggcgtatttggccaaaaccagaactaaggatgtccacagcggttaccgcaactttggcacaagccaatgtctacgcttaagcggattagcctgttaa

SEQ ID NO: 133589 - DNA, 1515 bp, Enterobacter cloacae
atgtctaaaaaaaacagctcaacgcaaaataaagaacttggactaaaattccagacacttcccacttttgcacaacaattaataacttatatacattataaaacaggagctgccgctgagcttattttaatagtgttacttggggtaatggcacttgcctgccaggacaaatttgatgtccagctaaaaaatgggagaacatttacatccctttacctcatgtttttggcacgctcaggtagcaggaaatcaacggtattcaggctattgatggaggaaatctatcaactcgaaaaagaactaaagaatgatttcctgacaaaggaaaaaatttatgaactgaaaaaaatatcctgggatacagaattaaaagaacttaaaaaaaaatttagcaaagctattcgtcagaaagctgatgtagctgaaacacgtgaagcactggaggaacatcagaaaaatgagccagttgtaccagtaagaaaatatcttactaaaaacgattcgacaagtgagggacttaaaaaaacattagcactaggatctccatctttactgctcgcctctgatgaagccggagggttattcgatggtaatctttttcgtaatacaccggtacttaactctctttggggggaagggagaattgcagacagcagggcttctcgtgacagttacgatgttgatgatgcacggctaacgatgctgctgctgatgcaacctagtttgtttgaggactttctagataaacagggaaaaaaggcaaaaagttctgggtggctagctcgtttattgcctattgacatggagcaaatccctgaactttgcgatatccctaatgcctgttcatggtctagtgagtcaggacttgaaggatttttctctactctcactaagcatttgcaagatgggataaagcgcagagagaaaaatgaagaacgtatctgtgttactttttctccggaggcacaattcgcctggaattcacaaagtggagaaattcaggaaaaaataaaaaaaggaggcgaactacaccattatgatgattttggtgctcgatttatggagcatgcttcaagaattgcagctgtaatgcaaatgtttattacacccgactcaccaataattactaaggagactttggtatcagcgtttaaaataactgaatggtttattaatcatttgatgatgaaaatagattccaccagaaaatatagtgattctgaaatattgtttttttggcttgaggaacatgttattagtaataaatctttcgacttcaggaggcatagcattcgtagagatggtccaaattctcttaggaacatagagcgcctgatctctgctttaaataagcttgaaagtgatggaaaggttcagttattcaaggagggtggtgttgattacgtgaaatttattggttcagaaatgaagcctgaagatttggctaaggcattaaacataccattaatttcatctggatctgttggttttaataaactaccacgacatgaataa

SEQ ID NO: 133590 - DNA, 138 bp, Enterobacter cloacae
atgatccaacttttcctaagaaaagaaagcttggaacacaatctgttggatggcttgaatcagaaattgatgagtggttgctacatcgtagtctcattaattaattctaaagaggagttagataggatgtatgtctaa

SEQ ID NO: 133591 - DNA, 762 bp, Enterobacter cloacae
atgcaggctgagatgactatgatgaaggaaaaggtatggaactctaaaaagtttggtcccgggatattgttatattcgccttcttatttaaaagagcatggatacactgaatctcataagggctttccgagcgaagaggaaagcataaagttagataaccttcttagtcagtactgggttaatttgcaggctcgtcttatttgcgaagaagtcgctgttaatattcctgagtatccctcaatagatgaaatatttaaactacaacttagatatgctcttaagtgctataagttgggtcgattaattatgtcagatagtgaggatgttgcatttgaagcatttaaaaaagcatctgagttatttgataaaagcatggggatggtttggtataagatctctatagataaacaagctaaacttttatctaccaagaatagatcaggaagtaaaggtggggtaaaaaaatctgaaatgtatcgacctattcaggagaaactggtggaacttataaatgatttggctcctaaagagggatggagaagtaaagttgcagcggtgaatgttctcattgaacctttgtggctatttatagaggagtcaaaattgattgttaataagcacgataaaaaataccgaatgccaactaccagtcaggaagccttagccgatactattttaaaatcgtggtctacaaatgttgaaagtgtgaagcaggctttcgaggacactgtaaacagaaaacaaagaactggtcagttgtag

SEQ ID NO: 133592 - DNA, 348 bp, Enterobacter cloacae; identical to SEQ ID NO: 106299

SEQ ID NO: 133593 - DNA, 609 bp, Enterobacter cloacae
atggaaggtatcgcagttgcgcttaaaagcgcggaggacgtgaaagcagtggcggcagagctacgacgcaataccagaacaaacctgttctactgtgcatgggtgatgcagtatgagagcgcattacgtatctctgacctgttaaccctcacctggtcacaattcagtgcagggaaaacgcatatcgaggtgaaacagcagaaatctaaacgaaaggcagatcctaataagaaggtgaaaccgctccgtatcaagattactgacaccatgcggaaaatcgtagagatgcggagagaggaacaatccactatgcctgtgaagacggatttcatctttagcaaaggcgatctccgtagcaaaggcaacgccgtaacccgtaacactgtgttcactgagttcagcaagatcgggcgtagagtgggattctctaacgtagggtgtcataccccacgaaaatcaaaagggcgaattttattcagtgcgggtgtgccgattgaacagatcgcccttctcctgggccatgctgatccacggtcaacgcccttttatattggttacacgctcgaagtaggcgacgaattgacagaggagtttagccttgaaatctaa

SEQ ID NO: 133594 - DNA, 213 bp, Enterobacter cloacae; identical to SEQ ID NO: 106304

SEQ ID NO: 133595 - DNA, 249 bp, Enterobacter cloacae
atggcttcaccggatggacaggatgcacacacccgacacgtcggaacggcgtggcgccatcagagcgacggcatcagccggcgcggtgaaggcgttccggacggcacggccggagaagccgcagcccttgacctttgccatcagaccctagccgtatggcccgaaacccgcaggggttcggcggagcctggcgggtgcgcagcggccgccctggcggagtggggctcgacgaccggacagcagcgctga

SEQ ID NO: 133596 - DNA, 957 bp, Enterobacter cloacae
atgagtgataaaaccattgttggtatagatgtagccaagaacactctggaagtgtttatcgacactaccgggcagttgctacatctggaaaattcagcttcgggagttcatgaattacagaaagcactaagcgggcttactgtagctggagtcgtcatggaagctacaagtcggtatcattgtactgctgaattaatgctaagtgcatcgggtttgccagtcgctgtaattaatcctcgtcagataaaaaactttgccagagccatgggtagggtggcaaagagtgacccaatcgacgcgagaattatctgcgaatatggtcggcgcatgaccccacaattcaggccgataaaaagcgagcagcaacaggatttggccatactgttgatgcgtcggcgtcagctggttcagaaccgtgtaatggaaaccaaccgtctcaaggaactatgtggtgtttatattgagcagggaatcatgcggcatattaaatggcttgacgctgagattgatattctggatgccgagattaagctacggctacgccaggatgatactttggctatgaaacgtaagctgcttgataaggtaaaaggtatagggccaataacacaggccactcttttgatacaacttccggaactcggctcgcttacgcgtcgacaggtttcagcgctggttggggtttgtccttatgacagggacagcggacaactcaggggaaagagggcgatctggggagggaggtcaggtctgcgcgcgactctctttatggctatgctttcagcagtgcgtttcaacccccaaatcagggctttttacactcgattacttgcaaggggaaagcccaaaaaggtggctcttactgcttgtataagaaaatttatcaccatactcaatgcaatgtttcgggatcaaaaagactggatttatgagggcgctaacggtctaaacacttag

SEQ ID NO: 133597 - DNA, 264 bp, Enterobacter cloacae
atgtcagtgattaaacagaaggcagagcagtgcattcataactttctgcgcgcccggaacgtgcctgaatctcagtggccggatctggttaagaagaccggcaggggaatgatactggcaggcgtggccgttgtggttcccggcgttctggctgataacatctccctgccggtgactatcgcgatgcaggtctgttacgcctcactgatcggcctcggggttctcctggcgtttgacgagaaaaaaccaaaggggaggggatga

SEQ ID NO: 133598 - DNA, 270 bp, Enterobacter cloacae
ttgccgatagcccatggggttgactttgcgaccgcggtcgcactcagaaggatggccaccttaaccgtcgcccccctggcgtacctcctcgcctccgaagtgaaagccctgctcttctatatgccggacctgtgccatcacatgctgttctccactttctgtaacacggatgtgcggatcggtgaatcccggacgctgaccccgaaatcctttgatctcgacgggttaagaccctttgtgaaagtaccgggctcagggcatccggcctga

SEQ ID NO: 133599 - DNA, 708 bp, Enterobacter cloacae
atggctgactggtttattgcgactgaaggcgtgaaggtggtgaaggaaggtgccagcctgtggccgcagatcattacggcggtttcgtcgataggtgcagccttgggtggcgtgggtctgactcatcattttacccgtaagcgtgaggaaagaactgcatctgcgaaactagaaagtgaacgcctttatatcagtaccggtctagtttttttgctggagcgatttgcgcagcgttgcttacatgcagcacaggatgaaggtgaacgtgatgatgaggcccgcatcactgcaaactttcagatccccgaactaagttttgcctcagtcgctggggactggcgatccttacctcaagctctcttataccagattcagcaacttgaggttctcagggaagagggcgtttcggcagtgagctctgcttttattgaaagctccccctatgacgacgatggtattgttgagctgaacaatcaggccagccgcctgggaataagagctatccacctgtcccgccagctcagaatactgaactcaatgcctgatgatcggcttgaagaatattcctggtcattatggccaaagttgtgtattgccagggggagcgctcttgaacgggttatcagatacgcgcatcaccgcgtaataatgcccgttatccaggtaaaaacgacttcctcctctgctcagaaaggtaactcaccatga

SEQ ID NO: 133600 - DNA, 330 bp, Enterobacter cloacae
atgccgagtaatacagatgagaatgaaactaactacggtttgtccggtttatggaatgatctgtcggaccataagtgtatctggtatcaccgaacaatcagctatggatacgaagtggttcatgtactcgataaagatggatgggagatcgcactcttgaataatgccacccgtcgctggggaatcagaacatgctccccgctaagatggtatccgctgccagacgatgccattccatacgagttccagggggatgaggaattagacagtgcccttctggattcaatcgacacgactatcgaaggtggtttcagggagatatctgactga

SEQ ID NO: 133601 - DNA, 495 bp, Enterobacter cloacae
atgttctccgccattcttcatgcatctgattatcgcaatgtacgattttcccctgccgtcatcatttccagactgataataagcagacatacagccacgctgttaaattaccggatgaccgttccggtcagatccgattttctggtttatttaaactttccggaagtgtaccacgtacgcggaataaccacaccgcacttttccggtggtgaggggacggtcacggggcaggggataaacacaacatatagaagaaaccgcagattaaatagtggcatatcttgtgttccggtgccgctgcgcgccggtggggttcacggagatccggaacttgcttttttcggatctaaggaggagagaagaaggatttgtgctgataacgcaatactaatgataaatattgaacataatcgcactattgcttacttggtaacaataattaaaaatatttgcattatcttcagtaaaagaacgaggctcttatttcccatgtaa

SEQ ID NO: 133602 - DNA, 996 bp, Enterobacter cloacae
atggcgaccacagtaatagctgcctttaacgaatttatgaaagatatcgtgaatctcaaaaaggcagataccgatgacgcgcgtgcaagtcgcgactggcttatcggtaagatgaatgattttgagaaggacgataaatttccggtgagttatccagcgatccatattgcctttggatcctttgccagaagaaccaaaatccgtcctctggacgatatcgatctgatgttcggcttatccgcgcagagtgccacctataacgttctgagtgaccggatcactctgacctcttccggcgaggggtcgcgcctgcacggatatcggcattccggagctgacactatctgctccgtcagaattctgaatgcctttaaaaaccgcctgcaggacattgcccagtacgcgcaggctgatatcaggcgtaaccaggaagccgtcacgctgaaactggtcagcaaggactggaattttgatatcgtaccctgctttattaccagcgaagatgcctttggacggacttactatctgatccccgacggcaaaggccactggaagtttaccgacccccgcaaagacagggacagagtcacaactgtcaatgtgcagaatgacggcaatgtgctgaatgtcatcagagcagtcaagtactggcagcggcgaccgacgatgccctccatgagttcctacctgctggagacgctgattctggactattacgccggcagggcagcctgctcatcgtttgtcgatatggagttggaagcgcttttccgccatctcggtctgtacgtacagttctccgtcaacgatcccaaaggcatacagggagatatcaactctctttcagccgaggcgcgtaaggcgatttctgacagatgttatctcgatgcgcagaaggtatcggaggcgagatggtttgaggagaacaatgagtatgaaaaatccatcaataaatggcgcgatgtgttcgggccgttctttcctgtttacgggtga

SEQ ID NO: 133603 - DNA, 126 bp, Enterobacter cloacae
atggaggtgatcgagccggacgcgattcccgcattagctgagctgcacgtactgaacggggataacttacgcgtagacaggctgccgttcttctcaaagaagcggcagccgtggctaaagcattag

SEQ ID NO: 133604 - DNA, 1809 bp, Enterobacter cloacae
atgacctccgcttttgttaacgaagaagcagtattaaggatcggtgaggttcgtgaagtgtcgggcagaacactcagtgtgcttgtcgataaaaataaaaatctgagtgaccttttctatcacggcaaggtgcttaaaaatgtttcagtgggcagcttcattgaagtcaagaaaggcttcatgactctgattgcaaaggtagaaaccgagaaaattgtcgaggaaaaagcacctgttggtagcggaagcgattcgcttcgcttccgtcgctatcttacggcctcactggcaggctacattgaccggaacgggcgctttactggcggaacacgcgagttgccccttatcggcaatgaagtttttctgatgtctgaggaacaacttcatcttatccactcgatcgcaccgaagggcgaggccgggctgaatttttctcgcacagatctcgaagatattgatatcacactcccgataaacggccttcttaactcacacattgccatcttcggtaatactggcagcggcaagtccaatactctggccgcgctttaccagcatggctatgaggccctgaaaaacctactaggcgaaggattcaggagtcagtcacggtttcttttatttgatttcaatggtgaatatggtgggagaagctgcattacgcgcgacaaggttgtttacaatcttagcacgcatgatgaagagggtgatcgcattccgatgcctgctgagatactgcttgagcatgagattctctctgtcctgacggatgctaccgacaaaacgcagaaaccttttctgaagcgagtgcttgaattcaaaaagcgagtggagtcgaagcagaaccctcagtcctattttcgtgaaattctgaaacggcgggtcaccgaaactctgtttggttgcgaaaagaaaaaaagtgacgacctgattgatttattccgccccgtactgaaggacgaagacctgatagcagatattgactttttttataacaacggcggtgtatggcgaactaagacaggtgtttacttttctaatgaagaaaatacgcatcagtgcaatatgtaccgcagggctcagaattatgaatttcccgacgatataatggaagagttgctggactatatgtatgttcagctaattattgaatatctttcaagccgctcaaatcctgaacatctttctcctgtcatcaaccgaatgagcggactcaaaaaagatattcgtaaaattttcaatacagcatccggcggaaccatctgggcagcaacgaactttgttgtcctgaaccttaatatggtcaatctgaccatgaaaaaaacgcttccacttttgatggccaaatgggcttattcagcaaaaaaaatggataaggcaccgtccactctccatctcatcatagacgaagcacacaatatcctttcgaacacctcgtttagggaatcagaaagctggaaggattatcggctcgaaacgtttgaagagataattaaggagggcagaaaatttggcgtctttgtgacgatatccagtcagcgaccaaacgatatctccccgactatcatttctcaggcacataactatttcattcaccggttgataaatcagaacgatctgtatgctattgaaaaatccgtttcctacatagaccgcatgactgaagaatctattccaacgcttgcaaccggcacctgcatattcagtggcgtgatctgccctatgccacttaagcttcgtataaacgagctgtctttccgcaaaaagccgcacagccatacgcttaattttgaagacctaatgctttag

SEQ ID NO: 133605 - DNA, 1047 bp, Enterobacter cloacae
gtggcgacttatcgggcttactacggtcaggacagagatcgtgaatattttgaacgcatatttcagtcagcaaacatcaattttatcattggctcaggagcatcactgcctgcaatcagcgtgctaggtgatattgaaagcgaacttgaggctctgatacgcgccggaaaggatgatgaatacttcagtaagtctgagtcttttttggacaatgtatggaaggcaaacaatgtcctccttaagcgaagcaggcccgcagaggtagtccttcctgctttaattgatgatgtcgtatcgacacaaaacaattacgcgaagttcatgcgtgcattagaaatgcttctaacgaggcggcgcactggattgctaccacggcgcatcaacctctttacgactaactatgatttattcattgaggatgcggcggttaaaaataacaacgtcattctgaatgatggtttccgtcaacgcgccgatatttacaaccggacggtattcgatgccaaatgtttttatcagaccatacacgcaaccgggaacctttataattacagcgtggaactacctacggtgaatctcatcaagttgcatggatccctttcctggcatagctataataaggaaatctactattccattaaggatatgaagccagttgcgttcaatacaccaaaggagaagcaggactgggttatgtctcatcaactggttctgccgcgcaaggataaatttcgtgaaaccttacttgaaaacgtgtattacgacctgctacggacttactcaaatgagctggataaagaaggctctttgcttatagttttcgggttttcttttgcggatgagcatattgaaacccttaccaaaaaagcgctgcgaaacgccacgctcaagattgtaatattcgcctacaacgtggcggcgaaagacctatttcttgataaattccgtgattattccaacgttgacgtagtttttacgcctggagttccgttggacttcaaaaagatgaatgaaattataaccagctttctgggaggcatgaaatga

SEQ ID NO: 133606 - DNA, 1257 bp, Enterobacter cloacae
atgtataacaaaatggcctcacttaagagacttttacagctaccgcgcgggtggcaaacctgccgacagattactggtactgatggaataaccctccatctccgcgccacacgtaaaacggcatcatgtcctgagtgcctcacgcacagtcattctgttcatagttgccggcggaggcgagtacagcatcttccatgctcaggccaggccctctggttagtcttcgccatccggcactggtactgtcgtaacccttcctgttcacgtaaaatttttgctgaatcgcttgctccctttgcaggcccgcagcagcagtcttctgcattgctgaaaaatctgcagcatcagctggggcttatcgcaggtggtgaagcagggagacgagctgcagtagcttcaggaatacagatcagcgcggatactttactgcgcagagtggttcaagctccggaacaaacagagaaccggaccaggcatgttggtaatgacgagtgggcatggcatcggggccacaggtacggcacactgatcgtaaatcttgatacccatcgccccctggtgttactgccaggccgggagcaacgcactctggcggcatggttcaaaaaatacccagaaatacaggtcgtctcacgcgatcgtggggggatctatgcgttagctgctcgcgatggtgcaccgcaggcaatacaggtggccgatcgctggcatctgctgaagaatattggtgatgcgctggagcgcatgatgtacagacacatgccattgatacgactggtggccaccgagttatcccccaaaaaacagaatgctgaagcgtctttggtgccaacgtcaacgttacgtcgccctgaacgtattaaacgagagcgacgtgacaaacggtatcagcgctgggctgaggtagactctcttcataaaaagggttgtgggataagagaaatatcgcgtatcaccggactgtcccgggtgacggttcgccggtggatacagtcaaaagcgttccctgaaatatcaactaagccacccagacccgggttacttgaaccatggcaggaatggctggaagaacaacggataaacggtaaccataatgccgggcagctatggcgggagatggtaaatgctggcttcaccgggagcgaaacgacggtcagggatgctgtggctaagtggcgtaagcaggttaacagtcccgttatcgccccagttcgactcccctcagcatccagagtaagccgctggttaatgccctga

SEQ ID NO: 133607 - DNA, 405 bp, Enterobacter cloacae
atgaattacatcgtggctcagttgttaggggccggcgctgctgcactgtgcctgaaggctgtctttggccactccctgctggccggggtgacccgggtccatatgggggtatcactgtacaatgcctttttcatcgaaggtgtcatgacttttattctgattatgagcatcctcacgaccagaaaccccgcgattatcagcattgctgtttttcttgatgcttttattggcgggccgctgacgggggcaagcatgaacccggcccgtagcttcgggccggcattggccatgggatactgggataatcagtggctgtactgggccgctccgctgtctggcgggcttgcagctgttgcgtgctgccagctgtttatgccgcaactgaagtcaccctcaccggaataa

SEQ ID NO: 133608 - DNA, 498 bp, Enterobacter cloacae
atggcagagatcatcattagaaaaatgcacgaagaggactggtgtgcagtcagggaaatttatcaggaaggaattgcaacagggaacgccacctttcagaccgcagcacctgagtggctggaatggaatgaagggcatcttcaggactgccgctacgtcgccactgttgataacagagtggtgggatgggctgcgctatctcctttttcccgccggcatgcataccgcggtgtcgcagagctgagcatttatgtcagtactcattttcagggaaaaggcgcgggcagggctttgctctccgggctgataaagggctcggaaagtgcgggtttctggacgctacttgctggcatctttccggaaaaccaggccagtgttgctttacatcgcagccagggattcagggaagtcggctgccgggaaaaagtgggtgaaatgaacggaaaatggagagatgttctcattctggaaaggcgtagccggacagtgggttgctga

SEQ ID NO: 133609 - DNA, 327 bp, Enterobacter cloacae
atggagctgaaaatcgccgcgatggtgctgaaagaacttggccacaccactcgtctcgatatttacaaaacactcgttaaggccggacgtcagggactgcccgtgggggaactgcagcaacatctcgccattccggcctcgaccctgagtcatcatctttcatcgctgatatccgtctcactggttcgccaggaaaggcaggggagaacactgttctgccacgcctgttatgacaaccttgctgcattgattgcctttctgacagaagagtgctgtgcagacgaatatgccccgcctggttttatgtcaccaccggagaaaaaatga

SEQ ID NO: 133610 - DNA, 546 bp, Enterobacter cloacae
atgagtgatgtaacggcattcaacaactgcatgagcgtgttctggcaacagcatgaagcagagctctcccgttttctggcatcaaggacaggcgatcgggagcaggcagccgatctgcttcaggaagtcttcctgcgcgcccgggcctgtgcagaccgcttctgtgaaatggagaacccgcgggcctggctgtaccggacggcgaggaatctgctgacggatgagtaccgtgccgccagagacgtcgtggtgctggaagacgagatcccgctgcctgacgccttccatgaggcggtttcaacgctggagatttgcctgcctgaaaccctgcaggccttacctgacgaggaaagatggctgatagaagaggccgatctgaaccggcgtccccagcagcgcctggccgacgagctggggatcacgctgacggcgtttaagtcgcgcctgcttcgcgcccggaaacatctgaagaagacgatgacggaactctgccaggtggaagtggatgatgcgtcttccgtctgctgccataaaaaaatggattaa

SEQ ID NO: 133611 - DNA, 1758 bp, Enterobacter cloacae
atgacgatgccatttttacagaatatccccccgtttatcttcttcaccggcaaaggcggcgtggggaaaacctctctggcctgcgcgacggcggtatggctggctgaccagggccggagaacgcttctggtcagtaccgatccggcctccaatgtcggtcaggtcttcagccagactgtgggccaccggatcactggtatccgcaccgtggaaaaccttgcggcaatggaagttgacccgatggcggccgcgcaggcttaccgcgatcgcgtgctcgatcctgttcgtgaactgatgcctgccgatgtcatcagcaacattgaagaacagctttccggttcatgtaccacggagatcgcggcgtttgatgaatttaccgcgctgctgaccagtcatgaactgcgcgaaaaatatgatcatatcgtctttgatactgcaccaaccggacacaccatccgtatgcttgagctgccgggcgcctggagcgggtacctcgatgcacatcctgatgctgcggcgaacctcggccctctggtggggctggagaaacaacaggaccagtacgctgacgcagtgaaagccctctctgatacggcactcacgcgactggttctggttgcccgcgcacaggcgtcgaccctgaaagaggtctcccatacccacgaggagctgtcggctatcggtctgcagcatcagcaccttgccatcaatggcgtgctgcctccctttgccggtgaacaggatccgctggcgcacagtattctggcgcgggaggaacgggccttacgggccatgcctgaaaacctcgcgcatcttccccggtcgatgctgtatctgaagccttttaatctggttggtctggaagccctgagggcgctgtttacagagagcacacttgttctgccggatccgggagccacgctcacgacggtcgatttaccggagcttgcctccctggtggaggacctcagccgagcgggaaaagggctggtcatgacgatgggaaaagggggcgtggggaaaaccacggtggcggctgcggtcgcggtctcgctggccagacgcggtcataaagtccacctgaccacctccgatccggcagcccacctgtcttacaccctggatggctcgctgccaggccttcaggtcagccgtatcgatccaaaagcagagactgagcgctatcgtcgctttgtgctggaaaatcagggaaaaggtctggatgaagagggactggcggtactggaggaagatctccgttccccctgcaccgaagagattgccgtgtttcaggcattctcccggatcatcaaagaggccaacgaccattttgtcattatggacactgcgcccaccgggcatacgctgctgttgctggatgcaaccggggcctatcaccgggaaatggtgcgccagatggggcaggctcacgatcacgtgataacgccaatgatgcagctgcaggatccggagaagaccagagtcattatcgtgacgcttgccgaaaccacgccggtactggaagcggccgggctgcagcaggacttacgccgggccgggattgaaccctgggcgtgggtcatcaataacagcctcgcggccgcgaagccgtcctccccgttcctggtcacccgtgcccgtcgcgaactgccgctgatcgacgacgttgccgggcattatgcacagcgcattgccctgacgccactgctgaaggacgacccggtaggcgtggacctgctggctgaaatggcgggctga

SEQ ID NO: 133612 - DNA, 537 bp, Enterobacter cloacae
atgcacattatcaatgctgaagagcagcacattcccgccatacggcgcatttacgcccatcatgtcctgcacggcacaggcagcttcgagacggaacccccggacacgcaggaaatgcttgcccgggtgaaaaatgttcagtcacgtggatttccctggtatatcgccctgcagggggagacggtcatcggctactgttacctctcccgctaccgcgaacgccatgcctaccggtttacggttgaaaattcggtgtacatcgatccggcttatcagcggcaggggggcggaaaagccttactcgatcatgccttaacatgggcccggtctcagggataccgccagatgatagcggttgtgggggacagtgcgaacgtcgcgtctgtagcgctgcatcttcgcgccggatttactgaaatcggcacgctgaaggacatcggtttcaagcatggccgctggctggacacggtgttgctgcagcgtcagctgggaaaagggagctgtacgctgccggacagtccggtacccggacgctga

SEQ ID NO: 133613 - DNA, 231 bp, Enterobacter cloacae
atgagaaccgtatccatttttaaaaacggcaataaccgcgccattcgtctgccccgcgatctggattttgagggggtgagcgagctggagatcgtccgggaaggggacagcattattttgcgtcccgtccggccgacctggggctcgttcgcacaactcgagaaggcaaaccctgactttatggcggagcgcgaggacgttgtcagcgacgaaggacgatttaacctgtga

SEQ ID NO: 133614 - DNA, 417 bp, Enterobacter cloacae
gtgaacaaaatgtatatgctcgacaccaacatctgctcgttcatcatgcgcgagcagcctgaagcggtgctgaagcgcctggagcaggcggtgctgcgtggccatcgaatcgtggtctcggccatcacttattctgaaatgcgcttcggggccaccggcccgaaggcctcgccgcgccacgtccagctggtcgatgcgttctgcgcccgcctcgatgccatcctgccctgggatcgcgatgcggtggacgccaccacggagattaaggtggcactgcgcctcgccgggacgccgatcggcccgaacgacacggcgattgccgggcatgccatcgccgccggcgcggtactggtgacgaataatgtgagagagtttgagcgggtgccgggtcttgtgctggaagactgggtaagataa

SEQ ID NO: 133615 - DNA, 1023 bp, Enterobacter cloacae
atggataagagagtgatatttgcggttgccggctcaggcaagaccacgctgctgatacgacggttgagtgaggaccggaggacgctgctcctgaccttcacagtgaataatgaagcgcatctgcgggcgcagattatcagacgttttggctttatcccggacgggatcagggtgatgacctggtttgagtttctgcacggtttttgcttccggcctttcctgcaggagcagctggcatcgcgtggcctgagcttcgaccagcccccacccagaataccgcgcacgaatgcccggcattatcaggatcccgccggacggctgtatcaccggcggctcgcacacttgctgacagcccgggggctgctgccggatatccgtacccggcttgcccgttactacgatgaactgcttgtcgatgaagtccaggactttgccggacatgactttaattttctgctggagctctgccgcgcggaaatcactgtgctctgttgcggcgatttttatcaacatacctttgatacaagccatgacggcaacgttaattcaacgctgcacgatgacattaagcgatatgaggcacgcttcgatgcagcaggtttcacggttgaccgggacacgctcaaccgaacatggcgctgttcagccacagtgtgtgaattcatcaccggtcaactgaacatccgtattgcagctcacggaacacatgccacccttattgaaacgatcgcagatgcagagcgcacagccaccctgcacgctgataatacggtgattaagctcttctatcgtgaacatcaccgttacggctgctactcgctgaactggggcgtcagtaaagggctcgaccactttcaggatgtctgcattgtgatgggacccacacactggaagcttctcacccgccaggaactggcagcccttccaccggcgtcccgtaacaggctgtacgtggcatgctcacgggcgcgcggcaacatttattttgtctcagaaactcatctgcgccgattcagggtctga

SEQ ID NO: 133616 - DNA, 1320 bp, Enterobacter cloacae
atgaagggtcttaagttagtggttattggagcgggttcaagctacacacctgaactgatggaaggcattatcaagcgtcaaaatgaatttccgatccgcgagttatggctggttgatattgaggatggccgtgaaaaaatggcgatcattgcgggcctcacccgacggatgttggaaaaaaatgggctggatataccggtttatgaaacccttgaccgcacagaagcactgcccggtgccgattttgtttgttctcagttcagggccggctgcctggaagcacggatcagcgacgaaaggatatcgctgaaatacgacatgatcggtcaggaaaccaatgggctgggtgggtttgccaatgcatgccgcactatcccgattgcattggctatagcgaaagaaatggaacaactgtgcccggatgcctggttgctgaactttaccaacccgtcgggaatggtcactgaagcgatactgaaatatagcaaagtcaaaaccgtagggctgtgcaatgtgcctgttatcatgcaaaaaggtattgccagtgctttaggtgtcagtgacatcaatgaatttatcatgcaggtcgcgggacttaatcacttcatttttgcgcgccatatttttcatgaaggtaaggataagctgcctcaggttattgagctgatttcagaggggaatgatccgttggtgcctaaaaatattcctcctttcaaatggccggatcggttgttggcgaatatgggaatgataccttgcccctacctgcgttattactacatgagcgacgacatgtaccgtcaggagcttggcgaagcacaaggggaagggactcgtggtgagatcgtaaaggagctcgaaagagaactattcgaaatttatcgaaacccggaactcgccgagaaaccgaaagcgctggaaggtcggggagggcagtactattcggatgcggcatgtgaattgatgagcgcaatatataacgacaaacgcatcatcatgcatgtcaatacgcgaaacgatggtgcgattgcgggcctgccggatgactgtgcggttgaggtcagttcaatgatcacccgttcaggacctatgccactgaatgtcgaacctttcccggaagatgtacttcgtctgattcaactgatgaaaagctttgagcaattgaccattgaggcagccatcagtggtaatcggtatacggcatggcgcgccttggttattaatcccctggtcaaaagcggtcaactgcttgaaaatgcattggatgaagtgatcgaacataacaaagcgttgatgccggccttccaacgcaataaataa

SEQ ID NO: 133617 - DNA, 522 bp, Enterobacter cloacae
atgaaaaagtactccctcgttttgaaagagttatcttcacttgtggataaaatcgatgagaaagaatttagcacacttgttgattctattattactgccggtcatgtatttcttgccggtgctggacgttcagggcaaatgataaacgcttttgctaaccggctgatgcatcttggcctgtccgtcagtgtggtcggggaaatcagcgctccacattcccgcaaaaacgacctgatgatcgttggttcaggctccggagagacccaacgcctgatcaatcaggtgaaaattgcaaagaataatggcgtttatattgcgctcatcactacctcaccagattcaactctggcgaccctggcggattacgtgctcactatcccggcagtccatagcgttcaaccgatggcctctctcttcgaacaggcttccctgctgacctatgacagtatggttctggcattaatggccaatcttaatgaaacgaatgagacaatgaaggaacggcacgccgatattgagtga

SEQ ID NO: 133618 - DNA, 459 bp, Enterobacter cloacae
atgaaacttgagattctggtaaacgacgtcgagggtacgatcgctgactggcatgctgcaattgagtttgcaggccagaagctgctggaaaaaggctatatcacgcccgtctatatacaggcctgcctggagcgtgagaagacttatccaaccggtttattgatggcgaacggtcagggcattgccattccacatgcggactatacgctggtaaaaaccaacagcataagcattgtacgttttgataaagaggtcgtgtttggtcagatggaagatgctgacctcacagtggaatgcagcattatgtttaatctcgcattcgccacaagcgatcagcatatgtctgtgctgcgtcgactctttacgctcttccaggatatttcgttcatcgagtcgtgccgtaaccttaaaacgcacgaagtcgggaaatatgttgaagaaatgcttgccgcatcctga

SEQ ID NO: 133619 - DNA, 294 bp, Enterobacter cloacae
atgaaaaagattttagttgtatgcggaaacggtattgcctcctcttccattatggtttctgtcctgcaggactatctgaaagaacagaatatcgaagcgcaggtagataaatcctctttgatggcctgtaccacggacacgtttaacagctatgacctgatcgtttcttcaaccaggctggataacccgggcattaccacgcgtgtgattgtgggagcaggcctgttaacgggtctgggcgaagatgaaatctttgatgctgttaaagaagaaatgcttagccaggtgaaatga

SEQ ID NO: 133620 - DNA, 1371 bp, Enterobacter cloacae
atggaactgatcacacagtttatcaatgacctgggtaattttatttttataccggtcatcttccttattctgatgaaacttctgggtcgccccctgtcagagtgtatatcatcagccattaaagtcggcatcggctttattgcattaaccatgaccatcaagctgatgcttgaaaaaatgcagccagcggtgacgggacttgctgaggctaccggttcctcactgagcgccattgacgttggtggcgcagccaccgccgtaatgggttttggctcaaacatgggggcgataattattcctctgtgcgttgccgtgaatattgccatgttggtggcccgtctaacggactgtgtaaacgttgacgtgtttaatcttcatcagaatgcctctatgggagcgatcgttggggtttattccggcagcttcctttatggtgttcttacggctgcattgttccatgtctgggcacttattgcggctgacctgggtgccaaaaacaacgaaaaattcttcaacctgccaaaaggcgttgccatctcccatccggttgcaaatacctatttgcttttcgcttatccgtttaactggatttacgatcgcatacctgggttccgtaatctgaacgttacagcggaaagcattcagaaacgctttggtatcctgggcgatccgaccatggttggtttcattattggtattcttcttggcttctgtggttatggttgggaatctccgtatcacaccattatcgccagcctgcagctgggtatgtaccttgccgcagtgatgctcctgctgccacgcatgacctcaatcatgatggaaggtctggttccgttgtccaacgtggcgcgtaagaaactggttaaacgtttcccggatcgtgagatcactgtcgggatggataccgcgttgattgttggtcatccttcagttattgcgcctgcactgctgctgatcccggtcattgttatcctcgccgttgttcttcctggcaaccgcgtgatgccgctgggggacctctcgcagttcgtattctttattgcctgcatggtgcctgtttttaatggcaacattattcgaacctgggtgacctccatcatcctgtttggcagcggcttatacatcgcttcctggatggctccggcaacgaatgaagtgttccagaaattcggcacaaatcctgatgccagcgtgatgtactcatcgcttaacccgtcagctaacccgttcaccggcctttttgctggcctcagccatgttggtatcgcaggctatgctctcgccgctgtgttgctgttgtccgtaggctacttactcaaacagaaagcgcgccgtcagttgaaaactgaggcagaaaaaacggcttaa

SEQ ID NO: 133621 - DNA, 537 bp, Enterobacter cloacae
atgaaaacgaaaattgcaatcgcatgtgatgatgttggatttgatcgtaaggaggaaattaaaaagtatctcgaagaagagaaaaatgccgaggtcgtgtacgatcccgtgaaacgaaaagaagacggtttcaacaatttcgctcgtcttgcggatgaaatggcaggtgtgattcagcgggatgaatgccgcctcggtatctacatttgcggtaccggaattggctttacatgccagataaataagcactgggggatccgtgctgtcgctgtcaccaatccctactcggccaagcgagcaagactcagtaacaatgcacaggtgattggacttggctgcagagttaatgatcttgaatacacaaaaatgatcgttgatgcctggtatgacaacgcgttcgactttgcaactgcaagggaaaattccaaaaagaatctactggaagcagaacggagtgacaacgcattactgacgaaacctgaagatgttcgatggaatatgggtttcagaccagatgatgagaaatctgagggctaa

SEQ ID NO: 133622 - DNA, 756 bp, Enterobacter cloacae
atgtacctggttgaagaaaggagaaagttgatccttgaagagattatttcggcgggtaccgtctatgttagcgaccttgccaaaaagtatgaggtcacttatgaaaccatccgtaaagatctcacccatcttgaaaaaaaaggtctgctggttaaaagccacggaggggcgacattaaaacagggcgctgtcgagcatcctttccaggtcagggaaaaagaaaacagtactttcaaacaagccatagccagaaaagctctggaatttatcccccccaatagctcaatgatcattggtactgggagttctaactatgaactggccaatttgttgtgcatgaaatctggctttaaaatttttaccgattctttgcccgtggccagcgtgctgatcgagtcagaaaaccaggtctttttgttcggcggagaactgaggaagaaaagctcttctgtctttggtgggtgggctgtgtcaatgattaatgatattaacgttgatctctgcttcatcggcactgatggcttcaacaatatgacaggtccatccactccgtcctcctcggatgcctttctggatcgaacgatcattgcccattccgagaagaaatatattctgggcgattatactaaattccaacgaagtagcttatttaagatctgcgactggtctgagattaccgcgctgataacgaatgatattgctgataaagacggtattgccgaggttgcgaagcatacgacagttgtaacttgttga

SEQ ID NO: 133623 - DNA, 261 bp, Enterobacter cloacae
atggcacgtacgatgacggtggacgtgggtgaagagctgcgcgaatttatcgattctctggttaaagccggtgattaccgtacacagagcgaggtcatgcgcgacgcgctgcggctgctgcgcgaaaagcaggctgaatcccgtcttcaggaactgcgcgatctgctggccgaagggataagcagcggcaaggcgaaaccatggaacaaggatgcattcctgaataatgtcagggccagggtggcaaatgaaagagattga

SEQ ID NO: 133624 - DNA, 768 bp, Enterobacter cloacae
atgcaattcatccataatgatcttggtcaaagaaaaagaggggagattgttgaaatcacccttaccagtggtgcaaatgttagactaatggatagttctaacttcagtagttataagaatggccgacgacattcctacattggtgggttagcaaagcgctcccccataaggttacagatcccttcatcaggccattggcatattgctgtagatatgcagggattaagggggagtaccagggcttctgttcgcgttcttccaggggttcttcctgaaattcaggataggccgttaagcgaagttcctagtctggtaagagataacagaccaccgtcaacagcacagagcaacgagatacatgacgtatttatttcgcatgcctcagaggataaagatgattttgttcgctctctggcaaactcattaatcagtcacggccttaatgtatggtatgacgaaatgacgttaagaattggtgacagcctgagacaaaaaatagacaaaggtttagcaaacagtcgtgttgggttagtagttttgtctccggcgtttataagcaaaggttggacaaattatgaacttgatggaatcgtcactcgtgctatttctggtgagcaaatattgcttcccatatggcataatattacaaaacaagaagttgtcgattttagtccatcattagcagacaaagttgctcgtagtactgcaactcatacaatcgatgaaattgctcatgagatagccgagctactgcattctcgtggttaa

SEQ ID NO: 133625 - DNA, 615 bp, Enterobacter cloacae
gtgaccaagcacaaagttttcatcagttaccaccatgctaatgaccaatggtacaaaaacgaacttgaaaaaatgaatgatgtttttgatatttttgtgaatcgctcggtatcacttggtgacattgatgaagaagaagaacctcaaaagatcagagaaataataagggatgaatatttacgtgatacatccgttcttattttactcgttgggactgagactaaaaatagaaagcatgttgattgggaattatattcatccatgagggatagtcccagaaacggcaaatcaggtatttttattataaatcttccttcaacagggacaaacaacattagagccagtcatggtgaaaatgaaaaaaatgaatttcatcctaatataaccgagtggataacaatcaacgacagaacaacatataaagaaatatatccatatatgcctgaaagagttatcgataacttgatgagtgaaaagtcatatatatcaatagtcaactgggatcagatacacaataacccagaaaaccttagaaaaatgattgagttaacatatcaagataaagataagtgcgaatacgttttttctaccccaatgagaatgcgtaatggctag

SEQ ID NO: 133626 - DNA, 708 bp, Enterobacter cloacae
gtgagaacatttgttataatttggacgatagctttcattgcggtaattgctgtaatgtgtacagtggatctttcatcatatgtaccttcaatttacaccgtatttaataaaaacaaacctttagtaactggtattatatatatactactaatatctatttttatatggctaattgtagcgttatatcttttaaaaaaatactcatttaaagtagagaaattaagtttaggcggcgttaatgttctgttcaatgaaagtggtacgttatatcgcaaaagtataaaaaatcatctggattcaaaaagagctatctttaagttgaagaaaaatgtggacgcattcgatgaagttatctcatcatattatcagacatatcaatttattagagatgaaatgaaactattgaatccaaaaaaagacaatgagttatataatattagcaatgatatgttaatggtgttaaataaatttttaactaaaaatcaaaataattataaaagatggtataaatatatatcagataaggatgaagttattgatgttataactaatacaccattaaaagttcacctgacgcctataaataaaatacaaaagcaatactataactacagtaaaatatgtaacgattttaaagtagtaaatgattttttcacatcacgggttcaacaaacatttaacgtgaacaccaccaaatgggattggtaa

SEQ ID NO: 133627 - DNA, 252 bp, Enterobacter cloacae
atggctgtaatccaaccacgcgggaaagccacgaataaacgttttcagtttacggccccggcagaactaattgacgagtttaaccaaaagaaggagctgctagagcgtacagatctatcaattgatatgacagacgatttcattaaggttattaaggatgctatcaagactatagacaagcgcctggctgaagttaaagaaacaccagaacatactgacagaactggtgtaaacacccagcaacaggcataa

SEQ ID NO: 133628 - DNA, 135 bp, Enterobacter cloacae
atgtcacaaagcgattatagccgcatagcggaacagttgaaaagtggtaaacagactaaactaccagccatgaaggttagcgacttaaaggaaattttatggtggttggattttcttcagggtcgccctttataa

SEQ ID NO: 133629 - DNA, 879 bp, Enterobacter cloacae
atgactagtcagactttcgatccaaaaaccgtcattgtccaagtcggccaggtggtttacacagggctttacggcctgggaaatggtgttgtttccgctatctatggtgagcaaagccctgcaacctcacgggtccattttggcggcgttatggcatccggtggtaaggctgaattcgatattttgtttgagagtgggtcagaaactaagcgcttgccggaatgcattttacggggcgttcaatggcgcatctttgacgaagtgaaaagccacgaggaaattgaacgtatacgcgaagtggttatagctactcagaaaaaggcagcagaggataaagccgaagcagatgcagcatatgctttgaaaaaagtgcaattaaccggcgatccgaaatactgcgggttagaaaaaattggcagtagttcacgatctcatgctgccgtagtggcaaagaacatgcggactgagcttaaggccgcgtatccgggtacaaagttttcagtccgtaaaacaggctatgactcgatatctgttaaatggattgatggcccaactaaagatcaggtacaggatatcatcggtaaatataaaaccggtcattatgatatgtatgcagatattcatgaaagcaacagcacacctttcactgacatttacggcggcgttgactatttacattattcaagagattactctgaagaactcacgcagaaagctattgataatgtcaggaaaaagtatggtcaggaaattgtgccagagagctgcaccgtcgcggcgtatatcagcggtgatctttggaaagttagccgcgactttttctttaatcatggcgtagatggggagatcggcaaggaactaagagaattacagggctaa

SEQ ID NO: 133630 - DNA, 333 bp, Enterobacter cloacae
atggaagtaatgttagccatagtttcattgtttatcctattaataaacataagttccgtagttgattttgtaagggggttcatttctaaggctacaagtaaagctttattcatagcaggctgtagctttatgtcagtttatatcattaccaaagctcttgttgatgagccgaatatcggagaggggaatgttctttcaaacataggggttggtttgcaaagcttcttttcggcaatttatctctatgctggcatagttttccttattggagcattagtgcgtaaggtgcttgaaaaaaaaggtttggttaaaaaagaaaaaagcagagattaa

SEQ ID NO: 133631 - DNA, 495 bp, Enterobacter cloacae
atgaataagaagcgccaaattatttgggaaatagttctgattagtattgctatattctttttcgtgataatgttgccgggactagctatgagcgcgggtacgttcggcaatgcttatctcgatggccttaatgagttatctccttatggaataaaggccggatttgtagccataaccatgataatactatcatatctgatttgttattttcttaaactaaacaatgaatttataaaaaatccatttagggcgacatgcacagggattattattttgccgttagcaaaaggtgctctgaattattttagtgagttcagtaaagatagtcgaacagtcacttcaccttatgacaaagctctgggtaattttaatattttcaatgaagggcttctcaagttcattatgtacgcattgccagtggcgctttgcgtatgctcaataatatacatcttgattaaatttattagtctctttaaggagaggtatttcagatga

SEQ ID NO: 133632 - DNA, 693 bp, Enterobacter cloacae
gtgacatcgctggacacggaatttatacggatcgtcagaaaactggctgcggtccgttcaccaagagaggtgctatcagttttatgcagaattactgctgaccgcatcgatccggctttagcagggcgcactgaggaccgggaaaacgctgaaaaactcacgggtgactattcgccagtagaaaaagaaatgctggaaacgttaatcaggatgttaccgcagatcctacaggacaatccccgtgatttcctgggagaatgcgtaatgagcctggagctgggcaattctgcgatggggcagtatttcacgcccggatcgcttgcaagtctgaagtttgaaatactgaagcaagactatgccagcgaaatacgaaaacacggattcataatcgtccaggaaccggctgttggatcaggggggttgataatcaaaatagcgaatggcctggccgatgcaggatttaacccatcagctgctctatttgtatcctgcgcagataaggacgtgtatgctgctgatatggcttttacccagctatcgcttctgggtatcgctgctgaagtaagcactggagacacgctgcatatggatttccgaaagactcgctatacgctggcgtactggctgaacggatttaatgagcgcctgaaatatcggcgcatctatgaaacgatggccggtgttggcatctaa

SEQ ID NO: 133633 - DNA, 444 bp, Enterobacter cloacae
atgtattacttctatattccaggctcatattccgtgttagagcctgcacaggtggatggcaatcaaagccgtggaacgcattcaggggaaacgcttgaacagctaaagcatcaatacccacagatcgtattgttgcacatggatgactgttttgcggcgatccgtgatgcggcaagaatgcccgttgaagtgatcagcgaaagtacatttgatttgttctaccgctcgaaaattatggatgagtgccattcgaatcagggatgcacgttcaaatgccgcgagtttaatgcagccgatatcgtcacctgttttgcatcagtaatcatctacgataagccgatgttcgccacgttcagagacgttgattcattgactcacgagcaaatcatttcacgcgtccgtgatttcatagaggccacgatgacggtaaattctggcgtttaa

SEQ ID NO: 133634 - DNA, 273 bp, Enterobacter cloacae
atgtcacagccgaaaccacgctacagcaacaccacggaagtggagattcgaccggaaaccctgcgcaatgcagctaactggacaccgccgaccgtcgatgaaatctcggaagtcctgaaccgggcaggcattaaatggggccagttagctgtgatcactggtaataccgaatccattgttgctggctggaaagaaggtaaagaacacatcagttacatggcatggcgctacatctgcgagagcgccggttatggccgtatcgaccgggcttaa

SEQ ID NO: 133635 - DNA, 444 bp, Enterobacter cloacae
atgaatcatgaagactcaataattaacctggcgatggccatcctggaatcgcgtcttaaaaccacgtctttctcattcaccagccccgatgccgttaagcaatatttgcgcctccacctacagaataaagaaagagagttttttggggcgctgtatctgaacaatcagcaccagttaatttcctttgaactcattcattcagggacaattaattcctgcgtaatcagcccccgtgaagtcgccagattagcgttaatgctgaatgcacaggcggtcattttcgcgcataaccacccgtcaggcacaccggaacctagccgcgcagatatcaacatgactgcacggctaaagactgcactggagctttttgaaatcagcacccttgatcactttattgtcgccggaaatgacgtcgtttcgatggctgaacgcggccacatttaa

SEQ ID NO: 133636 - DNA, 369 bp, Enterobacter cloacae
atgaccatccagccttatgtttgcaccgatcctgaaattatcgcgctacgcgaaaaaatggccgcgcttgtgaagacacatgatttaccggtttttgacttcaacgttaaagcggagatccccgcacgtaacgttctgctgaaagcctgcgagagcctggacaaaatcctcaatgaattaatcgccaacacagacataacagccaaaagcgccttttgtgcaaaggtcagctcttatgccaataaaattgactactgcctgtcgtactatcaccgcatgtcccctcccctttccgtggcttacaggcccatgcaatttcgcatcgcctggtatgccgaacagtccaaaaattcggttgttaccgggtaa

SEQ ID NO: 133637 - DNA, 438 bp, Enterobacter cloacae
atgaatactaaaatgctgaataatacagaagaattaacacaagctacggtttctcttttcggaatatttgctccgcacattcctttggccgtatacaactatatggaagaatatgtatttgcatatcgctataaaggatttgcgataaaggaaattgaagatggtcacgaatactttttaccgctgcacattgaaagaatctcgatgatcactccgatggataaacaacttcttgatgttacgcctgacgctctcggtgtgctgctaacgctgcactgctacagccagtgtatcaaaagtgatttaagcgccttgtctgaggaaaacaaattaaatgcgtcaaaccagatagctgttttaaaagaaaaaagagcgtatttattagactatgctatcaaaacttttccccctgagtattttgtaatgctgctaaaatag

SEQ ID NO: 133638 - DNA, 486 bp, Enterobacter cloacae
atgaccaccacaaccctaaacccaccacgtattaccaatctttatttctacgtgccaggacgatattctccgatggatattgtttgcctcgatccaaatagtaacaccccaccgacaagtgatgattactttggtttctacagcaaaaaatctttgtccgatttccagagtgaatacccgaatatcgttatcttaaccggcgaggaaatgtctacaaggatttatgaagctgcgaaaaaacctgttagcgaaatatcgattaatcgctatacagatatgctggaagtgttgccgcctcttcgctgggtgtcctctagtgggaatactacgtttatgctcagtgagcgattcactaacaatatcactgatatatatgcaaaaatccaagtgggtgatgacaaatatcgttacttcacttttcgtgatgaagacacacttacgcatcgtcagattgttgaaaaagtaatgttattcctcaatcgctaa

SEQ ID NO: 133639 - DNA, 333 bp, Enterobacter cloacae; identical to SEQ ID NO: 133630

SEQ ID NO: 133640 - DNA, 495 bp, Enterobacter cloacae; identical to SEQ ID NO: 133631

SEQ ID NO: 133641 - DNA, 693 bp, Enterobacter cloacae; identical to SEQ ID NO: 133632

SEQ ID NO: 133642 - DNA, 444 bp, Enterobacter cloacae; identical to SEQ ID NO: 133633

SEQ ID NO: 133643 - DNA, 273 bp, Enterobacter cloacae; identical to SEQ ID NO: 133634

SEQ ID NO: 133644 - DNA, 444 bp, Enterobacter cloacae; identical to SEQ ID NO: 133635

SEQ ID NO: 133645 - DNA, 369 bp, Enterobacter cloacae; identical to SEQ ID NO: 133636

SEQ ID NO: 133646 - DNA, 306 bp, Enterobacter cloacae
atgattatcgctttaaaatccctgcttaaaaccataaacggatgtaagcgtatgaaaacactatttgaagatatcgtactcaaaaatacgaagcagtttatttttagggttcaggagctaaatgacggttcctatgaggtgatccagcaagcctgccgtgtattccctgataaacgcgtagtggtgcaatctgaaaagaaatggcattacgctgatctgactgcgctgcgcgaaggtgagtatgctaagagccgtcaggggcgtttgttcctggatgaccagttctggattggtaagcttgcctga

SEQ ID NO: 133647 - DNA, 1098 bp, Enterobacter cloacae
atgagcgaagcacttactgttccttcatcaacatctaaaaccattggctttgactatccgtgtgtagttggttttcagggtaatcaacgcattattatcgtgcaggtttctttcggcgcgttgagtcgcttcctgactctcgacaatgaagggcatacgctggatcggtcgcagcgtgaacttaaccgtcgacgtgcgacggcgtttgcagactatgttgtaagtgcagttaagtcgggaaccgattacatcatccctccgctcatcgggaattgtgatggtgagcttacgctgaatcttatgaacgagtcgtttgttggttatgtaactatccctatggatgcccgtattcgcctctttgacggccaacaccgtcaggctggcattcgtgaagttctcgatattctgcccgatattcgccatcacagcgtgacggtaatgctgacggaaaacctgccggttgaaacacgccagcaatttttcgcagatatcaatggtaatgcgtccaaacccagcgcagcgattaacatcgcgtatgaccagacgaacgtaatcggccagatagttaaacgtgccatcatgaataaccctgtgctggctgaaaaagtagactttgagcgtaataccgtttctacgcgaaatggaaacaagtgggtgtcgttcaaatcgttgcatgacgcaacagagcgcttcagtacctacgtagctgatggtgtccctcgtaaacgtactgagcaggaaatcagttccgtctgggatgcgtgggtgaagttcaccggccttaatgatacttgcgggtttacttacggagaatataaccaggagtggctgaccttcacttcagtgatggtgaacgcatttggtttcgctgttaagcagcttcttgaggaaatgaccgtcagtgatctgacagaacgactggaatgtatgggcgataagaaaaacctggccgcacgggagagttatttcgtgtacgcaaactgggctgatagttgtgttagccgcgagacagggaaaattatcgccacaacaaagggccagcgagcagccgctgagtacctagttaaagccatccgttctgttaactataatttctga

SEQ ID NO: 133648 - DNA, 210 bp, Enterobacter cloacae
atgtacgaatacagtgatgtgtatgacgagtgtgaaaacggaggcccggatggagggcctattattttgtcccgaaatcaggtcatcgggatcttgaaacagcacggccacctgacccctcagcagtggatgcattttttccgtgaagccggtctgactctggtaaatgcttatccagctactgcggtatttcagtggctgaactactga

SEQ ID NO: 133649 - DNA, 399 bp, Enterobacter cloacae
atggatgatttacgtgatttttttagtgatgcgctcatcggttcgttcgatgacttcatcaagtcatacccgaaatttggatgggacaatctttctttgcttgacgactggaatgctcagcaaatacggcccttgctcaacttatatcacaagcagaacgggatcgaactagcatgcgaccggcgtatttttgtcgttgcgccgaatccgaaacccactggctatccagttcgtgttacccattattttgagcacctgggcgcgctttgtgatgctgaagctgacagtccagaacaagctattatcgactgcctgaccagttaccctgattgccagcctgcattcggcaagctcgatagctggatgggggatacgatgtttgcaaatagcttccgataa

SEQ ID NO: 133650 - DNA, 300 bp, Enterobacter cloacae
atgaggattctgcgaaggcaggtatttaaggcggccattgaacaatatccggaacaaaaagcagacattgctgctctgcttagttttttgggtcggatcaacatcatgacaccccaggaattacaggatttatttcctgaagcttccctggaggaaaatggactaactcagataggttttgccgggagctttgctggcggtaatttaatattcaaaggtaggtttaattatccgggccagttcgtactgaccgaagagatccagcctgcacaagttaacgagaataagactgatggataa

SEQ ID NO: 133651 - DNA, 417 bp, Enterobacter cloacae
atggataaaaataaaatcaatgaggcagtggaggtactgtcaactgagctaccctggcttgatataatagaagatgacgcttcctatcaggatgcactgaccgcgctctccgagctgagcgccgacaactcaacaccggcatgtttgcttaaactcatatcaagttgcatagctgagtacgaagcacaccgatatccagaggtattgacaggccctgatggaaagatgagtcatggatctgatgcgttgatgacacttatgcgtcaccgcaaaatcaaagggaaagatatggcagacatactggaactaagccctgcgctaatgtcatccatcctatcagggaagcgcgcactaacgatcgctcacatttgtaagttggcagatttcttcggcgtgagtcgctctgtatttatctga

SEQ ID NO: 133652 - DNA, 279 bp, Enterobacter cloacae
atgaaagtggttgctaaatacaagcgtgtcgaaatttcatttcctcatgaaatagtttcattaacatttgattctgtaaaggatgccctagcctatacggaattctacaagcgtgtttcattaatccgtgagcgagctaacatcgactctaaatatccctctgagttatatgattaccttaaagataaaggagtgatcagcaaggagttgtttgaaagtcggcagcgcatgttacgcaaagcacacctgctgagcaccatatcttcgaaatggatgtga

SEQ ID NO: 133653 - DNA, 516 bp, Enterobacter cloacae
atgttgaatgaaacaactcgcgttattaattatagcaaaccccaaaaaacagtcgagaggtataacttcattaccgaagagttactgactattctccacagctcccctaaagcatttgtatatatactaaaattagcttgtagcaatgcctttaatctcagtgaagaggatgcatttcgaatcatagatgatttatctgagagagttccgcaatcagagctggagtcagcgcttgggagcattgataacagcactctgatcgagctgaagaaacgtcctgaaatcagcaccgatgttatacaggtgttggatgaagacggttttcagttggccgcgttgcttgctcgacacacatacggtgatatgagcgaaacttccgatgaccaggcgctgttaaacgatatagcagtaaagactggctcaggaacttatgtgacttcgtataaacagggtgatttccatattagggtatcgacaaatttaccatcatatcaaactatccttgaattacgttga

SEQ ID NO: 133654 - DNA, 123 bp, Enterobacter cloacae
atgaagtttacggaagaagattacggtataaaggtttgcaatatcgtgccgataacgttcaggcagcagtttaagtttagaaccaatccaaagattgtcatccgtgaagcacattataggtaa

SEQ ID NO: 133655 - DNA, 705 bp, Enterobacter cloacae
atgtattcattgttgatcaaagaccgtagctatccgatagcggtatacatgaactacatgacgcgggtaaagggatttacccgcacacaggcggtagacgttctaacaaccgcagctgttaagatggggataagagatagcgcagctgcgcctgctaacaatactgtagccgaatggggtaagagtatcgaggccccgttatggtcagtagtaagcgctatgacgatactggagcagtttggcaaagtacctttcacagatcaggaatgggccttctggtcttatgctgtagttgaaaggggcggtgacaccgttagctatacaggtaagtggcaggagtggattcgaaaagcacaggtgtataaggctcagtatgaaaagcgtggtgatattcgaagaaaattagcgtttgctacttctccacagatggcaatgaaagtaattctggcattcaggggtaatcaacgacgcagtctgagcattgccgaggtattcgctaacattgataactcggctgaaaccgtatcgagagttacgaggaaggtgaattcatcggagtgtttcaacgatgaagatgtgatggaagttgtttctgtaaatgataacgctaagaaactatatgctgaattattgcttacaatacaagaacttgctgaccataaattaatcgattaccgttcaagtggtaatatcactattacataa

SEQ ID NO: 133656 - DNA, 1392 bp, Enterobacter cloacae
atgaaaactccaatgactaacaaactggccgggggccttagcaaactttcacaggcagcttctgcacgtaaggataatgtctcaggaaccattattctggtaaaaccttcagattgctttgaagaagacaacccacgtactgatttcgatgagaacctgattgaatcttatgtggctgattttcttgacccagaaattgggcagaaagaaccaattcaactttatcctgcgaataaagaaggcaagtatcgtgtccaacacggtgcaacacgtctgcgtgcgggattaatagcagagaaagataaccctgcatttaagctcaaagctattgtcgataatagcctgaacaataaagatgagctggaaaactattttgatcgcgccatgaataacatcaaacgcgacaacatgacattacttgatcgcgccaactttatcggcaattacctggataaagccaaacaaagtggtaaaccagtaacgcaagccgaaatcgctaaacgtctggggttcaaaggtggtgcatcgtatgtatctcggcttctcaaattacgtgatatgacgccggaaatgagtgaggtatatcagtcaggaaacatcgacgatattgaagctttagctacccttgccgaaattcagaaagataaacctgagttatttaaaagcctcattgaactgcctgatttggacagagcaacgattcgtaaggcgaagaaaacagggaagataaaggaaacagaaacaggtactcagcaggagactgccgggcacgatacagaaccgaaatccaaaactgagccaagcgctaatactatattatcgcagtcggaagtggatgattcagtggtagcaataccatttgttgactaccttttccagacgggacgcgtcaatatattaattaaaactgcggataatggattccttgccgcacttgaaacagtattcgaacacggtattaatgcagaagttgactttaaagattctgttctttgggctacagaagatgaagcgatcgactttggtaaaaaacagattaaagattgggctgaggtcgtattagctgaaaaggattcccttagcgttgaagaatatcaggatattgttgggtatctaaatacgctgaagaatgtaaacccacaaaacgataattcagaaaaaaataaagatagcggttcccgaaaagcaaaaacaggccagttaacagccgttatctttgttgaagtgaatggcgaagaaggtctgctgcttttaaaagttccgaaagaccatataggagctgatgagagcaacgttcacacaaacggctttgtgtatgttcaaattggttcggaaattcgcgctgtgaaggaaggagagtacgtcatcaaaagcgtatcctatcgggagtga

SEQ ID NO: 133657 - DNA, 861 bp, Enterobacter cloacae
atgacaaagaaaccttccaatttaaagaaaacactcctttctcaggcagtaattaaggccattaagtcattatgtcctgtactttgcacaggtaatggcaaaggtggtgtcggtaaaagtacctgggcattccacattgcagctgctgcggtagaagcagggctgaaacccttactcatcgatatggatgagcatcttacccttacagttaccggctctacgcatcctgaattgccagactatgcgttttcttgtgatatgttcacagatgaagggatcacgaagccaatcatggagcttgagctgcttccggggtgctggttcctgccgcgcgatagccgtttggatgaagttaactcgacaccttttgaatcaggaatagtgctttatcctcattctcatcttgagtctctgcgcgaacagtttgatctgataatcattgatacgccaccaggcaaagggaacttgcagcaggcggctttcctttgtgctgatactgcggcaatgattaccgagttaagcaacgtctctattcacgggctggtaactgccatttcagtaatagaacaattagtggaaacgttaactgatggggaaacagatagcccttataaagtcccagcatttattgttgtccctaataaatataattcacgaagtgatggtgaaaaggcattgctgtctgaattgagaacgaacgaaatcttgctgactaatgaggtgaatgtcagaactccaataaaatttgcgacagataacttggttccaatatggaaaatcaataatgggaacgcaagactggctgcaaaagaaatgagatctgcaatcaaaacaattttagaactggcggtgaaaaaatga

SEQ ID NO: 133658 - DNA, 342 bp, Enterobacter cloacae
gtgactacactatatgttcgcaagcaaggtaaacctaaaggctcaaagccccctgccacgacagcgtctcgtgtgaaaaaatatcgccagaatctcagagataccggtggatgtacagtcaccgtaaatctagattcaaaggagatcgaacaaattgaaatttatagaaaaacctcattgttaccctcttcagtaagccgcagtgaggttattaaaagtatggcgtgtattctgggcggcggagtctactttatacgtggccatgagattagagcttcggtaaacattacagagatcccagagtaccctgcgtggatgaaaaattaccttatgattccctaa

SEQ ID NO: 133659 - DNA, 804 bp, Enterobacter cloacae
atggatatcgcactttttcctggtcagaacaggcgacagtgggctgacacgatgataaatctcgaagctcgtaagcttgttaataccgcaaacaccgttgcggccatgcatatcagtgactcactgacgcgcctgaagtttgttgatgagatcagacaagtcatcatgcagcaatttgaagccgccagacgcgccacctctgatgaggactgtattgcctgcctgaagaaattgagattagaaaacagctccttgctcgaacagtcacgcatgctcaaaaccggctacgccaggatttatgctgaagttcgatatgtcactgaccagaataaaatcgttggttatttcatctcaggtatcaaagtcgtccttgctggcgttcaggccgtttttggtggcgtaatgatcgcctccatgacccctgtaggtatgcttgcaggagctgttctcgtcggtgacgctctaaacacggtttccagggaggcggcccggcaattactgaatgaacctgcatcgcaaggaatactcgctgatggagcgatgtcaattgcggagttcatgggatttagtcgcgatgttggtcttggcgtattcaacgccactactctagcggcaagtgtctatagtgtcttcgggttaacaggcaaagctgaggcctggcggttattccgttatcttccgggcgactattaccgtaaagtacaaacgatgtctccaggcaagctaagcatgaaagttttaggatggggagtcagtgcaaaggttgtactggagctgctcacccacgacgatcaaaatcgttaa

SEQ ID NO: 133660 - DNA, 330 bp, Enterobacter cloacae
atgccagtggaagaacatgatctacacgcgtcaggctttacgaaaaaggaagtcgcgagaattaaacgtcaccttgaaaccggtgattcactggacagggttctgtttgatctttccggctatttcaggatgttcatttgggtttgcataggcatggccgttataaccatactgagcgttatttttggcagcccgtcacaggcaatctcctgcgcaatagccgtagctttcctgctgattgtgtttcttctggtgatgcctgttaaagttggttataaatcctggaaactattgagaacgcacgttaacgattttgatcgtcgtgggtga

SEQ ID NO: 133661 - DNA, 1050 bp, Enterobacter cloacae
atgaaagttaatgaaaatcaacctgatacaaacttgtatcatgagttgataccagaggcgatccggtatagaccttccaggcgtggggaattcaacacgttacgaaaggggctatctaaaattcatcgcagatacactccaactttcgaaatcaaaaagcagccaaaaggtattggtgcgcagcttttcgcatgcatctgcaaccatgattggaaccgcaatccggcacttattgccctcagacaaaagggctatacaccgttctctcgtcaatttgatcccaactttaaacctaagccacgtcgcttgggtgtgagatctgagagcagggaagcgcttacggccctccatttttctctggcggccaactgtgattacaaccccagcagtgaatatcctttcgagatctgcgtgccgtttgaagaaattgcacgtcagatgggcgtgttgcatcgatatgagaacggcagaactgcctgtgatgttgcgtatcacgctttacgcgttacggaagaaatgggccatgcaattgttgtcagagagttcgacaaagatagcaggcagtacaaggcactacgtatctttttaactgtagattttttcacaagcaaaggcattacgcttgaacacctgaagaaaatgcttactcgttttcaggcctggacgcgtaaaaatggtctgagtgagacattaaaacagcgtaatgaacgtcacctgcttcgcctggagcgccttgacctgagtattgaaaagcgccattcactcaaaaaacttctgaagcggattaaatggcagatcaccagcccggagttaatcaaagagaaagagaaggccgtctccagcttgcaggaggcaattgatgccaagcaacccgtcaagttgcatgcagccgctaaagctaaatggcttcaatacctgaatagtggccgttcgatgccgatcattacgacccggctggaagccgagctttctaaagaacagcctacattacgacacatcgatgaagaacagttctaccggctcttactggcaagggctggagttgagtag

SEQ ID NO: 133662 - DNA, 282 bp, Enterobacter cloacae
atgtataactggaaactggatacggcagtgaagctggcgaaagagaactttctttccggcattcagatcgcattcgacaacggttctacgcgtccctaccatctgcattttatgacgcgctgcggtgacactgcgcagctggtcactacgcatacccaaaaagaaaagcgcaaagtacgagacttcagcactaaaggttcagtgatccgttttcttgatgctcgttttccgggttacgacaatttgctgaaagatgaagttaaggtgacaaaaacagtatag

SEQ ID NO: 133663 - DNA, 441 bp, Enterobacter cloacae
atgagcggtaaacgagaaggtgtaaaaggctacaagcaaatccatctgaaaaagttcagcaagacgatttcgcacaacctgcgcttgcttgcgctctctcgcgacctgcctcagtacgagctgcatgacaagatcatcactgacttcattgaagacgccgaaatgatccagcggccaccggtgatagatcaaagtggcgaaaacgtaagcagcgcggatacacaggaacttaccgcagcattatcagccagactcgttattcaacaaccgccgttggttgatcagtgtggctataacgttttcattggaccggaagctcaggaacgtgccgcagctctgtcggcaaaactcaagatacctgaatctgaaattttttactcagctttattcgcgtttgccgaccggtataagttgagtcagccacttgataaggtcggttag

SEQ ID NO: 133664 - DNA, 324 bp, Enterobacter cloacae
atgtcgcatcctaatggctggatttataaacgcttcaaaattgaagatgatctcatgcagacgattgacaatctggctgatacacgtggggaacagaaagcggatattatcgctgaaacagttgagtggctggttaaaaaccgtaccgaagggactgtttctccaaggtatttttccagccctgataatgccacctacaagggtgtatggctgaagccggatacaatacgcactatcaaaatgctctccagtgcggataatcaaaacccaaacagggtcatctatacagcgatttgtcgtttcatcgataaagacaaaagttaa

SEQ ID NO: 133665 - DNA, 867 bp, Enterobacter cloacae
atgaattttaaaaaagctgtagttgccatcgcgatcgtgctgggtatgacctctcaaattgcgcatgcgcaaaacgctaccgataaaccggttgctgattcttccagcatgaaagctgcacaagaccagctggccgcttcctttaacggcatgagtattacaggttttggcgagtcacctgttaagggtatttatgaagtcaaaaccggcagcaatattctttatttccatcctggtgaagatggcaagaaaggcgttttaattttcggggaaatgtatgattcatccggtgtgaatctgaccgaacaaagtaaaatgaatggcctgaccgatactctgaaaggcctgcctcttgactcagcaattacgattggcccgaaagatgcgcctgtatattacgagttcactgaccctgactgcccgtattgccatgcttatgacgagtggatcaaaacctactcaaaagatcaccccgttcaacgtaagttgattttcatggtaaacccaggtcatcccctggcgcgcgccaaaattgagcacgtaatttgttccgacgataaagatgcggcagttcgatacgtttattcatccgaactgccgcacaaccctgacggtgcagatgccatgcaaatggctaagcaaaaagctctgaaaacttgtaaggaggcagatgcagtaatagagcaacacgcaaaaatacttcaggcagtaggtgttaatggaacaccatcgttcctgtttaatgtcgataccaaacctaatttgattgtcggttttaaccagcaaaaaattgctgcggctattaccgaactcgaaaagccagccgtaacaaagctggaaaaaccttccgctaaacctgctaaataa

SEQ ID NO: 133666 - DNA, 405 bp, Enterobacter cloacae
atgcaaactatttgcaaaaacaacttttccgctctttctattaatatcaataaatcgccatcattcgtagactctcatatgcagaaactgcgtaaggcaatggagtcacgccaggcgaaattaatcacagccttctttatggcgctggcgttacttgccgttagccagggggtgtttgcatttacaactccttccaccggttcatttggttataacgtttatgacatcgcaattaacaaaattgcgagcggccctatcgggttcgtgggtggtgcatggctgattgcaatgggttccacaaaaatgaatgagggatggacccgcgccttgccattcatcctggctggttcctgcctgatcaaactcgatgagatcacccagtctctcggtgcgacaattttctaa

SEQ ID NO: 133667 - DNA, 282 bp, Enterobacter cloacae
atggattacggatttagagaaggccgatttttccgctacccccatcaacctattcagatattttggtttgatagggatgaatggatgatcctcattgcttgttatcttgcaagtatgcagttgggtggttttacctgggcggttctattccccgtatccatcgttattatcaaaattaagcgtactaaaggccgggggttcttccgtcatacactctataaactcggtttagtcgaaatatatggctacccaaattcatcggcgaagaagctggaggaataa

SEQ ID NO: 133668 - DNA, 633 bp, Enterobacter cloacae
atgttcaaaaagccgaataaactcccggcaaaaaaggttgtcactgaggcactaaatgaccaacaaaaacaaaagtcggaaacgaaattctttcgcgctgcgcttatcgcagcagtcgttttaaacggtttaacttatcagaaggtagataagttagaaaaaaatcagactacgatcattgtaccttacggcgcgaagtccagtgacctgttaattacaggggaaagcgcatctgccgagtatatgcggatgttgttgcgacttgtcatcgctgattacggttctatatcgaaagccacaattgacagtaaattctcttccttgcttggcctggtatatccagaccgcaatgaggctgtacgcgtgaaacttaatgaacgctcaaagtattttaagcagtttaatacggtttctcagctcatggaattgctgcctgaacaggcaatcaccattacagagaatccagaggatattaaatacaccacagccgcgaagaaaaagtatcgtattcagtttagtgttgaaacgcggaaaattattggcgaggaagcaaaaccagcagaaacccaaaaaatgtatattgactacacggtttcagaaggtcgtttctggattcttgacattcaaggttaa

SEQ ID NO: 133669 - DNA, 792 bp, Enterobacter cloacae
atgaaaaaagcattattagtttttctgacagtaatgtcagcacagaccattgctgccgataagaaaacattccctcaaaatactcagcgtgttttacctgaagtctctacccaggttgttctgtcaaaccgcgacgttaaccggctggtctgtgaatctggcgaggcaactaagcctgtatacagtaaagaaaagcctgttgaagtcggtgttggttctgaccgtcgttcattctgggtaaagtttaagtatttagcacaagacggtgtaaatcactattactctgagccgacagaactctacttaacgtgcggtacttctacctttgaattaatcgcactgcctaagtatgaaaatcctcataaggttttacttggttcagatacgaaagatcgtattaaagataatcaggccttatttgggtcattgccgctggaagaagctgcaattgcgctaacaaccaaaataatttcagatggttctggcggtaaaggattacctgaaagttttgaagttgttccagatcgcggaagctggatgcagaatatatatgacagtcgtggccgtcatataccaattgaaattcgcaaagagcgggatgttcttgtcgatggcacaggtttacgcggttcgcagtataccattcgcgcattaaacaacgtcactttgactgaaacaatgttccttaattcaaactttggaacaaatatttttgccattactgctgaaagtctttccctcagcagaggccagctttcatcacttgtcatcgttcacagggagacaatgtaa

SEQ ID NO: 133670 - DNA, 1248 bp, Enterobacter cloacae
atggttgataataaattcccgcttatcgaaaaagcgcgagcctggttccatcgccagccttctgctcagcagaagaatattaaaaagtacggcactattggtactttcgttatcattgccctgggtatttattacctgacgggtcaggataaaaagaaacccgtcgaacctcctaaacagactgatgttgctgaggctaaaaccagctcttacgtccaggacgatattgtttccactctcggtggtcagatcaaagatctcaaatcaggcattgataatcaggttaaagacgcagtggctgatgctatggcaaaaggccagtttagtctcacccctcctcctgctgctgttgatacaaacactccagcgggaagttcgcaaactgctcagagcgaaaatgctcaatcaccggcttccggtaatgcagccgacggtactggcatgctgagctatcccacacctcctgcttacactgatccatcctctcaggggggtaaacaggattcaggaaatggagaggaaccttctgttgtatgggtcggcggtatatctgacggtaacggcgatattggtatggcagctccccaggaggataactccgcaaaaaagaacgagatccagttgccggttggatttatgaaagcaaagctcctggttggcgttaacgcccttacaggtcagtatggctctgataatccccagacagtgatgttcagggttcaggctccggcacagttacctaacttcatcaaaatgaacctgcgcgggtgcttcgtgatagccaatgcctccggcaatctcagcgctgaacgcatcattgtgcttcctgtttctatgcactgtatgacaatggatggcggttacatcgttgaaggtgatgttaccggatttgtttctgatcgtgacggtaaacgtgatatgtcagcgcgagtggtatcccgtgccggtcgtctgatggccgcgactgtttttgctaaatccattgagggctttgcgaacgttattggcaatcaaagcattcagcagaacgtttcccctctgggtagcatcaataccatcaagccagacgaagcctctaaaaatgcagctgcgaccggcgtggccggaggttttactgaggtatcaaaatacctgttaaacctcgttcagcaaacctctccagctcttgaaaccggccctggtaaagacgtgactctctttgttcagaaaaccgcgacactcgaaatcaaacaagtaaggatcaaataa

SEQ ID NO: 133671 - DNA, 519 bp, Enterobacter cloacae
atgaaactcgccaaaatctctctgttgctgttgggttcctcgattctttcaggctgctctcttctgccttaccacagtgatttcgcatgtaagctcgaagatggttacggtaagtgcatttcgtcagacgatgcttatattgaggcaacaaccggcgtggatatggggcatgcaattaccgaagatggcgttgctgatgacccaaagggatctgccgctaaaacagcggccacgaatcaggctgcggcaacaaaagcagatccgtcataccagcaatatcgtgaccgtgtttacaaacaaatggctcagctggttgaagccccgcagacaccggttgttcgtcagcctacagtggttcgaacgctcatcctttcctactcaccaggtctggatgaccagacagcctacatgccgcgttacgtcttcaccatgctgaatggaccgaaattcgtcctgactgactacaagctttctacagatgattcagcgccatcattcctgatgggggggaaaggctaa

SEQ ID NO: 133672 - DNA, 2544 bp, Enterobacter cloacae
atgcttaacactctgaaaacggttgctgagcgccacctgttcctgcgcaatgaagtcactaaatccgatattctgaatatggcagttcgcgatcagcctagcgaatatttaccttatctcgcattcaagaaacgcctgccaggagaggatgttgatacaaacgccttcataaattttgacaatacgcttggctggatttgggaactcaaaccactggcatttatgggaaatgacaagctcgataagctgcatggtatcgtgcgctcccaattcccgaaaggaactgtatgccagtggattttatatcccgaccataatctgaacagtcatattgaagaatactgcaatatacgcgataagagcgatcccgttacagctatgaacatggcacagatggaaaaatttctgcgtgaaggtgctgacggggtcgctaaattgttcaacatcccgctacgtaacttccgtctgttcttcaccatcaagcacgagcagcgcatctctgaagaacttcttgtagcaatccatgaatctttcggcattgcggggatggaaccccgccgctgggaggcctctgatctgattaaatgggccggtgaattctttagtggtgagcctaataacggattgtatgacccggaacggcagctgcgtaaacagatgaacgcaacaaacatcgaccttagcgatcctggctctttaatttatgccggacaccgctacggtgtatgtctatatcccaatgttgtcccacagggcaaaaataacccactcaatacgaatgaactgtttggcggttacatgggtgttgaggacgacatgcgacaaatcaagtcgcctttcctttataccctgacaatcgtttacgacgacctgcgcaaaaacataaccgataaggcaacacaaacgatgttccagcgcgttggtgctggcttggcgcattcgttacgccaacgaatggaggaatatcacatcatgcaaagcatgatggccaaagacagcaaattccattacatgatcccgcagctctgggtgtttggtaaaacggaaaaggaagcttttgaggccgctgcgcaggctaagaacttatgggagggctttgacttccagatgatgtacgagcagtcgattaagaacgtcatgttctatacagccctgcccttcggcttttataacatcgaaagcaatatcgataatatagaccgtcatttttatctcgataatgaaaatatcgcacgcttcctaccggttcagacagattttcgtggcggtggccgtccggtgcaatccctcattggccgcaagggtcagctaatctcactcgacatgtatgataagcgagcgaacgctcacaacttcgttgtgatcgcagaaacgggcgggggtaaatcgttcttcctgaacagcatgatcgatgattacgccagtattggtgccaaaacgcgaatcatggatttgggtaaaagctatgaaaaactgacacgcatacgcaaaggtcgctacatagatttcaacctcgaaaatcccatatgcatcaaccccctcgattttgtagccaatgatgatgaagacctggcccagaatatttcagcggcacagatagtctttagttctgccgcatacgcgttcaccggccaatatgtgaatgaactggaagccaacctgatagatcaggcctgtcgccacgcttacagttcaggtgatggtatcaggggaacggatgccgtcactgattttctgacatccggcaaatttctggagtcggaatacagcgataagcacaaaaaaagtattgaagagattcaaggtgtcgcattccagctcgcctatctactgaaagcttttaaatctgatcgcgcctttggcaagttcttctgcggtccaacgaccttcaacatcaaagatgatgatttcgtctgtactgacctggagaagctgcgctctgttaagcagctattcttcccaatggtcatgaacctcatgaacgcgattacgatggatttgtacctctccgaccgctcgcgtccgagcattatcctggtcgaggaagtcgcctcgatgttgcagaaaaccggcatggtttcgatggacggtctgacccagatgataaacgaaggctatcgtcgcgctcgtaaataccgcggcgcgatggggatcgtccttcagtcaccgctggattatgaagtgcttccaggtctaggcccggttgttaaggcaaacgcccaatggcgttactacctggaatcgcgcatgtacgacgaagcggttaagaaaggccttcttcctaacatcacggaaggcttcccgcttaagctattgagcagtgttcgtaatgcccgaccacgatacggtgaagtctttatcgactgtccgttgggtatgggagtggctcgtctttgtgtggatcagtggcgttattgggttaacacgtcagacggtgcagatgttgctgcattcgatcggcttatggctgagggcaaggaacctgttgatgctcttaaaatactctccggggtgaacccggatgtactgagggccggtcgatga

SEQ ID NO: 133673 - DNA, 2031 bp, Enterobacter cloacae
atgaagaatgtgaatatcctggctttgggagcatttatgctccctgtttcatttgcgcatgcgcaaattcaggccaccccggacacagccaaaattactgcaagtaaggatatcgcaggttctatttcatcaacggtaaaagggaaaaccagtaacgcctcccgtttaaatgaatcgcagatccgtccggtatccggtgaaaacaatatgcgaacctatgacggccaaaccgcatttaacggcaaagccgtttgtaaaggctcatctgagttcatgcgcatgcttgttcagcccacaacgaacggtaatttaaaactgctgaatatcatgcaggataccgatatgaacggctccctggacatcacaacgtcaccaggttgggatatttcagtagtttgcagtaacggctttcagacgtgttccgatgcgaataatgctgctacctgcacttcttgggcctgggttgcagatcccaagagctaccaactaggccgtaaaaatgtcgctatgacggaactgggtggttgttactgcataaataacagctgtggcagcaatctcgcctggaataatctgggccaaattcttaacgatctgggtggcggcgcatcacaggcactttcgcgggcaaacccctggttcacactgagtcagattaaggttgacggcgtatcggcatctttcgttggcggtgacacagcttcatgttcgattggtgattcagaaggtttctttggtactgctgatggtaaaaaaatccttaattacaaggataattataacgccatgaagacggatgccaacagtcagaagaccaccagtgatgcctaccgcatgatcactgaaggcagcctgaacccaaacgaaacgtctgatgtgtactcatgcgatatcactcgcaacgtgaatctggatgaacctaagctgaatgaaattatcgcctttgatggagggcaaggttccgttcagcaatgtggcactgactgcctgcaactggttttaggtcgtctgggtgataactactggagcggtacgtgtaaatactttgaagttgattctaactttttcatcaaagaccacacccgtatagccagcgctacgctcattaacgccgtttttgatgactggatgcaactgtgggccggagataaagtcgtctggtcaggaccgtatggcaactggaacgatgcaggcccggtgcctggcgcatgcgaactgagcaagtcatggaaccaatctccgaatacggactttaaaaagtacctcgataaaaatggcccggtcaaattcaaaatccgcgtcgaagtctctggtgaaggcgaaggatatgctctggtacggctgaaggctgacctctcctgtcgtgaaggtgatgagtatgtctcaaacacctgtactgcttatgaacaggaccaaaactgtcagcttgtcgatgaaactgtggacggagtgaaaactttcactggtagcatcaacaccggccttatccctcttccccaaacccaggttcttcagggcagcttctgctctgtcgctgtgaaacgtgattggtttaaaaagaaacggcaataccgatgcaaccgcaagacagacttcaatttcgacaaaataattgagcgtaaggcctacatcgataaaaccgtcacgcccggcgactataaagacaaaatgttcaataacggcaaggtaacttacggtgcaggtgaattattctggcctgacatgccgaaagtgggtgattgtataaatatgtgcaaaacccgtaagccgaaacaaactccagacatggctgtttccgggcaggttgataaaaataataaagcgagcgtgatcaaatatgacaatttctattatgagtgtgatgcaacgaacaaatgccctgctgaacctggcgaggaagttattaaagcttgccagtgtcttaatgagttcgcagaagcttcagcgatcatgcaggttattcgccaggctggtcaggacatgatctgtagttccggcaatcccaagaagccagatggttcaagcaaataa

SEQ ID NO: 133674 - DNA, 1890 bp, Enterobacter cloacae
atgctgaggaagttcattagttccattctaatcctgtgccagctcgttatgttgattggtattttgccagcaaaagcggcaaatcctattgcaacaaatttcgtatgcggtcaggatttaaataataatggttatctgggcgacgaaggcgaatatcaggcctgtcaaactgccacgataaatcattctacggcggcgaattcgtattgcctgccgggatacacaatgcaggcaaacggggcttgcatgaaatacgaatatgcccctctgggtagccagtgtcccaatggctacttcatccagaatggccgctgcgtgcaagaaagtctgttacaggcccagggctactgcccaagtggctatgtaatggtaggtaatggctgtcagtcctatacctacactgccccgacgcaaacctgtcccgcaggctctttcattcagaatggccgttgtatcactcagcagcagattcagcccacagttagttgtcctaatgttggtggtaaacaatgggcctatgacggggccgggaaatgtgtgatgcctagcgcaatcatgcaggttccgggcggaggccgttgcactaatgtccctgccggttatcaattggcagaatgccggatcaccatgcagggtccggcccaattctggacaactgttgtatacgcgcaatacctctgctctgccggttctatggttaacggctcatgtgtcgttaacgcagatgccggggctgtgcagctgacctgtccatccgggactgtgctcgaaggtggtcagtgcaaacacacctcaaccacaaacctgaattatctgtgcagcacgggtacgctggtcaatggcaaccagtgtaaagtcgtgtccgatgccggacctgtgcaggccgtttgtcagtcaggttacgttatacaaaatggtcagtgtgtaaaatccacgtcatcatccacgcagtattcctgctcacagggaacgctcagtggcacaaactgtgtctggaacacgtcggagaactactgcccaatcggtgtaaatcagtcctgcctgaataataacggcggagcgtcatgctctcccaataaatgcattgatgtcagcgttaacaagccggtggatgaaggtaacatagacggttcaatgctggtcaatgacggtaagaagtctgacgatggcgtatgtatggatcagctgtttatcttcagtggccgtgcgcaggattgcaagctcgctggggtagatacggcctttaagaactgctgcaaaagcgaagggaaggtattcaccgactccgtaggagcattgggtaatatctccacggcggccagtaccatatccaaagtgtacggcgctgcgcaggaggcttatacctactataccgtcgcgatgcaggcgaccggtgatgcagctgtcgcatcgtctatggcagcccagggctttggtgatgccatgctggttgcctttgacccgacaagtctggcgatctccgttgccatttacttcgctatgcaatacctcatgaaagcctgcgatcagacgtcgatggaaaccgctatgcaggccggttccggttactgtcatgaagtcgggacatactgcaaaaagaaaatccctctgctgggctgtgtccagaaggcaacctcatactgctgttttaactccaagctggcgagaattattcatgaacagggcagaccgcagctgaagaacttcagtggttggggcgattcgggttcaccgcagtgcaggggattcactccagacgagtttgccgccatcaactttgcggagattgacctcagcgaatatgttgaagatatggtgaaaaaagcaaccgatgaaatccagaaggatgttaatcaaatcacccaggatttctacgaaaaaacaaattaa

SEQ ID NO: 133675 - DNA, 1599 bp, Enterobacter cloacae
atgcaaaaaataatgacgctgctgattagtgccactctgtcctttgccgccagtgctgccactgtcggcaatactataggccagatctatgacattgccgaacccgatgctctcagtgaaattgagagtcgcgtccgtagtgttgactggtcaaaggaaatgaataaaaaccgcgaatcgtggcatgcatttcgcggcgttcctttgcctgttgccaaagaaacacgaacccgcacctacgttcccttttatacctcgctcatcgatgttcccgataaagagggccgtatcctgtatccgaaagggtatacgtttaatccattacagcatgttcatctgccccagcgcattgtggtgatatccccaggccaggaggaatggctgaaatcgcacgtccaggataccgacatggtgctgtatacccacggcgatgtcataaccaaaggcgagtcgctgggtcgcccggcatttatacttgatcccacgctgcaacagcgccttgatgtgaaagtcactcccagtattgttcagcaggaaggcgcacacctggtaatcaacgaatttgcctggaatcccgaaaagaaaacatccacagcgcttctgaaattgatgtcggatgacatgctcagtgctacttccgatgtactcagcacagccttcaacgcattaattcccgcagctcgcgcggaatgcaaaacttccttcctgaacccggtgacggatatcggctggtcctgtatttttccgatgcgtatagccggtgtgcaaatcgtaggcggcgaagaaaatgccagccacagcgacagtcctgtttgtgtctgcaaagggggcgcagtaccaactatcggcctgaaaacctcgttttgggagccgaaacgtatcattgatacagtttctgatccctactgcatgatgcctctcggtacgacactgactacgccaaagccaggtactctggccggggggctgaacgaaaacagcacctctaaaagagcattccagcaagcccattattatatcttcccggcgtggaagattctcaacatgttctacgacattccctgcctcgatgatgaagggtatgacgtggcgatgatgactgagatccttcctcagtggaacaatgacattttaagtctgatcattaacccggaagcccttctttttgccaatcctatttccacgatcacctgttccgcagacgcagctgcggcttcgtttgggatgccgcttaatgcccttttctggtgtatgggttcatggggaaatgcctacccactctcaggctccattacctccacagactacgtagaggccaacgccggtattgcagcccgaaccatttatatgatgggtcgcctcggcctgctctggaatacatcagacgatggatgctaccgggaactggcccctatctggcgcaaagatcgcttcaaattgcagatgatgcgccctgctcgcagtacaacatgcctccctattggccgtgagggcttgctctggaccggcgggaaacatgatccacgaaaagacaacttcatgtggatgatgttcgagaaaaaagactgctgcgtccgttattcgggttcagttatgtaa

SEQ ID NO: 133676 - DNA, 396 bp, Enterobacter cloacae
atgcgaagcctaattctgaacaaaaacatttccgtatcagcaatcttcttttttttactgtgttttaaagggggagatatggctgcgtgggtaacagataagacaaacctgattacctggctggaagcaaataagctgaacaataccttcagcggggcggatttttcagtgcttccagccatagcggtcatcgccggtatgtatgcggttagtcacctgatcatatttgtcactgaaatagcatttgcaacatatgctgcattttcttcagtgcctgaaacgaccgaactggtcgtgagcaaaaatccccaaaccgcagctcaggcaccagaacataaagaacaggatgcctcacctgcacagtccgaacgccatgataacccggagaaacactga

SEQ ID NO: 133677 - DNA, 750 bp, Enterobacter cloacae
atgaagaacagcaccatttttctcctggcctcccttgcaacgttcggtgtctgtgcaaccggtagtgaacccctgtcagtaaaaatatcaccagaaatgatggccgcagcccggaatgcgaatgcacaggctgtgcagacactcaatgatgatgaacagggagtggcgcgtcagtttgcgtcgtcaattgccgaattttcaaagagtgatgccttcaagaaaaagcaggaggcggtgaagtcgcaggtttttgcctctgctggtatgcaggatgatgagaagaaagaagacgggccaaaactcgccggtaatcagctcgtcatgtttgtttccagcagtatgccgcttgtcactctgcgtaaatatgcacacgacctctccaaagtaggaggagtgatggtcatgcgaggtacagtaggcgggatcagtaaaatggtcgataccattacgctgacccgtaatgtacttaacgcagatccctcctgcgaaggggcaaaatgcaagatgtggggtacggaaatgctcatcgaccccatgctgttccgcatttacggcatcaataaagtaccagctcttatctaccagcctgacatgcagattcagagttactgcgatggcctggaaaaggtcaataaggcatcagctgtcgtgtatggtgatgcgtccgttcgcgcactgctggagcgaatgaacatgatttcgccggatgaaaaggttaagcgcctgatcacaacactggagaaagcatga

SEQ ID NO: 133678 - DNA, 501 bp, Enterobacter cloacae
atgatgattctgaagcgtctggcaacgcgcattcagctatccgatgaatcgcgcgcatatctcaacaccaccaccatagccctctccctggtgctcgcatacagtctgtttacccatattctgatcccggccacgcacagcgtatttccggtcgtgctttttcgtaccggtcatgaggccacagagcaggaccagtatgtgcgcttctatctgaaagaccgttatttgccccgtggcgaagcgaacctggtgaagcgtttgggctgtatcgccggtcagtaccttcagcgcgaaggcaaccagttttactgtgacggtgtagaaattgcgcgagcgatggcccatgaccacaaagggaatgcccttccggtattcaacttcaccggcattatccccgaaggaaaagcctttgccgtgggggacaccattaacagctatgacagccgctattggggttttattgatatcgcgacgacagaaaaactcattcccgttttttaa

SEQ ID NO: 133679 - DNA, 828 bp, Enterobacter cloacae
atgatcaaagaaatgatactggtcggtgcaacattgttttcatttccggtattggctaccagtgatgctgctgcacctgttaaaaaccccagacacggtttattctggtatgagactcccaaaaaggaggaagaaaagaaggcagaaaataaatatccacgccctgtaattccttctgccgatgaactatttaagatgcatccaaaggatgttcaggatttactggataaaaccagggattacgcactgtttaaattatcccctgacgttgttcttgattactacaaagttcaggatgctgcacgcagaaagtcagctgcatttaccagcctgacgggttacgtgatgctggaaaatccccaactgaatgcagcttcagattatccgatcacgaatccaggcaacgctgagaaacagcgcgaacgtcaggagcttaaaagtaaaagtctgattaaaaatcgtgatgaatatgcactgcttttctttagcgagcctaattgtggtttctgcgtacagcaatcacgtatccttgaaaactttcagcgtgaaaccagctggtatatcaaagaaattgatattactcgccagcctgcggccaggaaaaaattcaacgttgatcgtgcccccgttaccattctgatcaaacgcaactccgatacggacaagtggatgcctgtctctgtcggcgtcgattcgttagataacctcagaaccagtatttacaacatgactcgcgtactcaacggcgaacttgacccgcgccagttctttaccaatgagaaacagcagggcggattctttgatccgttaaaaggagccaataaatga

SEQ ID NO: 133680 - DNA, 480 bp, Enterobacter cloacae
atgaaaccattacttcattttatgtttcttatgttttgccttctcagtcatgcacaggctgaaacgtcttcaccgcaggctcaggcacaagctgaaaatgcgatggtcacagatttattgttcaaaaacaggaagaactttgcccttctttattttgtacaaccaggctgtgtttattgccagcatcagcttcccgtcatggaggaatttcagaaggaaacaaactggtatgtgaaaaccatcgacatcattcagaacccggaggtgcgttcgaaattcaatattaatggcactccggtgattgtcctgattaagaaaaatgctggcgcaaataactggcaagccgtctcaatcggatactcgcctttaaatacattacgtgaagatgtttttaatctggttcgcctgtttaacggccaggtccctcaaagtaaatatttcgttcgtacccagcgaaacgaatcaacccccattcgttaa

SEQ ID NO: 133681 - DNA, 1239 bp, Enterobacter cloacae
atggggggattcacggcgcgaaccactaccagtaccgattaccctatcaccatttccccccctcgcctgtcggtaggatgtgggggcattgacggattcctgggaggcttttccttcctcgatcctgattttttggtagagaaagcacaacgagcaatgcaggccgcgccttatgttgcgttcgatatggcactcaaaaccatgtgtaaggagtgcgctgacaccctgggtaaaattgagcagatcactaacttcctgaacggtattcagctaaacgaatgtgcgctggcgaagcctattgctacaacactggtcgaacgcgacccgacagcactaaaagggctgtggactgaagcaaccggcacgaaaaatctcgatgaagctgttgatcgtatgtggagtgacaccacttcaaagattaaagctgctgatgacaaaccaattgcagacctgaaatcgatgatttcaggatgcccggctgatttccgggatctgatgcagcatgggtcaatcgtagaacgtgcagctaagaaagtggggatgggcgactatgccgataccattcgcgggtacatgggtgatgtgtggatcgagtctaaaaccaacgacaaaatcccggtcgctaagtccatcaccagctgccctcagaataagaagttttccctggatgatatgcttaacggacgtgcctacgtgaaaaccattgatcagcaatgtgttccttccggctcaagacctgtccgcaccgttgtgtatcagaagatggaaagcatcgtttcccgtatcaaaaataatcagccgctgacttcagataaccaggcattcattaaccagaccaatatcccggtttataccattctgaaacaggctgtagtaaccggccaggatactgtgacgctgaacgtattgagcgaactggttggcctttactacacgtacttcatctttaccgacctgtaccgcaatacggaaaacacctttgataaagtcaatgaaatggtatccacaccactcgctgatccgtctgccggttccaagccctgccgtatggatttgtttaagcctgctatcgccaaattcgatgacctgatcacgcaagcgcgtgatgccagtacaaaagttgaagctgcctataacagccgcctacagtcctatacgctgaaccagggcttcatcaagtcgtttgaaacacaggagcgccaggatcaaagcgatcgtgccgcaggaggcttacgctga

SEQ ID NO: 133682 - DNA, 3951 bp, Enterobacter cloacae
atgaaaagacaccttttcttgctcgccgggttgatggccgtaagcccgttcgcgctggcgatggatgctgaatacgtggtcatgggtggcttctcaaccattgtgaatgcatttacgcgcgtcaaactcattttcaatgacaaccagtacgcctcgatggtcacagcgtttgtggttatggggatgctttccgccctgctgctgaaatcggcaaagggtggttatgaataccttgaaaccggtaaagcgcagatgggcatgggatggcttggccttaccatgctggggactatcgtttatttcggtctggtgcaaccaaaaggcactatccatatttacgatcagagccgcaaccagtatcaggctgtaagcggcatacccgattttctcattttaactgctggcgttaccaatcaggcataccaggcttttgttgatatgagtaaccgcaatacggccaccacgacgcgattcaccggggagggaaccccaatcaaaatgcttctcggtatcctgaaccgcaacggtgctcagtttgatccctatctgaccgccaacgttaaagcaatgtggaaccagtgttctcctgtggcagagactcgcggctttgatccccggtcactcaagtcaggttcttcagtcctagatgtggtatcagctcttgcccccctgcgaaatcaggcggtctataccagctgggtaagtccatcaaatccccagggggcgacagtcacctgcgatcaggcctatgtctctcttaaaagtgatttagggaaccctgctgcctatggagcgcgcattgctgatatctgcacgaagaacgggtatacctctggtaacgccacacagttagcagaatgcaagagtcgcatggaaaatggtctacagaccatttttggcgcaagtgggctttcgctcaatacagccatgagtaatgtcctcgtctcacaggccatcacagacgcgatgcttcagaacaatcctgacgtggcaaccacaatgctgacaaaccgcgccatgattaacggtggtatggctgacgctatcacaaaccctgaatggctaagcttcatcatggccggtgtgatagcaattatcctttctgtgaccccacttctgttactgcttgtattcacccccttaatggggaaagcactgacactgctgtttggtttatggatctttattaccagctggcagattgcggatgccctgctccttcaggccggaaccgatgaaattcttacggccatgaatgaccttaaatcgatggggcttggcatcgacgcggtacaaatggggccttcttccaccatgaaagccatgtcggtaatggcatctgcccgtgagacggcccttcaaatcgcgatgctgatagccgggttgttcggcgtaagcgcatatggactcagtgcatttggtcagaaagccatgagccggcttgatcgcgtcactgaagaaaccagcgataaagcctttacgccagaaggcaaaggtgcacagattgatgccatgaatcgcggccatgcaaccctgcaaaccgctgcggatatcggcaacatcgagctaatgagtagcgccacgtcctttaaccaaagctcagctattgaaagtggcctcacgcaaatctctgcgctgggcggtacgcctggcgtagcggcacagcgttccggtgcggtagaaggtggtcgggcctccggcacaacgcgaggttacgaaaatggaaatatggggggaggtttccttgcagcttcagaaacttcaatggttcaggctcaatccagcattggtgaagctcagggtatccagcatgcggccagcgcgtcgaacatgtctgttacagagcagtctgaactcagtagcggcgtgagtcacacgatgcaaaccgctgatgcacaatccaacctgaaaaatggcggaggccagctctccaccctgtctgaccagcaaggcaagctgcattccaccgagcgtgagactcagctgggtcacgctgccggtactcgtcaggcggccagtgcaacaggcaaatccgtcaccgacttcacgcaggagaaaacagcgacaagtgcgattaatgaacatgcaagcggccagggccagctacaggcttctggaggtactttaggagggctacattcacgctcccaatatactgcggccgctgaaagtgacgaacgccagggtcgtgctgacgcgctccataatgcatatgatgctgaaggcgggatcgccagtggggtcagtgaatcccagacagaacatctcacccagaatcttcacgatatgcgtgaacagaaagccaatattcaggagatcagcaaagccacgggaacaacagaaagccagtcacgcgaaattctctctgctgcccgttctgctgaacagatgggtacgctggaggggaacaacttcagtccgaaacagatgcaggagaattctgcctggtcaacttccaaaggtgcaaatattatccagggtgagaaaaccgctttcaaagagcgcgacgtggcgatgccggaatacgccagacgacacggcgaaaccgatatgcatcaggcgctttctggtcaggacaagttcgacacgcttagcgatgcacttaaaggtgataaaccagccgccgatgcgctggcaggagccaacaccacccttgcgattaaccagaacgatgccagaaaccttgaggatagcggcctgatcaaccagacgcaggcagacgctgtccctgataacggtgtagggacagtccatatgtctatgcgcgatacgcctgacggcaagaacgcatctacatcaacggttaaaacgggtagcagcacagtcagcgatgacagctttaccactaattctgaacagacctttgggtccgcaccatctgcacaacaaaatctccagcatgcaccggcgattgaacgctttgttgcttcagctgaacgcaccaatgcagggtcttcctctcgtctgttaggtgcagagatagcgaaaagtctctcgccatttatctctcagtccggggatggccgtactcaacaggctatcgacggtggggccagcgttggcaaatcagggttcttacgtgaggtgggtaaagccgttggagtggatctcagcgccggggtcaatatgagtaatattaatggccgctctacgacaacggatcagatagccgcagctgccggacataagatccagcagttccgtgacagcgccacagagcaagccgatgcagctcatctgagcgggagagacagagaggaatttattaatcagaacgttgcccttcagtcggaagcgttttacaggccattacttaaagccgctcaggaaacggctgaagctcattctacaggctcgatagtcagtgatatctcaacgcctcaaactacacagccaacgcctgaaaagagcgagagtggcttcacacgcggcggtatcagcagcccgctggaatatgccgcgcgtaagcaggcggagactgaatcggcgcagccgcaacgcgcagagtatgtgccacagcatcaggagcagcagcaaccggcagcatcagaaagggctaatccgtccggtaataccctggtcgaacgacccgccgttactgaggcgcagcaatccgggaccctcccctcagctcgccaggacgctgtaatttccgaaacaacagcgccagcactacccacgccaggcgcagagccatcacccgcagcgcagcaggtaatggttaatgaaagtgcgcaataccaggggccgcagccatcaccgcttccttctcagccagcactgtcaggcggcagtcgaaatggcccagccgaggcagcgacccctaatgaagcagcagacgaaagcacacactcaagcagtgctcatcctccggtggcctccggcaacagtgattccggtatcccacttcagaccagtacaggggggaataataaaaatattccgcgttaa

SEQ ID NO: 133683 - DNA, 252 bp, Enterobacter cloacae
atgaaaaactggaccaaaaactttattgaagacatgaagcatatctggcgggagttcaggcgggatattgctgaaacaaatgctaaaaaaagccactgtgatgatgatatggctggcataagccattccgtgaactggaataatgtacctgatttagatccgcgaaagccggttaacaacctagataacttctactctcgacagttaaggggaacggataacccaggtacgcgataccagcacaggaactaa

SEQ ID NO: 133684 - DNA, 336 bp, Enterobacter cloacae
atgttaacacgcagattaattccgttcttattactgctgcctctgacctctcaggcaatttcaatgcctgcaagcgacatgcaggaatctgaaaaaataaagtatatgcagaaaatgagtggtacagaccattcacggcttgccgccttcgtgcaggcagaccagtcatttacgcagtggtgcggtcgttcagctaccgtatcagatttaaagcgtatatcgcttcaagacgggttcgccatgctctatgagcgtcttagcagcggccaggcccagggaatgacgcaaaccaaaacacttttagtaaaagacaatcctaaattctgtaaggggtaa

SEQ ID NO: 133685 - DNA, 510 bp, Enterobacter cloacae
atgactgacgaacaaatcaactatgtaggctttgctattctggccgcacttttctggtacgtacaaatttatcgtccacgaaaaaaaatgcgtaaccccggcgagctgagcgtaaaagctgtgatgaacccggaagaacagcaaatgtataatgcgatcaattttgtattcccctccccctacattcttaaaagcaatgtcagcctggatgacctgctgttttctcctgatatggacaagaaagcgcatttccataaatcgatgcgtcaacatcaggttgcctggcttgtactcgacgaaaagcgcacacctctgctggccgtagattttctggctgcgggtgaagatttgaagatgaactacctctcacaggcaggcgtgggatgctgcatctttacgccgggaacttcagctgaacaaatgatccaacatcttcaggaagcagctgattccctcaacgaaatgcaaaacggccagtacgcggaaagtgaacagccagcaaccgcgtaa

SEQ ID NO: 133686 - DNA, 264 bp, Enterobacter cloacae
atgaaaaaattattgcttctgggtgtttttctggtttcaggctgtgcaggttttggcgggaatatgaagaccgtggactgcgaggctaaaatcaaaattcatacgtggggcgggaagcaagaagagcctgttcacgtaaatgcaatgcgatctgaccgcttcgggcgggagtttgtacgcgtacagaaccgtccaggttatgcatttcttttaggccgctggcagccgaaagataccttctccgattatacatgtaagtcctga

SEQ ID NO: 133687 - DNA, 204 bp, Enterobacter cloacae
atgcaaaaacaggattggttattaaaactcaggaaggtttcggaaatttcgacactggagaaaattattcaacgtaaagaggatacgctcagcaaggaagacttgattgtattttattctgcttcagatcaccggcttgctgagattattgcaggtaaatactttgataaagtgccatcgcatatgtggcgatacgtgaggtaa

SEQ ID NO: 133688 - DNA, 1371 bp, Enterobacter cloacae
atgaagaatgaatctcaagatcagaatctcgccgcactcccacgttcgcacgaggcagaacaggctgtattgggtggtttgatgctagcgaatgatgaatgggataacatcgcagaaatcctgtctgaagcagacttctatctgaaagtacatcgcgtgatttatcgcgaaatgggcgtgcttgttaagcaaaactttccaattgacctcataacactgacggattcactacgaggtaagggactggaacaagcctgcggcgggtttggttacattgccgaattatcgaagaatacacccagcgcggccaatattcacgcctatgcgaatttggtaagagagactgcaattaagcgcgaaattctggctgtggtaaatgaagttgcttcggagacaatgcagccgcgtggccggacggcgaaagagttgcttgatctggcagaaagtagggtaatgggtatctcagaagtacgagctaaatctcaaacaggcccttctccaattagcgcaattctaggaagtaccattgagcgtctagatcaattattccacactccacacgacggcattacaggtctggataccggatataatgatctcaataaaaaaacagcagggcttcagaactccgatttaattgtgattgcggcgcggccttcgatggggaaaaccacgtttgcaatgaacatctgcgaaaacgtggcaaacagccaggataaaccggtgttgattttcagtctggaaatgccgaaagaacagttgatgatgcgtatgttggcctctttagggcgcgtagatcaaacccatatccgtactggtatgctcgatgatgacgaatggcagcggattgcagctacatcaggagtgttactggaaagagacaatattcatattgatgacaccagtggtcttacgccaacagagctgagaagccgggccagacgactgcaccgtgaatgtggaggcctgagtctgattatggtggattaccttcaattgatgcgtgtacccgaaattgactccaaccgaacattggaaattgccgaaataactcgttctctgaaaagcctggcgaaagagttgcaattaccagtgattgcgttgtcacagcttaaccgatcactggaagcccgtgcggataagcggccactgaactcagacctgcgggagtccgggtcaattgaacaggatgctgatgtgatcatgtttatttaccgcgatgaagtttacaacgaaagaagcgaagataagggaattgcagaaataatcatcgggaagcaacgcaacggccctattggaaccgtcagacttacctttaatgggcaatggtcacgctttgataattatgccgggattggctcagacgattaa

SEQ ID NO: 133689 - DNA, 2037 bp, Enterobacter cloacae
atgactagttcagataagctatttcaggctcttaacgtatgggttgaattaacaggcattgacccggacgcgaaaagttttactgtacgtatgggggcggggctatccgatctgaccataaaaagaatgcacgaagagttacaggaatcccaaactctcgatccttcaggcataacaacttatttgttgctcattgcgttttctgaaacatattttaacaaccggtcgtttaccgttgggcaattactgaatgagccgaaaaatacgcaacattacctgcaaaaaagtggcgattttctaaaaatgattaatagtgacgaagtcagtttttcgtataaatgttttaccgaaaagctgacagcggcgctaaaacaatacgggctgtattctgatagcacagagaaggttgtggctgacatcagcacgatggcaatgattcgccgggatgcgctgaagtcatttcaggagctttccgtcaatcagtttacccgtggtgaacaggctggaacggaccacttctcatggctgaatacagttcaccagttctggaacatcaactcattgctcgatgaagctgtcagtgcgcgggatggtatcactctgaaccttgtgcgtgaccctagcgacttctacagctatttcgcgtttaccgtaaagaacggcggcaatctgtttgtgttgtccgatcacccacaacatacccatcccatgcaacgaggtatgtcacgccgaccagacagggagtttgacgaacgggccggacggcactggtttccgtaccagctgcttaagtttaagtacgacgaggatgcccggacgctgtaccgtgaccgatcaactgatactaacctcgttccacggcagcaacgggtgcagtccgtttgccagctgcaagacttggaggcaaaacagattatctggatagccctcatgttcgagctgatcgcagacaaatactggcaacagggctggcaagcgaaatcactcagctataccgcagaaatgattgcctcaccggcattactggctgaacaggctgcccgtgctggcatgccggtagtgcaaagccagctgctaaccttgccagagctgacggtggaagaaatctgcgcagaagactttcaccagaccattgatgctgctgacggagggaaaccgcacaactggctggtagcgcgttacggccagaaagtctcgcctgacgtgctcaatctagttaaaaacgatgagcatgttcattacctgccttccgttaagtccggtaatagcaggagtaggtcggcactgagtacggtaacagatgtgcatcagatagcctccatgccgcgccgggaatatgccgcgttagcgagctgggaaaaagaggggcgctatgagcttacaccgttatcagctgtacagtttggcgatgccgggaagctggactccgaccgacgttatattgcccgttacaactttgcaaaagccattactcagctggccgatgaggaatatgagcttacccatgaggaaatcgaagcatggtggcgagcttcgctggaacgcaacgcagaacgcttatgtgcaatggccatagaagaaacaatctggctcgatgatattcgcaggaattcagcctcaccggtgctctctgttgattctgttctggggagatgtgcctttatgaaccgctatgcaagtcaggaggatgccaaccgcaacagccattactttgctgagaactaccttacagctggttacgataaaggtcatctgtgctatctgatgggttcccgcgcctcctggttcattcatttcaggccgagagcttcatatgatctagcggtgttggcaggttgtcgggtagacgaattaccagaggtattgcagcactggtcgaatgataaagattacagggggaacgccatacttgaccgaatcgatcccgcagcatgggcgatacgtgatccatggagcagaaaattttgtggaacggtaacactggcgctatcgaaaagagcgatgaaccgactgatgaaagagcatggaaaggcctga

SEQ ID NO: 133690 - DNA, 483 bp, Enterobacter cloacae
atgaataagctaattgcattcattctgctgctatttatggctccagcattgggcgttgccggaggtgtaatattttccttctggaatacagggaatgagctacagccggtctggggcaggcttttagtttacatggttgttttagtgtttatctttaatttaagaaacatacttacggaaccgacaacgagagcaacgcgcaagcaccgtgaaagaatgttgatggcaattttcggtataatcatttacccgttgatggctggtttttgtttgtttgtgattgaagacttctcattcaatccgggaactgatagtgctcaacagactctagatatggcaaatgaaaaattaaaggtcatattgctaacgatgttaaaatatatgcctttcgcaattaactgcgggtacatttggcttgagggaattgtaccactgtggacaaaattgagacctgccccatcggtgaataacggcgagtattaa

SEQ ID NO: 133691 - DNA, 432 bp, Enterobacter cloacae
atgactgagcagatagatttggtaaaagaagcagaaggtaaagggtttctgcgtggagtgatatttgctgttgctgaactgatgcggggtcacggtgatactgtgattagcaaggatgtgctggacacgttaggcgggcaattacacgaagcgtgtcgtgaaagcagtgaatatgatgttcgtgcgttgcgtgaggtcttttccgatttacccttcggtaacgatgcagactatgacaacctgcggcttgtatcgctggatttggacggacgagactgcgatcaggatgatgcctattccttcgaggtacgcggcgattatggcgctgaaacgctagtcattgcgcgctttgaagaacttgaagctgcccaagcctttatcagtatgaatgcttccttgatgatgtctggagaggaagtcgacgatgaataa

SEQ ID NO: 133692 - DNA, 1401 bp, Enterobacter cloacae
atgaacgatgaaaaatatatatgtcatgcctgcataggtgagaaatatgttaaagcagaaataaaaaactttggctcagcaggtcaggagtgcagttattgccataagcgatttaagaatgttcccgtctcacatattgctggtctgatgaatcaggtgtttgaagattattacgagccaagagaagcagattattatttcggtacaacctctggctcgacagcgcaggaagtaatttgtgacgaactaaaagtagatgatgaggatattattactgatatttatgattgtctctgtgatgagttcaatgattatcaggatatagatccaccaaattataatgaagattatgtgtatacaggacgagggtttagttcagagaatttaagtcgggcatggaaaaaaatgatccggtcactaaatgaagaagctcggttcttcaaccgtaccgttaaagtgttcctcgatgatttgtttgtcgatttgaaagagtttaaaacagagaaagatgaatctcctatacagataattgacggcgatacggctttgtatcgagccagggtatttgaaacgctagaggaagtggaagaagctctgacccacccggagcgcaatttcgggccacctccacccgataaagcccgttcaggtcgaatgaacgcacaggggatatccgttttttacggggcaacaactcaggatgtggcaatatctgaagtccgaccgccggtaggcagtcgcgtggttgtcgccgctttcagaccactcaaagaaatgcgtattctcgatatttcggctcttgatacacttatcttttcacgcgaaagtgtatttaaccccaagaccatacgtagtcttgaacgaacagcctttctaaaaactttctcacgcaaaatgacgctgccagtcttcggtaagcggcaggacagcgaatacttgatcactcaggcgatagctgaatatctaagtgtctcagagaaataccagctcgatggcattagttttcgttctacgcaggtaaaaagggaagcgaaggggagccgtcgcaggcacaaggcgccgggaggctacaatattgttttgttcagtaagtctgcgggggtaaaacactccgataagcatatgcgggaatatcaggtgcggtttatgcatgatttcgaagatgaacctggacattttcatccctcaatccatcaggtcgtagacgctgagccagagagggataatgattgggaatttcgttctgactttatgctttcccagcgcaaacatagccttgaaatgatccctgatggtctgacttattatcacattcagggggtctcctatcagaaaacttcaacagaaattgagcaaggaatgccagttatccggcccacggaaaaacgaaatccaatttga

SEQ ID NO: 133693 - DNA, 213 bp, Enterobacter cloacae
atggataaagcaaagattaatgacgaaccggctgctgcacctcagcgcaagccaggcactattagcccaagagttttctttggcggcttcctgttaggtggcattgtcgggcttggcctttcactgatgtacgattacaaagcgatgcaggcggtatccgtggctgcgatgtgtattgggttttactacctcgtgaccaagcgtgcgaagtaa

SEQ ID NO: 133694 - DNA, 291 bp, Enterobacter cloacae
atgaccagttccgttcctcccctgtccagccgcgacaggtatcgtctgatgttacaaacgtttccgctgctggcgaattactggaacacggacgatgactgcctgcgctatgacgaattgaaggaggctattggagtgctcagtcgtggcgagcaaatcatggcccggttctacttgtcggtctggaccggggagaatcacgactttgactttctggatgctgccgccctgctcagttcggacggcaaaaaaattattctgacctggtttgccgatcctttctggccgtaa

SEQ ID NO: 133695 - DNA, 624 bp, Enterobacter cloacae
ttggaaactgcttttttcgacaacgatgaatattgcatgcaaatggtttatgccatctgttcccgctaccgctatatcgatagtgttaaccagcgcaagtccattgttgaagacatccggcccctggtttacgttcatccccggcccgacagctttgtatcgtttctgaccgatgaactgtcccggagaggacgtaagtacctctgggatcagcagaactggcagaatgaccttaatctgcttattcgtgatctgaaagagctgctgatcattcgccgcatctcagaagaagtccaccttacccttgatgaaaaattccgtcaggaaagtcaggcacagactgatggccggtttctggaaatgcttttgacctattctccggcgctgccaaccgagtgtgtcgcgttgcagcttgtgagatatatcagcgcgtttccgcaggaaacccgttccgcagtcgctggcgtggtgacaatgattttccgccaccttccgtacccggaaaccctgaaagaatcctttcttttggacccggaactgcgtgaaagatactgccacccggaccaagatccccggctcagctatgccctttatctcgctgacgagctgcaattacacctttga

SEQ ID NO: 133696 - DNA, 777 bp, Enterobacter cloacae
atgttggaacgttctcactatccaagtgcaatgctgatgccggtcactgacctcgactggtcgcggatttttgccatgcgccagctcgccatttcttcttctgatgcaccggcatacatgctcgcgccagaggttgcactcctgttcagctatatgcacgatctgcgcgaacgctgttattttgaaacgttatggaatacaggagccaggccaaatgaagccctggcgctgactccacaggacttttcttttgatgctgttatgccatttgtcacgctgaaaacgcttaaacagaggaatcggggacgtggccgcccggagaaaaatgctccccctgttcgttcagtcgctctttgggatgccgattatcgcgcacgtatgcagtccctgatcaccacctttggtattcgtaaaaccgatctaatctggccgggccgcagttcttcttccgccactcagccagtttccgtatctgctgataccgtatcacgctggcttaatcgtgctttagctgccgcagaaagtgacggtgtcacatttagtgtttcgcctatcgtacccaaaaccttccggcacagttttgcgatgcacattttatttaaccggattcatcccaaagtcttgcagtcgctgatgggccacaaatcgtttaagagtacagaagtctatacccggttgttcctgttcgatgtcgccgggcagcatgaggttagtttcggattcgatgtagaacaggcgcggcaggctctgaggctcggagtgatgaaacaggactga

SEQ ID NO: 133697 - DNA, 207 bp, Enterobacter cloacae
atgcaatttttagaactgtttttgagtaccataatgaacccaccatcgtttaatgattggcaggccatgaatgatgtgagtgatatgatcgtgacgggtatagccatgttgatccgcttatcgactgtgccagcactgatttttttagctattgggctggctactctcattgtcacgagtctctggccgaagtgttctggcctgtag

SEQ ID NO: 133698 - DNA, 216 bp, Enterobacter cloacae
atgaagaaaattcgtggcgggattcagaagtgtccttattgtgggtatgacgaattttatgttcgggcaactgtaagtggttctacttcagtattttatcgttttgacggcggtagtggcgataatacgcacatgtgggattatgtgagaacgaaggaaaagaaaaccgcatactgcggcagctgtcaaaaacgtataggcacagtcgaagaataa

SEQ ID NO: 133699 - DNA, 297 bp, Enterobacter cloacae
atgatgaaagatagctttaatcacatgagaaaacagggcagcaaaactgaaatggttactcaatctcccgacaatttacgatgctttcctcccccggacgaacaacagcgcattgaacgtgctatcgaactggcaagtcgatttgggggaagtgacgaggtgcatcatcttcgctgggtaatagatcagatggttcgggagctggctggcgagcgttatgatcaggttgtcgccagtgcttgcgccggtgaagatggcccggatacctggcgctgggatacgggcatagcgccttaa

SEQ ID NO: 133700 - DNA, 507 bp, Enterobacter cloacae
atgggaaccggtatcgcgacacaagttcagatccttacagagcatggctgggagaatgtgcatgacgacatttttaccaggtacgatgagaaaacacatcatcccttctcagaacagaactacggcgttttcgccttccttgcagatgtcagaaactatgcctgcgttccggtactcagtgagccgcgaggactgccagctgtggaaaaggctgctgcgcaaatcgaaagcctctgggagtttaacggaacaacagagtggccggaccatgaaaataacacttcggctacctggtatctggtcagcgagctacttgagttcgattatgatgttgagttcgaaaacagaagaaatgacgcaaatcgcgataaccctcaccccccagggcgcggcaagcgtatgacgatcagagaatatctgaaaccgaagttttttgaggacctgcttattctaaaacggcttggagatccagacaaaacgcgggttgttatttcatttgccagttag

SEQ ID NO: 133701 - DNA, 474 bp, Enterobacter cloacae
atgaataacgcgctaaaggtattgccgctgataatgctgagcattcctgtagtggctgaggctgatatcactggaaaaattgtccgagtgctggatggtgatactgtagaaatcctggctgggaatgttgcaacgcgcgtcaggcttaatgggattgatgctcctgaaaaggctcagccttttggtcaacggtcaaggcaggcactgacggcaatcgtgggagggaaaactgtgcttgctgtcggagaaaagcgggaccgctatggtcgattactggcaactctgatactggatggccgagatattaacgccacacaggtatattcaggcatggcgtgggtataccgttataagggcctcgccactgagcctgaatatctgcgttatgaacgggatgcccggactgcacggagaggattatggtctgagaaggagccggttgaaccttcgatctggcggcagcggcataggtaa

SEQ ID NO: 133702 - DNA, 642 bp, Enterobacter cloacae
ttgacttcatgcgcaaagggaaagaaccatttcacatccacctctccggttctggaaattatgccgaatacaacaccgaaattattgattgagacatggctgagtaaactcagaagttacccgcctgaacgagccgtatccgtaattgacctctataggggagcacactggtcttgcgccaaagagatcctcaaaacgacacctaacctggacctatgggttatatcagctggcatgggtttacttcattgttctgaagaggtaattccgtatgaagcgaccttcaacaagttgccttttgcaccttcttcctggtgggaaactctgactgaagcaactcaaggagtacgtcgttccagttcgatagctcagctcatgcaaacatatcccggcgataattacgttatttcaggatcaccggtctacgttgcagctgttgaacgtgatatcacagcaggcatggcctctctgattaatcctcttgcacagttaacggtcattacatcaggcggctataaaggaatgcttgagccatatcttgtcagaagccatgcaggtatgctgaacagtctcaacgctaatatggtttgcctgaacatcaagctcgccagaagcatcatacaaaatattggatgtagctaa

SEQ ID NO: 133703 - DNA, 153 bp, Enterobacter cloacae
atgttaggtaatgagcatgaattgaacacctacataatactgggtctactcttgttcaccggggcagcttttctctgtaaaggcgcagttggcaatcttgccgctcttgctggcctggcaatgtctgtttttgcactaattatctggttgtga

SEQ ID NO: 133704 - DNA, 438 bp, Enterobacter cloacae
atgaggatcaataaagaggacaatctggagaactgcccgaattgcggcgaggatatgcctggcgggaaaatccgctgtacgcgctgccagcgtcagcacgatattgaaaatatgaccgaggcagagcaccgcgcacatgaagcgctgtttccgacaggcagcgctatgccgcagctacctctcatcacatacaccgtgggcgtgaaagctgtatttgacatgctgacgcagcaggaacagcagcggtacagtaacgccatacgtgaggctatcaagacagcatatcctgcctacgacgttgtggtgacactggacaacaccattggcggagctgactgcgaggtaagtaatgatccttatggtgaaaccgatatagcagaacatgcgcattctatcgcccacggagtctggataggggcagcgtggctggataaataa

SEQ ID NO: 133705 - DNA, 540 bp, Enterobacter cloacae
atggcgaccattaacgcacgcattgatgatgatataaagaaccaggcagatgaggtgctgaagctgcttaacattagccagactcaggctattgcagcgttttatcagtatgttgctgagcaaaagaaactgccgtttgtgatcacctccgttgtgaaaacaccgcatgatttattacgtgaaagttcagatatgttagctgaagctcttgcggtgatctccaatttacaggcatggactgaacagccggacgggattgaaaaggcaaaactgatggagtattaccgccgcctcgatgcactgtaccgttgtgccaaagataaaatcagccttattccagataaccgggatgctgaactggcactgaatgcttttaataaggctttgagtattcttgttgatacgcgaaatttcgggtacggctatgagaaagtaacattttctacgctggaacagactagttttgcattcgccgtccatgaatttgagagtaaagtggccggtttagttcactgtgtcaggaaaggagagctggaatga

SEQ ID NO: 133706 - DNA, 438 bp, Enterobacter cloacae
atgaaacacatttcattggttcagcctgatattcagcgagtctcaagtaaacagcctttctttggtgatttgatcccttgtggctttccactcccctctgaaggcattgaagatcaacctcttgatttgcataactactgtgtaaagcgcccttcaagcaccttcttcattcgatgcgatggcctttctatgattgatgcaggtattgcgccgcgagatttgctggtagtagattgctctattcgccctgagcatggagccattgttgtggcccgtgtagatggtgagttcacagtaaaaaaattacagcttcgtccgtttcctgcactaatcccaatgaacccagactttcccgtcattgaagtagagccggaacttcttgaaatttttggcgtggttactttcagtatcagggactgccttcatgtttctgcatag

SEQ ID NO: 133707 - DNA, 1263 bp, Enterobacter cloacae
atgtttctgcatagtgatgctaatgcattttatgtaagctgccagacagcaatggagcctagtcttataggtaagccagtcattgtcaccacgaataatgatggtgctatcgcagccttaaatactgaagcaaagtcactgggccttaaacgtggacagcctttgtttgagatccagcaagtaattcgggataaccatgtcagggtgttttcatccaatttcgtgctttatggggatttttctgcacgttttcataccacgattggtgaaagtgtaccccgccatgaaatttacagttgtgatgaagtttttgcatccctgcatggcatggataagcttgtcagcttcgaagattttggtcgggagctacgtgaaaaagtttaccggcatacctcgttgaaatgcggtattggcattgcggaaaccaaaactctctgcaaagcagctacctgggccgccaaaaagtacccccaaacgaaaggcgtggtcgtaataagtgaccccgccaggcgtgaccggcttttagcgctaattcctgtccgtgaagtgtgggggatcggcagcaggcttgctaaacgcctcaatgaaatgggcatagtcaccgcccttgaattagccagaatggatacacggcttgttcgtaagctgatgggagtagttgttgaacgcaccgtgcgggagctgcgcggcgaagcctgctttgggcttgatactaacccgccatcacgaaagcagataatagtgtcccgctccttcggtcaacgcacgactgatctcgaagacgttcggcaggctatatgcgctttcagctgccaggccgctgagaaactccgcagagatcgcagttttgcgggtgctgttactgttttcatacaaaacagccgccacagccaggctgaaccttatttctccgccgttgcactcgaaccactacctgttacacaggactcacgggatttaatccaggccgctcaaacagcacttctccgaatctggaaaccaggtgtccattatgcgaaagctggagttatgcttagtgacattggtgatggccgggaacaactggacctgtttagcaataagcagccaggaagaaacagcaaggccttaatgcagattattgataagctgaatttggcagagcgcggcactatctttatggccggtgagggggttcatcgcaagtataaaggcaaacagcagtggctgtcgccctgctatacgacacgctggaaggacatacctgttgcctggctaaaataa

SEQ ID NO: 133708 - DNA, 423 bp, Enterobacter cloacae
atgaataaaaaaacgcctctgaccgtgaacgcagtagctgaatatttatcgagcattacccgccgtactgctgtgttcaaaaaaatggatttgcgcctgctggggattgtacgtgcggatttgaatcgtattattgagacgcgtgaagcacagcttgaagaagaacggctgcggcagaaagaaaagcaggacaaaatccgtgagcatctttctttgctgcgtcaggacggtattgagccggatgagctactcgacaatacccggccccgaaagcggccctcgatcggtcagatgcgaaccttccgtattcatggaaagcttgtccattataaaggagtgggggtgtacccgcgtgcgctacgagagataatagagagcgaaggtgaagaagccctgaaacggtatgaagtttcaggtgagtag

SEQ ID NO: 133709 - DNA, 435 bp, Enterobacter cloacae
atgacagataagtttaacttacaaaacaagaggttgatggattccattgaacaaacgctattgctccttagtaaaagcggtggtgagttaatcaaagctgtcgcgaaaagcctcgtactcaaaatcaagccttatgatttcgttgagttcaaacattcagcgatttatcgcgcaattcgtacttacaacgaaaagcgtgatagcgtgatccgcctgtctggactgtacagcccgttgtttggccgtgaaaaagaggcattggaagaagaaccgtttagcttgatcgtcaatgtagatgaacagacgttcaagcgagggtatatctggtatagccctgagaaagacagagcatttcgcatggaggatttaagctattttgttctcgaacaggacaactatatccccttcgacctctccgttagtaacaaaccataa

SEQ ID NO: 133710 - DNA, 711 bp, Enterobacter cloacae
ttgaagtttacaaaactgacctttatagccttgctcattctggggtccagtccggtgctgggatcgtcaaatacgcaacaacagctcactggttttctggccgggcaggaaaacggagtcagcgcgaagcaagttctcacttccgatgatctgttcaataaattgatacaccaggaaagccggggaaatcagttcagtaaaaacggccagcctcttacgtcaccaaaaggtgctgtaggcattgcgcaggtaatgcccgaaacagctccagaagcggcaagattagccgggctggaatggagtgcatggcggtatcgaaatgacgagacgtataacaaggcgcttgggcgagcatatctcgactcgcagctggagagatacgatggcaaccacgttctcgcgctagctgcatataacgccgggcctgggagtgttgataaatggcttaaacgctttggagatccgcgcagtggtgagatcagcaataagcagtttatgcagttaatcccattcattgaaacccaggcgtatgtcgccagtatcctgaacgaaactcctggtgtgttccgctttacaccatcccgtaaaaaagctcctgtaggtgaaggtcataaaattgagtttcgagatacgcatccaggcattacgttcaacctcgcggttaaccaaacgttcagttatggaaacggaaaactggtaggtggattatga

SEQ ID NO: 133711 - DNA, 333 bp, Enterobacter cloacae
atgacccgattcttcttttcgctgggatcagctttaatggctttttcctactatctcatcttatggatagacccgacagtgttatcacaccgggcatcaatactaggtgtattaatcgcattcttcggtctacacatcggtcttaaacgcatactgaaccgtcatgttaggcatgtcttctgtctgtttgtaactgccggattgtttacgttctatcgctcgtttactgacgggaatgtgtttctgtacgcgctaatcgggcttcatggtgtagttgcactgacggtgcttttgaccgtccctcttagcattgagcgtagtgaacctaaatga

SEQ ID NO: 133712 - DNA, 291 bp, Enterobacter cloacae
atgagcgcaaagctatttggagcattgttggttgtgtgtggcatagccggtgcggtagtcctttggatactgagtaaaacatcttcgcaaacttcggagagtaatcaggtccggcgcttcaaactcgaccatgagtatgaaaacaaagggttcactgaaaaaggccagagtgaaggcttactcgatatcccgacagaaatcagcactgataaaagcaacgcttttgaaagcaaacaagcattcacttcacctgataagcattacgacagcctccccggagataaattctaa

SEQ ID NO: 133713 - DNA, 531 bp, Enterobacter cloacae
atgtcgaaaaaccttatgattggcctggctctcctgctcatggtctttatttatgcgctgtgctttcgcaaaaaaaacaatcacgaccggaaaagactttcagctgagaaaatcattgaggttattaactccattgacctcccggcccagaaaatcgcctacctacgtaaagttgacccctacgcctttgaagaactgataatgactctcctgcaacgaaaaggatttgtgattggcagaaacaagcgctacagcggcgatggtggcctggatggtcggtttgagcataaccggcagctgtggttgatacaggcaaaacgctattcgaatcgcatcaaacaggagcacgtcagtgcctttgcctctctactcaaggagaacaactgtagcggaggtatcttcgtacataccggtaagacacctgcatcggtgcgagagtacgtaaaggcacgctcaagcccacaaatagaaattatctcaggcgaccgtctactgaatcttttcgattcgaccgtaaagctaaaattctaa

SEQ ID NO: 133714 - DNA, 756 bp, Enterobacter cloacae
atgactaaaaatttcatacgaatcgcaatttacgggtggacatggtgttcatgggctattcgaaatttaatcttttttcccgctgcaacactgacccttatcatcgcatttttgatggttctcgatcactcttcacccggtcagataatggtgagaataatgcagagcgcagacaaggtaactgacggggttaactggacgtggcgcgaatgcccctcagtttccagcaattcaaatgtatttccgccagaaccatccattcgcccctcagctttggaagcgaattgccctgaaatggtatccgatgccagagggtatgccgagcatattgaccgaaatttcatgccattagtctggatatggtggacaatcatggcagctatcagcgtgacagtagaacggttccctgtgtttaaacatcgaacccgccttcagatgagaactattactacgcgggaacagttattagtgaacggaaaagtccgagaaagactagccacacatattgtgaccggcgctcatggatacgaaacactttgcacaagcggctgtaacgttagttacaacgataaacgggtattaattgaaaattgtgaaaaactggctgaaaacgcactgcccgttacctgtagaacctgttttactatctggaacgatgtacattcttatcagcccggcgacttcgacatggaatcaggcaaaggaaactttaccgaaaaagacctcactgagatcacgattccaacagcacattaa

SEQ ID NO: 133715 - DNA, 213 bp, Enterobacter cloacae
atgctcaacgtcgtttacgatcctcttaagcgtcgattcgttgacggtatcagtagttctggcaaggctttggaaaagctggaagagctaaaaacgtatcgcgaaaacccggtgacaaagatgatcaatgaatttactgaggctgagaagtttggcgacgttggtgagtatcgccgccaaagagctgaacggatgatgcaaaacgcggcataa

SEQ ID NO: 133716 - DNA, 858 bp, Enterobacter cloacae
atgaaaaaatataaaaagaacggggcaacaggaaaagcaggtgagtattattttgcatattggatggtccgcaattttaaatggccttgtcgattgcttgatattgacgttggaatagatgctcaggttgaaatctttgaagatgaaatatcaactggtgacttctttgcggttcaaattaaatcaacggttgaaaacgaccctgacatgtctattgatttgtcagactttatgtattggcaacagttggaaagccaagtcattttagttcgcatcttaatgggtgataaccatagtgaacctgtaatgtactggaagtcattttcaaaagaatacttagatgaaattgttatggaaatgggcacgacaggctttcaatccaaaaaagttttgttctctgaatctgataaattaacctcggagtcaaaagactcttggaaagaggcgatactttcagacactgataaacggctgataagagtagcaaggtcattattaaaatcccttaaagagcatgacttggataactttgttgaagaagactataaccttcagaatgagaataaggattttatatccttcaatagtgaaatcgacacatttaaccatcatttcattgattatgaggagttaatagatgcagtttgcctcgacagaagattgataatcagagcgcctttcataggcgaggtaatagattattttgaagaaaatgaatcgatattactctacatgtttaataatgcttttaatgggataaaagtagggagaacccctaatcaaatacttcctagaaacttgagtagagaaatcaaaagacagacagaggattgggtttatcacatgacgggcttttaa

SEQ ID NO: 133717 - DNA, 5007 bp, Enterobacter cloacae
atgcttagtgttgctaaagttacaaatgttgctcaggcttcttcgtattataattcgcctgaccaatattatgataaggatagcggtgatattacgtctcgatggggcggtgctggcgctgaaattttaggtctggaggggccagtcgaatctgaagattttgttcggatgcttgaggggcgtataagtcccgaaattcatttgggtaaaaatggcggtgatggaacaatttcacatgttcctgcctgggattttactttatcagccccaaaaagtgtttcggtgttagcattggctggtaacgataaacgcttagttgatgcgcacataaaagctacagctgaaacaatgaagtttttagagaaagaatatgcattaacgcgtatatcaaatggcggtaatactgaatacaccaaagttaataatctggtatatgcaagctacgtccatactgaatcgagaaaacatgatccgcagttacactcgcataatgtcgtgatgaatgcagtgatggatgaatcagggcaatggcgaagccttgaaaccctaaaaatgtttgaaaatcagcttggaattggtctggtttatcgttctcatttagccaaattagtaaagcaattaggctacgatctcgaaattgatcatgaaactggcctttgggatataaaaggcgttcctcattctcttttagatgcgttctctaaacgtcgcaaagaagttcttgaggcggctaagcagtatggactgtttgatgctaagtctatggagaaagcggcgttgtatagtcgcgagtccaaaacgcacatggaatatgacgagctgaaagcctcatgggaagaaacagttaaagaaagtggggtatcacttgatgaggttattaaccgctcctatgacaatgctaagacgtttaaaaggttagatgaccctcaaccttcttttgacagcgaaaactcttctgaagcggttacaggcgtttctgggcctaaagaaaatagtcactcagtagcgccggagcatctggttggaaatgaaactgatttttctacaccctccaatgatacaaatatgaatcatattgagcgtggcgaaggagtagaggtaagtcccggcaaccccttgacgaatgcaggcctactttctggtattgcgaacattaacggcactgagcgagctacagagaagtatgcacgagagtacatcagccatcaggacctttccgcgagcgagctggcggcgattctccatgacgtcaggcttgcctataaagttaaggcggcagacgaagcagtgtttacgcacagcagcgtaatgagtgaggcaatgggtcttgcaataggcgaggctctacctggtgatatagaacaaatactccgggcgatggtcaactccggggagctgcttccccgtacttccagatcaggaaatggtgaagctgcttacaccacgccgaaagcattcgaaaaagagcgtgaaatggtcctgaccatgcttagtggtaaggagtcgcgtcaggccgccggtgatgtttccagtatcgctgcatacatcgatcagtttgaagcagaaaagaccgtagaatttggttcacagtttgctttctcgccagaccagaggcaggcgattatcgatgcggccacaaacaaagacctggtatccggcatacagggattcgccggaaccggtaaaactacgttactccagtgtctgattggttacggtcaatctaaaggctttagcttcaagggattagcgccaaccggttccgctacagagacgctcgcgaaggaaacaggtatcccggccagcacggtagattcattcctgtaccggcgcatgaaaggcactgtcagcacccgtgaaatctggcttgtcgatgaggcgagtcttgttggggctgacaatcagcatgccctcataatggaagctgagcgaagcaatgcaaaattgttgcttcttggcgataagaaacagatggaatcagtagattggggtcgcccgtttgctgtattgcagggcttcggtatgcaaacgtccaatgtccagaccattattcgtcagaaagatgaacagctgcgtgctgcggtgtacgactctataagcggtaatttttcacaggctttttctcgtctgaaggattccgtttatgacatggaaaaacacagcatactcgatgactatctggctctctctcaggcggatcgggaaaaaacgttggtcattatccctgataatgagggtcgccaggactttaatgcgagcgtgcatgaaaagcgtgttaatgatggtgaactatcggccaatgaagttgctgtgcgtagcctgctcagcgaaaaccttaatgaagctgaacgtactgacagccggtattaccgatttggtcagattattgagtttcagcttgatcacggtgagtttaagaaaggggagttctggaaggtagcagaggtttccggtaaggagttattgcttaaaagcggagatggtcaggaaaggaaattcaatccatctgaaattaccggtaagtctaagtttgcgattgatgtctttcgggaggacaaaattctcttttctgaacaggaaaaggttgtctttaccaagtcgcgcaaagatcttaacgtgcgtaacggtgatgaatttaaagtatcccgtatcgattcgacctcaggaacattcatcctcacagatgaaaaggggaaagagctttctctggactcatcaaaacttcataacatttcacatagttacgcaatgacgtcatacaaggctcagggaaagactgtggatcgcgtgatggcgcaaatcgagtcctggcggcgcaatctggtcaacgagcgtagtttctatgtcaaccttagtcgcgcccgttacgaggctcggttgtacgtggacaatgttgggaaagtaattaaagccctttctgaacatgacgccaataaaacaacatcactcacgggtttttccaccaagagtatgaagcgagctgctgagcaccttcaggctgaatctactgatacccggcagctgtatgccgatctgaacatagccactcaaaaactggcaaacaagcagggagtgtttagtcattctgcgttggtggctgagacgctgaaaaacacgctgggaacgtatgatgtcagagatatagagactgctatttacgccatgcgaatgcggggtgaggtagggctttctcacattaatcatgaaaaagtgaatagtgagaattactacaccatgccacagaacattcgaaatgaagcccagattgtgcggcatatgctgcaaggtaaggatcgctatgcgcccattgccgggaaatcggttgtcagtcgttatctttctgcgagagaagataaggcccggcagggaatagctgagcctgtctcagcggcgactcaggccgcgctgactacagtgatgaccagcagggatgaagctattctcatcaccggtagcgacctgagtggccatcgtgatgttatgagagaaattggcaaggatatcgccaaagagcggggatatcgtgtgaaaggattttcgactactgccgagggggttaagcagatgcgtgaatctatgaagttctcagccaatatctaccagcaccttgaccagatggaagctaagattgcggcaggtcaaatcgtccgaccaggtaaggaactctgggtagtggaaaacgtttctcaaatgggggctgagaacgtgcttcgattgcagcaggcggcaaggtatgtcggggcgaggatggtgcttgtagccgaccgacaagagaactctatagcttggggcaacatgccatcattgctggccgagcaggggatcgccaccattgattttgacaaggcgaatcgttcgctgaaccctgagattaacctggcaacagataagctgactcaggggaaaattgaggacgcgcttgctcatgtcagtccgatgatgagtgaagtacgcgacctcgataaccaaaacaatgatcgcacaatccggctgaatgttattgcaaactcttggttgaacctctcgccagaagaccgggctaaaaccgcaattgttatccctgactacttatctcgcaacaaagttgatgtgcaaatacgcagaggccttcagtcagagggggttcttcagggtactcctttaacgacggcgctttatcgtaatgcgaatctcgatccatttgagaagaaggttgcgacaaactacaagccaggccaggttgtgcagtttgaaagccagcgaccgggtatagagaagggcgcatattataccgttgaggcggtgaacaaggccggtaatgagttgatactggtatcgcttgaggcggggcatcgtgtaactattaacgcagctgatatcgctggtagccgtaacaactccgtgcaggtctttcatgtggagcaaaaacaaattcagaagggggaaaccctgcgtttcacgcgcaccgttcccgctgacaagttagagagtgctgacggaaagggggtgtcgtccaaaatgaccggctcggtagtttcactcgacggcacgaaggttactctacgtcttgcaaataatcggcaggtcacggtggacgcggccagctggaaacacatggagtggggatattccaataatatgttcaatatcaaagataaacagtttgataatgtgatcacgttgatggagtcatggaagaaacagtttgccactcaggaagcgcttcataacgcgctgaccaaaacggcggttaatctgcgaattatcactgatgataaagagaagctgcttgatagcctgcgcacaaatcccggtttcaggcaaacagcccttcaggatcgcaaggtatccattaccaaaagcgacatggccgcatttgataaacagtttggaacggggttgggctttggcatgcgatcactcatgaagctggaggctgcggtggacaaagcggttacttcaacagtaagcaaggtggttgagaaaacacgggaagttgcgcaaaagacgcggcaaaagtcgctgtaa

SEQ ID NO: 133718 - DNA, 2274 bp, Enterobacter cloacae
atgctcgaccagaaacaggaaaaaagcaccgtatcggacctaaaccgtggcggtcaggtattgatgcacttcatccgtatgttgcaccaaactctgacgaggtacttcaagattgtcttatgtgtgtttgttattgccaccaccgccgtgacttaccaaatcactgataagactgactggtacatggggttaaagtatggctactcctacacattagttgaactgattggtcttaagaaaggtaaaaccacgcttgagctacctgatggccgtaaagttatggttagggatgctcagatagttagctcaccgacaatgcaaaatcatgcggatgcgctgatatccaacctgataataagccttgttatctcatcaattgtcgcacttattgcagcatggtatctcttccgatttattctcaacaaaggcaagcaggaaagtaaggatgagcatcgtcgaggtgctgaacttgccactgtaaaggaactgattgaagcagctaacgatagagtgaaggaagatggtcgtctttctcggatatctatcgcgaatgtacctcttgtacgttatcaggaaaactctggcatagctcttttaggctctccgggtgtaggtaaatccaccattatcagggaattgctgcgccagctaagagcgcagcaaagaaaggcagtgctttatgatatttcaggtgaatttgttaagcgtttttatcgtccgggaaaagatgtaattctgaacgtatttgatacccgatcacactcatgggatttctgggctgaagggaaaaacccggcaatgtatgaccgtatggcgaaagccgctataccagacaacaatgggggaggagatccattctggattgaggctccacgcttgttattttcggctttgctggaacaactcggaaagcgctatgacgttccctcagtcgagcacttgatgaatatcattcttcgtatgccaaacgacaagattgccaacgttgttgctacgaccgatgctcgtaacgtcatgaatttagatctcgacaaattggccggttcagtaagggctgttataaccgcttacacccgaaattttaaacaccttgctctccctaccggcccacgattttccttcaaaaattgggcacaggacgaagattctgatgcctgggtattcatcactgtgcgtgacgatatgaaggatactctcaagccgatgattaccatgatgatcgaatctgccctgtctgcaattctgactctcgaaccatctcaagaccgtttaattggtacgagcatcgatgaagcaggtactcttcaggagatcccctcgctacctgatttcatgtcaacatgccgaaaatttggtggcttcccaatcttgggctttcagtccaatgctcagactgatgttgtctacggggaaaagaaaagtcagatcctgatggatggtatcggtgcaatagccgcttttcgtatcaatggtagtaaaggggctgcatggttagctgaccagttgggtgatcaggagacggagaaatcgtcggaaaatacaagctacggcgcaaatgatgttcgtgatgcaacatcgataaatcgtcaggacaaagaaggaaatctaatcctgagaagccagatcacagcattgccggataacacctgttatctgaagttaggtcgcggcttgcctgtagcaaaaatcaagttcccttacgactatatgaaggagctgcatccaggcatcattgaaaatgaagcattaaacgacacctccttcctttcgcagttgtccaaagagaatgagatttcccctgaacatgtagtcagtatcgttaacaaagaaaactccagagagaagcgtgaaccgcagaagttcaaacaagggagtaagccaaaccctgatgcgggtaaaacgcaggagcaagtcctggatgaagttattgataactctgcaccgccggatggcagtaagacgacgtcgaacgccgatgtttcgaatcccgtcgcgcaggccatgtcatctgtaaagtcgaaaacgcagatgaatgcagttgctcaggctatgaacgctgcaaataagaaacagtctgacgcagatgatcaggatgatgaaggggatttctctaaccttcaatttgatacgcaggttgctcacgattttctggcggagtatgaaagttcattctcaactgagcaatcaaatacggagaaaaacagtaacaatgacgtgactaatcgaaataatgagaagtcatttgaccagcatgaatatccaggaggcatgtaa

SEQ ID NO: 133719 - DNA, 351 bp, Enterobacter cloacae
atgggaaacgttaagaccaagcagcagattcaattccgcttatcgggagcactggatctagcgcttcagaaggaagccgcaaggcggggtatgtctgtaaatgagctggcaaaaaaaatagtcatcaatgagctaaccaatgctggaacgtcaaccttcaaggcagatgtgtctcttaagcatgtactgtcctcttcctacaacattattcacctggcggtgttcatcatcatgagtgcaaatcctgaactcagtgaagatgctgcaacagagattgccagtaaatttatcttctcaaaaagtaatgcgcgcgtaagcaacatcatgaaacagctaggcgtggaggactaa

SEQ ID NO: 133720 - DNA, 3864 bp, Enterobacter cloacae
atgtctcaacttccaaatgatagctatagccaagaaattggtcgattggcacaaagagccctagtaactaaaatgcctcgcgcatggatagagacggcgatgtctggcgattcagattatggaattgattatcaaatacaactaaaaaattcgttagaccaagttgaatataatttctacctacagctaaaaggaacgacagagccgtcattaaatcttgatggaacccttagctatgcatttaaatgctctacattaaattattatcattcccaagattccttggttatggttgcaattgttaatttaaaagataatattgatcagcttcatgaatgccccatatattacttatggcttgatgatgcatggttcaatgagcacaacctaaagttgcagacacaagattcaattacattgcgaataccaacgaatcagttgataactactaagttggatatatatcaatttcatagaattagattcgaagaaagaatggctttaacagacttaagtcgtgaaattaagccatatacagatgacgtggtcagtacaattagtaacattgcaaatagtataactgataaaccgttttatttgaaagctattgagcataacggcgatgaaccttggatagaaaatcctgagggctactacccaacagaacttaaaatcatagaaaactacattaagattaataaactcaaacctgctagcgatgtaatctcaaatcttgagaataaaattgataaaatgaatccgcacgaggtagcagagttatggtatcagaaagcaaacttaatggtacttttagataatgtcaatgaatctcgagaattatacaaagctgcgtctaaagcatcagataaggtaagatatttaataggtgaattggaatcagacctaagatatgagttttacagtcaagcaccaataatcttggaaaaattaaaaaaatacgatgatagcgataagagaattttatttatcaaggtaaaatgtatggcgcttctcggctgtgcacaggatgcaatagaattaataaacgaaaagcacccagaatatattgcagctaaattagtggtatatactataatcgatgacaccgatggtttggataaactcattgactcaattgatatagattcgttaaaaaccacacgagaaaagctcgctatccatttcattgctggtcgaagagcatatttcaaagcaaacaatgaaaacattgaatatgataaagttatacctatccacggtcttccgaacgtaaatttaacacaattaatgcaatcctatgaacattataaatcagcatggattttaacagaggagcttggctacccacaagattttactctattactagatattagccctctagcttttggtttttttaataatatgtcagagctctttagacattttgacaatatcctaagagaaagacctcaacatgctgaagttgtctatatttatacccgtctgttgttcaatcaacaaaattaccaaaaagtaattttgttattggaaaataaaaaatgtgaacttgatttggacgatcaagtgttactgtttttatcttattataatgccaataaactttccaaagcattatccgttttcaaagcaatggataaggatattttgaattcagctttgataaataagacaacacttttttgcatagcttcaaaagttgcgagagaattgtttgaaatttctctttctgaacactatatgtcccaagtaaagttattcccagatgcagacattgtaattgcattctctgattttttagacgaaatagaacaaaataaaaatgacattagaacaagtttaaatgcactatatgcaaaatacattagcttgggcagacccctttatcttgctgagcagttgatgaatcatctacagatgaaagatttggatgaagcagagaaaataatcgatgttgcatcaacgattttagaacatcatggtttaagtgaaaaagataattttcaatacgctaatgcaatgatagctaagggtttttacagcaaagctcttgaacttattgacacatctgtccagaaggagcagattgatccaaattggcattttctcaaagctttagctcttcattataacggcgagtctggcttggccattgatagtattcgtcttgctttggacagttcacaattatccgatgaaactctcaaattttacattcagttatgtaataaatttggcatggcaaatgaagttgaaaagattgttattgaattaatatccaaaaccacggaatctaatataaaagtccaatttttagttcagttatttcatctttatagtaaggatgacatttataaggataaacgactaccagtactaagacagattgcacgccatgttaatcaagatgatcctgacgaagaaggaaactttctcatgctagtcttaacatctgaaaaaaatgatgatgaggttgagttttctgagtggcgaaaacggttattaacctatactgagaaattcccagattcaactcgtttaagaagagctatagtgaatcctgaaggtccagcagaagagtttgttgaatcgctcaataaattgactggagttactcctgaacagattgaaatatggaataaaaataagcaggaaatccgtaacggaacgctgaaagtgccttttgctttgctgggatactttctttcagaaacacgtgatatatttacatcttggctgttatctcaatcagaaccagatgaaaatatcgagtttaaaatacgccattctagttttttccctcaggatctttttaataaatactttgatgaaatgtcgtcgtgtattttggaggaaacaactctattaatattatctgaattagacgttctagctgattttttaagtttagttgataagttttcaattttgagttcagtttttaataatatcagtatgcacgcgcaaagtttcatacatcatgataaatctcgtatagccatgaaaatcctgtcagctataaatagccaccgggataaactgaaaataatagataataataaagataatataattgaatcttataccttatccgttaatgtaagtaatggctttttcatttctgatgattcctacatgcaaagctttgtcctttcctcgacaaataataaaacaccggttaatagtattaatgttttactttttcttatggacagagggaagttgaatcatgctgatgtatgccatcttgttgccaagctttgttctctcggtatatatcaacccaatatgagcactcagttattatctgaagtatatcaacatttctttaatctaagcaaaggtgataatatcttaggaaccgatttcataaaaatattctcaagtatttttttatcattacgcccaacacatgaagcagcatctttacttcttcgtatgttgttcaacgcgtcttcatttgcgcgaacgttaccaacttctaatgtactagtcatgctattacgtacatttattgaggtacatccttttactaccatagagcgtttcttaacgctttggtttatacaacaatgttcatataatatcgttgcagttgatatacaaaacgcacatgaatcattggtaaataattctttaacctatgatctttataaagtttcaatgtgcagtatctcatctgactttcaagatgaggagtacctattaacatttatcattgatgccctaaggagcgttgagcgagacaaacgtccacagctattctctgctataaaagaatgcttcatcccgctaacccataccgcccttaccttagaggccaaataccagtccatgctttttaatgaccaatatatttcttga

SEQ ID NO: 133721 - DNA, 1119 bp, Enterobacter cloacae
atgttaaatttctgcttattaaaatgtatctttgaaaaagtagactttctgcgttacgctcagaacgtatcatttaccccgatttttcacgcagcgcgccggacggtttccggcccggacggagcctggatgaccctgatgcctgatgatgatcctgagctggccatgtcgccggcggtcattcccccggatgtggatttcctgccggcgctgatcggcggcgagggtccggtcagtcccgccagggcctacctgctttccctgaattccccccgcagccggcagaccatggcctcgttcctcagcattgttgccggtctgctcggcgctgcgtccctcgacgcctgcagctggggcagcctgcgccgtcatcacgtgatggccgtgaccgagctgctgcgtgacaccggccgggccacggccaccgtcaatacctacctttcggcactgaaaggcgtggcgaaggaggcctggatgctcaggctgatggatgttgaaagcttccagcacatccgggcggtgcgtaacctgcgcggcagccgtcttccccgcgggcgggccctgccaccggcggagatccgtgcgctgtttgattcctgcgaggccgatgactccagcatcggggtacgcgacgcggcgatgctggccgtcattctcggttgcggcctgcgccgctcggaggccgtggggctggatttgagtgacgttgtcacagatgagcgggcactcagggtgctgggcaagggcaacaaggaacggctggccttcatgccgatgggaacctggcagcggctcaggacgtggatcgatgacgtgcggggagaaaaggacggaccgctgttcacccgtattcgccgctttgacaccctgaccaacgaccggctgaccgaccaggcggtgtaccatgtcctgcaggtccgccagcgccaggcaggaattgcgaaatgcgcgccgcacgatttaaggcgaacatttgcgaccgccatgctggataatggcgaggatctgattaccgtaaaggatgcgatgggtcacgccagcgtcaccaccacccagcagtacgaccgccgcggcgaagcgcgcctgcgtatggcgcgagagcgtctggatctgatatga

SEQ ID NO: 133722 - DNA, 417 bp, Enterobacter cloacae
atgaggcacatcagactgaagacgtttatccgaaaccaggctatcgggatactgaaagacagtagtgaggatacggaaacccgaaaatggactgacctgttaacgctgaaactgttttatgccctgatttttaccgctgtggtcgaaagggtatacgtgaaatgtgccggtgcaacgctgagtgcgatggcagaaccggccacagttgatcgcgccgaacagtttacgctctcgcttctcatttactatccgcagtacctgctgtggggcgtaatggccgctatttgcgtactcattgcggtgaatttactcatcagcggctggctccatctggccacatatttttgctgcaaactgaaccgtgctgatatcccggcaggcaaggatacgcaagctgtggaggtgcctaatgattaa

SEQ ID NO: 133723 - DNA, 492 bp, Enterobacter cloacae
atgacaaaaacactatttaccctcatccgcgatgcagggcgggctgccctgtattccttcgtcctcgtcccggcactggtgctgtatttgtttgtgatgctggcggcaacagacggctcactttcccggcaattcctgacgacttttcatgacctgactgatggcgtacctgccggcaaggtgatggggtgcgttaatgaacatgagatggcaggacgcttctcgccacctgaacccggagagtcattaaagccagtgcctcctgccttagtgaaagcaccgcttgaagtgttatgtcagcgtgggcccgttgacagcgattcatgggcgcgttcggtggatgcgatgttgaggaacctctgggtgatggcggtaatgtttggtgccggattgtggtttgtttcccgtcgtctctctctgcctgcccacaagtgtacttcacccgacgcacagtcggcgttgtttctacagaaaaaggaaaaacaggaatga

SEQ ID NO: 133724 - DNA, 1011 bp, Enterobacter cloacae
atggcgttaatcagctgcttcaccggccctcaagggctgcaggggatgctcacctgtttgcgcgatactgaggggatgaccggtattctggtcgtggttgggttgctcactggctggcttgttgttcagtacctggcaggtgcccggcgtgaacgccgggcatgggagagccgaccgggaatgcccgttcccccggcccagtttggcagtgcccgacatgccgctgcggttcacgcctttgctaaccgggaatgctaccaggtgttgctcgctgagctggagaaaggcctgactgacgagggctatgaactgacgcgtgatggatcactgcgggtggagatgtcagaggctgaccgacgaaaaatcagccgtcggattttccgggcgcgccagtgctatacgtcgccgagagtgtctgagctggcgatgcaggacagcgaggatgcggcagtgaacgatggctacgccggcacgtggctcagcgtgcttatccggggcagtgagcgggaaggatggtatatcacaaaacctgtaccggaattcgtcccgacgaactttcctttaaaacaggtaatcataactgtcagtgcaaaacggtctgtcctgacgcgggatgtggtgagaatcatcaacgaaatggctgaaaaagtgaaaacccagtatagctttcctgaaacaccggaacgtatttcaggtggggtaattaacagtgaactgttttatggggctgagcagcggcaggttaaggtggcaccaggctggtttagttctccgtctggaaatgatgttcctgacgatatcaccgaaggactcttcccgccggcggggatgtcagaataccggcatttcatcgtcagggcgcaggcagggcggttatatacccagactacacttgccttctatattgaagaagctggtcgcaggatagagcagggggaatccagcggagcatgctacgaagatgacagcggctatgctttcgccgtgacgcctgcaaaaaacacgccctga

SEQ ID NO: 133725 - DNA, 276 bp, Enterobacter cloacae
atgtcactgatacacaatacctctgtgccgtctgtgtctcagcatatgacggatcacaatgctaccaaaggctgtgacgaagccgtgaatcaactctctcagctgtaccctgaaatcgcttcatggcaaccggcgctgatcgccggtgcctggtatcagtggtgcactgagaacacgcttctgccggcggtgccggaaaaacgcgacgaggcgtttcccctgtacctcgtcagggtaattcgcaacagaatggaggagatgaacgcatggcgttaa

SEQ ID NO: 133726 - DNA, 423 bp, Enterobacter cloacae
atgagggggccacgcacagatgaccgcattagttttctgagggggattgaacgagactggacagactggtctgcaggaaaaaacacaaaaccccactggatatttttggtagggatattaaccgctacagggatgttgatttttagcttctgttcaggcaatcagaggcttaccgtggcttccattgctattggaatagcatttattctcgccggattgttacagaccggtgaaacatgggaagagagagtacagaagaaaattcgggcatatgagccgcttgatattgatgccatgcgcaccctggccgtctctgtttttcacaaggatgagctgacgcaggaagaactcagacagtggctggacgcggagttcagcgccatttttgatgccgctcttcgtgggggaagccggaatgcgtga

SEQ ID NO: 133727 - DNA, 522 bp, Enterobacter cloacae
atggcttcaccggatggacaggatgcacacacccgacacgtcggaacggcgtggcgccatcagagcgacggcatcagccggcgcggtgaaggcgttccggacggcacggccggagaagccgcagcccttgacctttgccatcagaccctagccgtatggcccgaaacccgcaggggttcggcggagcctggcgggtgcgcagcggccgccctggcggagtggggctcgacgaccggacagcaacgctggccgggagccgaagggggccatcgccctgcccgttttttgggttatggccacggagctgcagcggagaaagttaaccagcaggacgtcggttatgatcgcaagagaggagagaagcactgcaacggggaaaggcaggagcgccggaggcgctttcgccctccccgtttccccgaaggggtagcgttttttgcggttgccccgatgatatgcaccggggcctggatttccgctcagatcggttcttcgctgtcacctccgttttcctgctcatag

SEQ ID NO: 133728 - DNA, 426 bp, Enterobacter cloacae; identical to SEQ ID NO: 105762

SEQ ID NO: 133729 - DNA, 900 bp, Enterobacter cloacae
atggagcagattctgccatggcagaatatgaccgctgtcatcgagccgttttatcccaaggcgggcaatggccgacggccctatccgctggagaccatgctgcgtattcactgcatgcagcattggtacaacctgagcgacggtgccatggaagatgccctgtacgaaatcgcctccatgcgcctgtttgcccgattatccctggatagcgccctgccggatcgcaccaccatcatgaatttccgccacctgctcgagcagcatcaactggcccgtcaattgttcaagaccatcaatcgctggctggccgaagcaggcgtcatgatgacccaaggcactttggtggatgccaccatcattgaggcacccagctctagcaagaacaaagagcagcaacgcgatccggagatgcatcagaccaagaaaggcaatcagtggcactttggcatgaaggcccacattggtgtcgatgccaagagtggcctgacccacagcctagtcaccaccgcggccaacgagcatgacctcaatcagctgggtaatctgcttcatggagaggagcaatttgtctcagccgatgccggctaccaaggagcgccacagcgcgaggagctggccgaggtggatgtggactggctgatcgccgagcgtcccggcaaggtaaaaaccttgaagcagcatccgcgcaagaacaaaacggccatcaacatcgaatacatgaaagccagcatccgtgccaaggtggagcacccgtttcgcatcatcaagcggcagttcggcttcgtgaaagccagatacaaggggctgctgaaaaacgataaccaactggcgatgttattcaccctggccaacctgtttcgggtggaccaaatgatacgtcagtgggagagatctcagtaa

SEQ ID NO: 133730 - DNA, 1416 bp, Enterobacter cloacae; identical to SEQ ID NO: 105737

SEQ ID NO: 133731 - DNA, 507 bp, Enterobacter cloacae
  misc_feature (466)..(475): n is a, c, g, or t
atgactcgtattgcattagcgccttcaaagatggttttgcttatgtctttggtaattactggtgcccacgccagccctgagcaacccctaataaaagatacgccctttgtatctggccaggcttataagaagggtttcttctggtatgacgatcctgctaaaaaaagcgaagctgaagaagaagaggttttgccaccaaccggtgctgctagctcgccttcaaaagaggaaatggtagatttaaattcaaaatggctaaaagagaatatgcctcgactgttaacgcaggcaatggataaccctaccgcagaaaatctatcacgttattacacggcgcaaaggttaatgctggatatcagtacgcgtttttctgacaaatcaaaagattattttcttaaaaacccgatgatgtctgaaaaacgcaggcaaccagtggaaaaggtggccgggctggtagacgtcatcnnnnnnnnnngtggcactggatgctcaccgcactgttgttga

SEQ ID NO: 133732 - DNA, 399 bp, Enterobacter cloacae
atgtctacttatgcactgatcaaggatggacaagttatgaatactgtcctgtgggatggtgagggtgatattttcgagggctatgagactgtcaaaattgacggtcttggcgtgggtatcggctggacatatgatggaaagaaatttactgcgccgccagtaccggaacccactcacgaagagcttgttcgacaagctgaggtcgagaagcaggcattaatcaacgatgctaatagctatatcgacggcaatcagtggccctcaaaactggcgttaggccgcctgagcgatgacgataaagctctcttcaatgaatggcttgattatctcgacgcactgggagcagttgatacatcaacagcaccgaatatcacctggcctgtaccaccagcggcttaa

SEQ ID NO: 133733 - DNA, 957 bp, Enterobacter cloacae
atggctaaaaataacttcaaacctttcgccactggcgccggtgccaacgtgacctcgcaagccgactgggaagctctaaccgcactgcttacgggctttcagtccggtaaagctgcgagtgcgcaggtgaataaagcccttcgtcagggaacagtgatggcaagcgttatcggacagttcatcgcagacagtaccggtcaggacgttcttgataacggaaacacgtcagcgattctgactaattttctcaatgccctgaaagccaatacaaccggacgcctgctaaatgtgcgcactttcactgcgagcggaacgtatacgccaacaaccggaaccaagaaaatcagggttcgcatcgtaggtgggggaggggcgggtggtggtgccgccgcctctacctcatctgggacattagccgcggggcatggcggctctgcgggaacttatggtgaaacgggcctgattgatgccagttctttatcttcagttgcggttacagttggatcagctggcaccagttcagctggcgggaacggtacatccggtggagcatcatcattcggtacatttatttccgcgcccggaggtactggaggaaattacggtgcatcgggaacagctactttcagtctggtgcctgatttagctcaaaccgctaattgttctggttccagtgtcctgctgaatgttccgggtgaggggggatggggacaaatgtcctttgcaacaggtacggcaggtggaacgacaacaacatcctcggcaaaggggggctgtgggggaaactcagtgctcggcggcggtggatacgcactcacaaacaattccgtgccgggttctggaacaggttatggtgccgggggggcaggcgcggcgacaacatacattaatggtacttcggcagtagccggtggtgcaggttcttcaggaattgtcattattgaggagtatgcgtga

SEQ ID NO: 133734 - DNA, 681 bp, Enterobacter cloacae
atgagcaaatacaccgaactgatcactaactaccacgctaccaagccactcttttttgaccatatagatctgagcacccgcccgctgattgatgtttccagcactatgtcagggcttgtaacagcctttgatatcgatacggcggtaggagtgcagctcgacacgctcgggctttggatcggacgcagcagagtaataagccagccaatttctggcgtctatttcagttgggacacggatggtcttgggtatgatcagggcgtgtggcaagggccatatgacccagacgccggttatacaacactgggggatgacacctaccgcatcattctgaaagaaaaaatcgctatcaacaactgggacggccgcaacgactcgctgcctcctattcttgacgctgcgacagcaggctctggcctgaaaatgcagatcgtcgacaaccaggacatgacgatttcggtctgggtatttcccgagacagatattgctgatgtgtccctcgagctgatcgccgcgattaaacagggctatctgacagtaaaagccgccggcgtatgggccggtgatgttgaaacaccttcgatagaaacaccgtccgagggatctaaattctttgggtttgacatggataacgaatacatcgccggatttgatgatggcgcatgggggaaattactgtaa

SEQ ID NO: 133735 - DNA, 1200 bp, Enterobacter cloacae
atggctttgaacctcgacacgctggggctatcggcaacggtaaccgcccaggggattagtgcgcctgattaccagacaatcctcgatacactgaccagctatttcaggcagatttacggtagtgatgcctacctcgaaccagacagcaaagacgggcagatggtcgcgctggtggctcttgccgtgcatgacgctaacaataccgctatcgagatctacaactcgttttcaccgacgacagcgcaggccgcagcgcttagcagcaatgtgaaaatcaacgggatcacgcgaaaagtagcgacaaactctactgctgaccttctgttaaccggtacggcgggcacgactatcacgaatggctccgcacgggataaaaacggcattatctggaattttcccgcgagtgtagcgatcggcgttgatggtactgtgctggtgacggccacatgtgcaaatagcggttcggttgcggcgatggccgggactatcaccaccattaacacaccgactcgcggctggctgtcggtaaccaacccagctgcggctactgtcggttcaccagccgaaaccgacgcagagctgcgcattcggcagggacagagcgtcgctctgccatccctcacaccgtttgaaggcgtcgacggtgcgatcgccaacgttgcaggtgtgacacgtcacaagctctacgagaatgatactggtgcaaccgacagcaacgggctgccgccacactcaatttctgccatcgtcgatggtggggatgttaccgagatagcccagaccatcagggggaataaagggcagggaacggcaacctacggaacaacttctgttacggtgccggatacttacggtaatcctcacgtcatcagtttttcacgctctaccgatgtgccaattttcgtagccattaccctgaaagtttttaccgggtatacatctcaaatcggcgagcagatcaaacaggctgttgccgactatattaatggcctgacaattggcgacgacgttctgctgagccgtatttattctccggcaaaccttggcgttgtgagcggcggtaatgcccgatattacgacattgccgacctgctgatcggtaagtcgtctggcagcgtatcggcatcaaatattgatattgcctatgatgcttcggcgtcctgtagcaccgcgaatatcacaatcacggtgacctcatga

SEQ ID NO: 133736 - DNA, 354 bp, Enterobacter cloacae
atgcgataccgtcgcgaagatgctgacggcgattacactttcgggcagggtgacgataccttccttatcgacagcccggagtgtgtcgcccaggccgtaaaaacccgtttcgagctgtggcgcggtcagtggtttctcgatctgacggaaggcacgccgtatgttcagtcagtgcttggtaaacagcgatctgacgtctacatcctggctatacgcgaacgcatacaggacacgccgggcgttctgtctattctttccttcgataccaattatgacggcaccagccgccgcgtcaccttcacttcctccattgacacaatctacggccagacgactgtaacaagcgaggcataa

SEQ ID NO: 133737 - DNA, 639 bp, Enterobacter cloacae
atgccaattccaactcaatcacagatcggcggtgagcagcagaccgcgcaggccattgccgattcggtgtctacccagatgcgcgtagcgatgcctggcatcattcagtcgttcgatcctgacaatgttacctgcacagtagaggtggcgcttcgaggtatcgttggcgacggctccactgaattaaaaccgctggtggatgtgcctgtcatcttcccgcgcggaggcggttgcacgctgacctttccggtaaaagaaggcgacgaatgcctgctgatctttgccgaccgttgcatcgatttttggtggcagagcggcggcgttcaggagaccgtcgacccgcgccagcatgacttatctgatgcgttcgccatcgttggcccgcagtcgcaagcacagaaaatcagcggtatcagtaccagttcggtagagctgcgcagcgatgacggcggcacaaagttaagccttaacccatccagcggggcaataaatggcactgcaccgggcggattcaaccttaacgggctgaaaatcctgcctgacggtcgcttgcagctggtggacggttctatcgtggataagcatacccatggcggcgttgagagcggcggaagcaatactaagccgctgggaggttaa

SEQ ID NO: 133738 - DNA, 1065 bp, Enterobacter cloacae
atgtctcttaactggatgcgccattttgagttgcagttgttgaaccagaacgggcagggcgtttccctgtctgactttaaggccacgttccagatcgagtgggcagacacacgctggccgcgcgtggcgaacgtgaaaatttacaacctttcgaccgataccacgaacaagatactggggcaggagtttgccaaaattcgcatcattgccgggtatgacggtatagcgccggatgttgatgcgagccaggtcggcgtcgcccgggagatttcaccagaccagatagggcaggtgaacggtcagaactacggcctgatttttgacggtgatattcgcttcaccgtcacggggaaggacaacattaccgattcctgggtgttgattcaggccattggtgatcatgaagcgttcctctatgcgactaccatcaccacgcttgccgctggttataccgttgcggatctgcaccgggcgacgatgcaggatttcaacgcgttcggcgtgacgcagggcattaccggcgactttccagatacagtgtttcctcgtggtcgcgcgatttactcatccagccgcaacgtgatggataatattgctgcgcagtgcaaagcgacatggcaactggtggatggtcaggtccagatggtgccggaggataaatatattcacgaagccattgtgttgaatgccaatactggcctgattggaatgccgcaacagacgatgggcggcggcgtaaacgtgcggtgcctgataaacccgaacattcgcattaatggtcttatccagctcgatcaggcttcggtgtaccgcgcgtcgctcggtaatagcgaaatcgcacagtcgcccgggcgtatcaccgaaactgaagagaatggcaaccgtgtgctgaccggtactacgtcacaggctgccagcattgcgacagatggcgtttatatcgtcaaagctatcgactatactggcgacaccagaggtcaagcgtggtacatggatttgatgtgttttgcgcgtggcgctcgtgatctttatagcccgaaagcaatgcaagggacgacgaattaa

SEQ ID NO: 133739 - DNA, 306 bp, Enterobacter cloacae
atgcagtttaacgaaataccgctttctcctgacaatcagcagttccgcgttttgctgggcaataccacgtatacgctcaggatcatctggcgtgatgcagctggctggattatggacgtgatggatagcggcggtgccgcgcttctctctggcgtacctctactgaccggcgtgaaccttttacgacaatatccacagcttggcattgatggcgcgttggtggtggcgaccgataatggcgcaccagacgagcccaccaaaaccaacctcggcacatacagccacctcattttcgtacaggagtag

SEQ ID NO: 133740 - DNA, 606 bp, Enterobacter cloacae
atgatggatattttatcagcgatctttcgccagcaatcccggcgaattggaatattaatccccagcgtggtcgtatccgaaaagcattctgatgcgctcgaaattactgagcatccggtggagaaaccaacaacgaatagcgcctcgggtttcattgccgatcatgcgtataagcgtcccagtgaagtcacaatggaatgcggcttcgctggtggtggttcgttgctggacttcattgatacatcttcaatcggcctcagcgccggactgagcccgaaagagacctatcagcaactgctggatctccagtcctcccgggtgccgttcgatgtggtgaccggaaaacgggtgtatagcaatatgctggtgcgcgccattgaggtgacaacggacaaaaccagcgagaacgtgctgaactgtacgctaaccctgcgtgaagtgatcatgtcgcaaacgcagagcattagcgttgctgataagtccgatatgcaggatggcgtcagcacatcggcggtgcagaattccggaacgaaatccactacaccgccaaacgaatccttgctgagccagctgggcggaagcgttacatcagcattcgggggatga

SEQ ID NO: 133741 - DNA, 2211 bp, Enterobacter cloacae
atgagcggtaacgcagatacgattaaagatttccttgtttcgctgggattcgatatcgatcaggctggcgctaataagtttgaagccgtgctgaaaggcgttaccgcgaacgttctgaaggtcggcgcggtggtggaaggcgcagcgctgagcattgtcggatttaccacccagatcgcgaatggtctggataaaatttactgggcatcccaacggacgggggccagcgtccagggcatcaaagcgctgggctatgccgcatcgcaaaccggtgccagcgccgagtccgccatgtcctccctcgaagggctggctggtttcatgcgtagcaatccgggggcggaaggcttcctgaaccgcctgggtgtccagacccgtgatgccagcggaaagatgcgtgatactgcggccatctttactggcgttgggcaaaagctcaacaacatgccgtattaccgcgcgaagcaatacgcgcagatgctcggcatcgatgaaaacacgctgatggcgatgcggcgcggaatgaatggctttaccgccgattaccagtcgatgctgcaaaagacggggttcaacgcaaataaagcggctgttcagtccaacaaattcatgacgtccatgcgcgggcttacgtcgctgttcggcattatgcgggacaaaatcggctcaaacctcgctggtggtcttgctggttcgctggacagcctgcggcggcgcatcctcgacaacttcccgaagattgaagaaacgctgaccaaagtcattaagggtgtgatctggcttgcgaacgcattcacacgaatggcgtggcggctgatacagggcgctggctctgtcattgactggtggaagcgtcttgatgatggcagtaaaaatctgctgaaaatattcggtgctctactggtcgcatggcgtctgcttaattctgcgttcctgaaatccccgattggaattatcaccacactgattctggcgattggattactgtatgacgattacaagacgtggaaggagggtggcaaaagcctgattgactggagcaagtgggagccagcaatagaaaaggcgaaaaaggcaattctctggctgcgcgataagctgcttggcctgaaggattctgtcggtgggtggcagaactcgctggaaattttggctacattcattgcaggagcatggttaagcaaaataacctctgcatttgctaagcttgccggaatacctatgccgccatggttgaagctctgggctatttatgccggatatctggtggatgaccggcataatattaaagacagcgccaaatcatctttaaattacactaagcgtaacatcggcgatgcgttacgctggatgggaattgatactgattttggacgtaatccaaatacagtgcacggcacacctgaagtcgctttagatattccaggaaattctccatcacaaaatagcgcatcggcaaatcacccaaaagttaatgaaattgcgccacatgaaagagatgaaataaaaaaccgacagcaggctgctaatggttatcttgaaaagatatcagacgggattgccaaaatcggtaatttacttttctcaccggctggtgctgctgaaatctctccaaatataccgggtgaccccgcccagttggcgcaatcagttaaacgcccacaagccacagcgcagggcaaggttttgctcgactggatggggccaatgttcaataggctggagtctctttatcagctgcctgctggcttgttgaaaagcgtggcgatcactgagtcgggaggtaaccagttcgccacgtccggcgcgggtgcaaaggggctgttccagtttatggatggcacggcgcgagacatgggcctgcgtggtaacgatgtgttcgacccggaaaagtcagctcaggcagctgcgaaatacctcagccagttgttgcgacagaacggcggagatctcagtaaggcgctggcgtcgtataactgggggctcggtaatgttcagcgtcatggtatggggctgatgccgcaggaaacgcgcaattacattccgaaagtgatgagcaatatgcccaccagcgccccggtgattcagcaggaaacgaacattaacatccacggcgtttccgatccgcgcgaggctgcccgtttgactgttgaccgtcaaaagggcgtgaattcacagttaacccagcaattccccgcagggccgagatga

SEQ ID NO: 133742 - DNA, 426 bp, Enterobacter cloacae
atggaattcgaaattaaaggcgtgaaatatcgcaccgcaaagctcagcgttttcgaacagctgaaggtgtcccgaaagctgttgccagtgctggccgggatggtttctgacttccggagcgttcaggagaagatcagcagcaaagacaccgaaggcgcgatggctaccatcctgccaaagattgccaatgctgtgtccgatctgagcgatggcgacgtggacgctatcctgttcccctgcctttccgttgtttcacgcgagcacatgaaaggctgggtgccggtctgccagcatggcgaaatggcgtttgacgatatcgacctgctgaccatgctgcaactggtggcgcgggtggtcgccgactcgctgggaaattttttgcaaggactccctaccagcgagatgcccaccccgccagcggaataa

SEQ ID NO: 133743 - DNA, 441 bp, Enterobacter cloacae
atgacaacttattcttttctcgatgtaaccgcgtcgctcaccgggccgaccggcgttatcgatcttggtcagggttctgcgaactctgaggaaggtatcacccagaccatgggcggcaacaagaacaccatgaccatcggtgcggatggcgaagtgatgcacagcctgcacgccgataagtcaggcaccattacggtgacgctgctgaaaacctccccggttaacaagaagctgtctctggcgtataacgcgcaaagccagtcctctgccacctggggcaataacgtgatcgttattcgcaacacggcatcgggtgatatttctactgcgcgttcgtgcgcattccagaaacagcctgatttcaataacgccaaagagggcgggactgttgcctgggtgttcgactgcggcaagattgaccagctgctcggggagttttaa

SEQ ID NO: 133744 - DNA, 1161 bp, Enterobacter cloacae
atgaagcagggcttacctgtatccaacgttgtaaacgttgatgtgatcatctcgccgaaagcggctactggtcgtaacttcggcgcgctgctgatcctcggttcttccactgtcattccggtgcaggagcgcgttcgcctctatgcgtccgttgaggacattggcgaagacttcggagtcgacagcccggaatatgaagcggcgcaggttttcttcagccagtcgccgaagccgacgcaggtttatgttggccgctgggcgaagacgctgacctcttccgaaggtggaagcgtggaaaccattgtgcaagctgttaatgcctgcctgcaatataccaactggtatgggctggttgtcgctgatgatgttgctgatggcggtgatgtgcttgatgctgatgacgtgattgaggttgctaaacttatcgaagcgtccagtctgagccgcattttcggggtaacgtctgccgacgccgagattatcagcacgacttcgacgaccgatgttgcgtcgaaattaaaggctggcaagtattcccgtacctttattcaatattccaccagcagcccttatgcagcggtttcagctttcggtcgcgcgtttactgtcaatttcaacggcagcaataccaccattaccctgaaattcaaacaggaaccaagcgtaacctacgaaacgctgacggtaggccaggctgcggctgtggatgcgaaaaatgcgaacgtgttcgtgtactacgccaacgacacggcgatcctacagcaaggtgtcatggcgaacggtgacttcttcgacgagcgccacgggctcgactggttgcagaactacgttcagaccaacctctataacctgctttacaccagcaccaccaaaattccgcagaccgatgccggtgtgacccgtctgctctccaacgttgaacaatccatggatcagtccgtcacgaacggtctggtagcggctggggtgtggaatggtggccctatcggacagctgaattctggcgatacgctgaccaaaggctattacgtgtatgcgcaacccctgtccgaacaggcacaggcagaccgcgaagcgcgcaaggcaccgttaattcaggtggcctgtaagctggctggcgcagttcattatgccgatgtgcagatcaacgtggttcgctaa

SEQ ID NO: 133745 - DNA, 582 bp, Enterobacter cloacae
gtgaattactgccgtttgatgggggtactcccgttgagcaataacaccagcacagagcgcggctggctgacacccaccagcgtcgatccggattatgacgaagcgctagacaggctgttaagccagtggatgcgcaacgtttccggcttgccttcggggatggttcgcccgcgctggcagaaagatcagccgtcactgctacccgttgaaacgaactggtgcgcgttcggcgttaccagatggcccattgataacagtcctgcattcaccaggcagaccgatgagggcgcacagctctggcggcatgaaacgttcgagtgcatggcgtcgttctatggcccggcaggtatgtcttatgcgtcccgttttcgcgatggcatatctgtcccgcaaaacaatgctgagctgaacgcgcttgggctgtcccttggcgactataccggtctgacccctttccccgaacttatcaaccagcaatgggttcgccgctacgacatgacggtgcgcctgcgccggaaggttgtgcgcgagtacggtataaaatcgctggtggaagcgccagtcaccttttttggagaataa

SEQ ID NO: 133746 - DNA, 333 bp, Enterobacter cloacae
atgaatagctctcacgggatttttgaacaaacaatgaaatggatcgcgctatatctgccgtcagtttacgccgggttatgcgctctgggcatctccgcgcttatcgacatacgcgcagggaagccgaaactctacaccgccactggcgcgctaatctgcggcatattcgcgctggctgtttccgcattgctggaatacctggggctgcctgctaattcaggggcattcgttggtgcgctcgtcgggtttgttggagcggacagactgcgtgacatggcgctcgctatcgttgccagacgtgccggagtcggcagcactgaggaaaataaatga

SEQ ID NO: 133747 - DNA, 195 bp, Enterobacter cloacae
atgagcgaggtattggtgttaatcaagataaccgcaattgtcattggtgtttcggtcgctgtgctgggggtgatgtcattcgtgatgtggcaaaacccgtttcgctacatcaaaccgatgtttgccgtaagggttttggtggcgttagtagcatacgcatggttactttactttattccgggggcgtcacaatga

SEQ ID NO: 133748 - DNA, 309 bp, Enterobacter cloacae
atgagcaaatgggttagagcagaaattatgatcattcgtcagtgtgccggaaccatgaccgttgagagcattggtcggttgattggcagaacggacgcggcagttagagcaaaagcccgcgaccttgggatcaagctttacctgaaaggcgattaccaccagtcggctaaataccttcaggaagatatttcgcttgcgcgggagttgcactgcaaaggtgtcagtcgccgggacattgccgaaaagctggaaatgccgatcagtgctgtaaaccagtatgtttattttgaacggagagttgcccaatga

SEQ ID NO: 133749 - DNA, 891 bp, Enterobacter cloacae
atgggcgtcgttaagttagcagactacaggccgccgctggaggtcgtggagcatcgcgtggcgcagctggaagatggttttactcgtgttgctaatgagcttctcgatgctgtcatggcatccggactaagcgaaacagagctgtgtgtcgtcctcgctgtttggcgcaagacgtatggctacaacaagaagatggactgggttagcaatgaccagcttgagcagatgattgccaagcatcacacacactgttcgacagcaaaaaatcagcttgttgccaaaaaggtcttggtccaggaggggcgtagcgtgggtatgaataccagcatcatcgagtggaaaacaaagattaacggattctgcaaaacattagctaaacctgctaaggattctttagcggaagttgctaataaaaccttagctgaaagtgctaaggaaacattagcggaaggtgccgaggatgatggcgaaaccttagcagaatctgcttttgaaactaagcaggatctgctaaccacaaaagacaatatacaaaagacaataaacaataccccccaaccccctgagggggagtgtgtcgggcaggaaaaaaaacctgtctcaaagacaatcccgatcgactacctggcggtgctgtctgcatacaacaccaccctgggagaccgccttccacaagcagaggcactaaacgacaaacgtcgccgtgctatcaaacgcctgctgaccgaactgaaagagccaaccgtcgaggcggtggagaattacttcgccgcgttcgctgagcgagcaccaaagttttacttcggtgagaacgacagaggctggcgcgccagtttcgattatctgttgcgctctgacaccctgctgaaaaccagggagaaagcgctatga

SEQ ID NO: 133750 - DNA, 198 bp, Enterobacter cloacae
atggaattcaatgaagagcgcgcaggcatgatctctagcgccatcggtttggctgtggttaatcttgttgcctttggtgtccctattaacagagataatttggtcgacgaacttgaacgggtaaggcgtgaaaccgggaacgtgatcgggaagggggttaatcgagatgctgctgagatcgttagaaaagggatataa

SEQ ID NO: 133751 - DNA, 1536 bp, Enterobacter cloacae
atgagtgacagacatgtggtcagcttttcaggtgggcgtacatcagcttatttagttcacctgatggaaatgcgtcgtgctgctggtgaagaagtttattacacctttatggacactggtgcggaacatccaaaaacctatgaattcattcgtaatgtagttcgccactggaacattccattggtttgccttcgggttgatattaatccagagcttggcgaggcgaatagctaccgcatcgtggatgccaacgaaatcgggccggatctgcaaccatggagagatatttgcgcaaagtacgggactccatactttggcggcccgctgtgtacccgtgcgatgaaaacagaggtattccagcgttattgtgcagacacgttcggcaagggtgagtatcacacatggctgggaattcgtgctgatgaacctaagaggcttaaagaacggcctggcgttagctacctcgctgatatcagcccttttgaaaaagaagacattctggaatggtggaaagaacaaccgttcgatctgcaaattccagaacatcttggtaactgtgtcttttgcatcaaaaaaggtctgaacaaaatcgccctcgccgcccgcgacgagccagatctcgccgctgatttctgggaaatgattaaagcaccaaccgttcgcaccgtggaaggccgccagcatgacggcgatatcatgtaccgaaaacatcattcgctggaaagcgttattgctctattcgctgagcattcgcgagatgaaattgcatcgactatcagaggcggtggtggatatgacaccggatcatgcactgaaagttgcgaagccatgtcctgcgatgttgacgaagaagacaacgagaattctcacgggcatgagttatcgcccgtcagcccttattgccaaaaccttaatgaattacgcacccgcccggcgcacatgttgaaagaggttggagatcagtggcgcacaccagatgccctctggtgggggattaatgccaggtttggcccatttgtgctggatttgttcgctgaccatcacaatgccaagtgtgaatcctattacacagctgaagacaatgcgttaacacaagactggtctgcgcgactatctgtactgggcggtgcggcttatgccaatccaccatatagccgcgcgcagcagttcgaaggtcaatacatcactggaatggctcacatcatgcagcacaccatggctatgcgtgagttggggggccgctacgtctatctcatcaaagcggccacgagtgaaagctggtggcctgaagacgctgatcatattgcgtttattcgtgggcgaatcggcttcgatctcccagactggtttatccctgctgacgaaaagcaaaagccatcaggagccttctttgcaggagccattgcagtgtttgataaaaattggaatggcccggcaagcagttacatcagccgcgaagaactggagactatgggggaaatgttcatccaccagatccagcgtgcagcgctcagaattcagggagtagcagcgtga

SEQ ID NO: 133752 - DNA, 501 bp, Enterobacter cloacae; identical to SEQ ID NO: 83644

SEQ ID NO: 133753 - DNA, 432 bp, Enterobacter cloacae
atgagcgaagcaccagtagtattaatcaagcaagagactaccgaattaggccgactggtatttcataccctcttattcagggagtattgcgaatatgcaaatttagccgctgtgtcctttatgaagcgcttctgtgacaaatatgaaaccggatactggagctattttaaagtggggagtaatagcggttttatgtgccctgatgcgcacgaattttatcatttcgaaatgcctaactacttttcaggaaatgttactgctgaagctgccggtattatcgtgacgctctatgtacttcaatcctgtttcgatgccgcatggaaacgtcaggactctggcctttgcgatcattttcgggaagcgatggatacgttaaaagactacgccgccacgactgacgaatctcacagtattttcagggcaattgactga

SEQ ID NO: 133754 - DNA, 270 bp, Enterobacter cloacae
atgaatattttccctcagtctgttgtccttccagatcctgcggccacccctttgactgatgagcaagtcgaagatttatatgcctatgtttgcatgaatggaaaaatgacaaacaacgataaccgtttttcactagcgatcgctcagacggaagaagaaaccgtgcttatccctgaagtaccagatttttacatcgtgtttattaatgctgaacgctggcctgtagcggcggcggctccgatggacaatctgtttcatttgctgggttaa

SEQ ID NO: 133755 - DNA, 375 bp, Enterobacter cloacae
gtgaacggtaaagcaaagaaaggcggtcagatcgggattaacgggcagaaatacaaaggtggtcagtttttacctgccagcaagcacacggtaaaaggccagctgcgtacccggaaagccagtttcaaaccgcgctcagctctcactgaacccggcaaggtcgaacaactgccaccaggcaagatagctatattcggcactatcagggcattcgtgcagatcgaaaacggagctatgacgatcaccgccactgaccactcgctcagcgcttacggatacacccgcgactcgatgcaggcgcttgttgatcagtacaacaccggagagcgcctaattgacgcccctgaccataaggagagtgacaatgtttactaa

SEQ ID NO: 133756 - DNA, 519 bp, Enterobacter cloacae
atgtttactaaattttttcccctgatttttcccgcgcctgtacttgagcaagtacggcaacggcttgcggttgctgataagcaagtgattgatgaaaccatcaccggatttacttacgcaatgcaggctattggatataccccttcattgcatccggcaggttgccttattctgtctgaatgtcagaactgcaaaagctcatacgcaacgcgttatgaaatgaaacatcacttctactttgcctgcccacactgccagaccatcacaaaaggaattttcaaggccgctatctggaaccagcgcgaggaaaaccgactcttaaccacgaagggtgaggaattctggcactccgaggggcacacggtttatgatcgtaaacacagacaatcctatgaagtggatgaacgcggaaacctgacgcaggatgatattccagactacgtacttgggcgcatcgataccgctcaactggaagatgcagaacgccgccggttagcctggattgaaagcgccgactga

SEQ ID NO: 133757 - DNA, 282 bp, Enterobacter cloacae
atggttgaagctcgtagttgcgtagctgtatccgtattttccagaaatggcgtcaaagcccttcatttttccggtattccaaaactgtcagggcataaaggcacgctcaattttccatttgatgaaaacgtcagcctgtttacacaggtcgaaaaaatcatgctggcaaacaatatgtgccacaacgtcacccgcgtagaccctctgcgccacaacgaaacggaaagcgtgtattccgtcacctttaaccgccgcctgctgaaaagcaccgtcaggaaataa

SEQ ID NO: 133758 - DNA, 264 bp, Enterobacter cloacae
atggttggcacacctgaagaagttctggcttacctgcaacaggtttaccctgacaccgtgatttcagttatcgtttggacgcgcagcgaagtacgcgacgtggcagaacgccacggttacacgcttacggatgaggaagctgactccgttctgtacgatctggcgcacaatgaaaatcatgaatatggcgaaaatgaacaatcagcctacggctacatttgcgccctgaaaaacgtcgaaccggaaaactttatatgcccctga

SEQ ID NO: 133759 - DNA, 231 bp, Enterobacter cloacae
atgcccctgacctacattacggatctcaaagcaggcgaacgcgatatccttacgccgctgaaacactatccacttgtgatccgctcgctcgatggcgaaactctgcatacgcaggctgcgcctgttcagggatggactcacgacacccttacggcggtacagccacagggtgtgaataatggggcggaagcgtacctgaatgcacactggataggctcgactgaagtttga

SEQ ID NO: 133760 - DNA, 219 bp, Enterobacter cloacae
atgagaaaagtatctgtgtttactaacggcaataaccgagcgataagaataccgcgtgatatggattttgaaggcgtgcgcgaattagtaatctccagagaggtagataccattacactcaggccagtgcgtcctagctgggaaagtttgaaagacgttgaaaaagcagaccctgattttctcgttgaccgtgatcctgtgatagaagacaaagattaa

SEQ ID NO: 133761 - DNA, 345 bp, Enterobacter cloacae
atggctactcaaatgttaaatagtgcggacgtgtcactgcgcgctgagtctcggctcaccgaacgcagccagactacgattccggcagcaatacgcgatgctttgcatctcaagccaggtgagtccattcactataccttgcttgcgggcggtaaagtcatcatgtctaaaaaggaagaagaacaggacgatccagttgttccacagttcctggcttttctggaaaacgacatgaagaaaaaccctcagaatattgcccctgttccggctctgttctgggaaagcatcaaagctttgactgctggagttgaagttgatttagacgcgccgcttaccgatgactaa

SEQ ID NO: 133762 - DNA, 495 bp, Enterobacter cloacae
atggaatacttagaattaaatggttggaaaatctgctttcacaaatgctttttagaccagattgcggagcttgcgcagaaggttgctgagttaaaagcagcaaaacccaacgaataccataagaaaaaagaaacaaaactcctgattgcgattgagcgagtgattgaggaatggattgcttcagatccgctcaatccacagtaccgccagggcgacactttaggcgacgagtacaaacactggttccgggtaaaatttttgcagcagttccgcttgttttaccgttgcagtcaggagcacaaaaccatcattatcggttgggttaatgatttcgatacgctccgcgcttacggctctaaaacggatgcatataaagtgtttgcggaaatgctgaaagcaggtactccaccggatgactggaacacacttctcaacgcggcaaaaaaagccacggccacaaacactattccaggatttctcaccaggcaaccctaa

SEQ ID NO: 133763 - DNA, 249 bp, Enterobacter cloacae
atgtccacacaaaattcactcaacacccgtaacatgctggctcgcaatatttatgtgggtttacagattttactggatggtaaattcttcacagttacccaagtggaaaagggtgaatactgcggccaggaagtcattgaaattgactttgagtggcctgaaaactgtgatgtccttcatgctggtttttataccccaggtgaagtggtaaaagtgcattcatcctctaaccaggttctttgtatctaa

SEQ ID NO: 133764 - DNA, 681 bp, Enterobacter cloacae
atgaacacttctgccgtaaaatttcttccttcactctatgaacccggcgtttctgttcgggaagatatcgcccgtaatctactgaaaatcgttgcttatggccgcatggcatataaggaaattgatagccgtttagattattactacctcgatggctttgtagaaataactggtattacagatattacgtctgccgtattgcttgccgaccatctttataaaaataatgcctggcaataccgtaaccccaacattgattactcatgtgagttttttgacagtgaggacggtggccctcagtcattcaattttcagtatctcgaaatactcgaccgtcatggaaaacgggtaatgagcgccagtcataactggaagaaagccgctttacaatgggaaacctgtattatctcggagccacgtaaaacagctgccatcgaagaattgaaagccatcgcggatcaagcgtcagaagaaagacgcggagacaactatgattcagcccggaggctcgatctccagtatgagaaactcctgacccgttttgtgacctccagttataaccggcaagctatttgtgaagaactggaaaattcttccgctatgacccagcaggcgacaagtctgcgtctgtctattgcgctggcaaagtccagcctgacctgcaactcattgccattctaa

SEQ ID NO: 133765 - DNA, 849 bp, Enterobacter cloacae
atgactaccgccattaatccagaaattgtctgcgaatttgcctcatcaagcgaggttatcccctcgatttccatcgaaaacattctgacacgcgcggcttatgcgatgaccaccttttcggatggtctggcaaagcttcgcgaagcacagcagctaatgaaggacaccacagatgacaaaatgtatggctatattgaagtagttcgaaatggcctgggcggttcaagcgatgacgcaacaatcaagcgcatgaaacgtctgcttgatgcggggatctggtctcgcctgatgaatgaaaccggcatgaaaaccctcatgagtcataagcagattgacgattgggaaaagcagctagatacggaaaacatgccggaagcaacgcttgataatattctttcttccttccgcgcattaaaccaggacaaagggcagatttttgagcagggagtgacggatgtatttaaaaaattatcctgggattacaaaactaactgcccgtgcaaaatcggcaaaaaaatcattgttaatagtatggttggttcatcgtacagcaaaaactgttattacgtgacggatgagggccggaataaactcaatgatctggaaaaaatgatgagcattctcgatggtcgtaacgttcccgatcaccgcatagcagcaggcgcactattttatgatttcacccgcgaaaatatgtggaacggtgaaaacttcgaacatgaatacttcacggtaaaatatttcaaagcccgaaccggtcacatcattttcaaacgtatggatctggttgataagcttaatgacattatcagccggcaatatggtacggtgctcccgtcacgcgtataa

SEQ ID NO: 133766 - DNA, 759 bp, Enterobacter cloacae
atgaatctgatttcccgccttactgatgctctcaacacgaaaattgctgaactggttgatatccgtcaaaagcagcaggcgcggattctgaaagctttttcagaccttaacaacgggattgaacctaacgaagatcgtaacggtcgcctgcatgccccatgtgacggttacgaacactttgaaaccggcgagctgtatggcaagggccagtttatcgtaatgcctgaatatgatgactggtattcaccggcgagctatccggccaaatcctatgatcctaatacccgctttaaaggcttaacggctgactatcaggaaacagttaaactgatggagtcgtttggtctgcgcgttaaaaccggacgtcgctggcatgaaaacggccatgaatattgttattttacggtcacaggacataaaccgcttatcggcgctattgcgaagacggtcgaagcaatccaggcggaacagcgtgagcacgaaaagcaatataagggtgtagcacctgccggaaaggtcaccgtaaaagcaacgataaaaggcgtgaaaatggtcgagtctggttttggccacagtattcgcctgattccgaaaatgattatcacgcttgagaacggagccacggcttatggaacaatgccaaaagttctggtcgaccaggatgcgaaagccggtcatgcgtttacgctaaaagccacctttaagcaggataaaaacgacagtacacacgcctattttacccgcccttcggtttgctga

SEQ ID NO: 133767 - DNA, 366 bp, Enterobacter cloacae
atgaaaatgctaagtggcattaacatcccttttttcaaaaaatctaaaaaggatgaaaacggtgatcttgaacagtcatacgtaaagaaagatgaaagtgctaagggacgttttttggacattaaaaaacgatttagcccacaagctgaagcgtcaggtgctggaattacatacagcgccctgattaatcgtgatacaaaacttatccgcattaatactgtttcaatagccgtcattgggttattgattgttgctggcaattggtattcttcagcgattacgcagttcgaagtcgtgagcatgatcaatgctgtaattgcgttgaagcctaagcccttttttttaatcatcacttgttacctgtag

SEQ ID NO: 133768 - DNA, 741 bp, Enterobacter cloacae
atgggaaggttctcaggcaagaaaatagtgatcacgggtgcgagcagcggtattagtctggccggggcaaagcgcattacagaagaagatggcgaggtcatgataaccggccgcaatctgcataaactggaacaactacgggcacaactcccccatcacacaacacttcttcaaaacgatggagccgaaccggaggctgcacaggcactggcagaagctgttgaatcgttcggcatgctggatggcctgtggcttaacgccggacaactcgccttctcatccgtagaaaactgcagcgcgactcagttcgatacgataatggcaaacaatgtccgggcagcggtcctgcaggtcgccagtctctcccgttttttgaaagaaggggcctccgtggtaatgaccgcctccacggcagcctatgaaggaacccccgtggcagcaatttacgccgccagtaaaggcgcgcaactggcgctggttcgcagctgggcaacggcctttgcaccacgggggatcagggtgaacgcgcttgtgcccggggccatcgatacgccgttactggacattattcccgcccccttccgtgcgcagtatgatgcacagattagcgctggcgtccccctgaaacgtccgggtactgcagaagaagccgctgccgttgcactgtttttactgtcggacgatgccggatatgttacgggtagtcagtatgtggttgatggggggctactgcgtttatag

SEQ ID NO: 133769 - DNA, 213 bp, Enterobacter cloacae
atgcctagacaacatcaggatagcctcttagatgccgcaaggcaaggagaagaaggccatgaaactgccgcgaaacactctgctctggtgcgtattaatagtgtgtctcacactgctgatattcacttacctgacacggaaatcgctctgcgaaatccggtacagggacacgaacagggaggtggcagcttttatggcttacgaatccgctaa

SEQ ID NO: 133770 - DNA, 204 bp, Enterobacter cloacae
atgcacgacaagggtgacttctatagcgcggagcgtctcgctctcgccagggaaagccgaagcctccataaggtcattgagcaatgctcgccgcgtcgtttcatcaagctttacggccacagtaaccaacaaatcaatatcgctgtatggcttcaggccgccatccactgcggagccgtacaaatgcacggccagcaacgttga

SEQ ID NO: 133771 - DNA, 621 bp, Enterobacter cloacae
gtgaatacggataagttcgaattcagtgacaaaaaagaggatttctatctggctgcttgtcgcatggtgccttataagcgtgttgatcttattgttagtgcgtttgccaaaatgcctgataaaaagttagtggttattggtgatggttctgagatggataagatcaaacagctggcgatggataatatcacgctactcggctatcaggatgacgctgcaatggtcgactatatgaagcgtgctaaagcttacgtatttgctgcagaagaggattttggtatctcgcctgtagaagcacaagcaagcggtacgccggtcattactttcggtaaaggcgggtgcctcgaaacggttaaaccccttggtagcgataaaccgactgggctgttcttctttgaacaaaccgcagacgccatatgcgaagcagtgaatacctttgaaaaatacgccgatgaaattaagccagaagactgtcgcgaacatgctttaacattttcagagcagcgtttccgtgacgagattagtcagtatgtcgatagtgcctgggctcaatactctgagtcgctgatcaatactcaggctgcgcgagtacagaacagttatactcatccggaaaaataa

SEQ ID NO: 133772 - DNA, 384 bp, Enterobacter cloacae; identical to SEQ ID NO: 51105

SEQ ID NO: 133773 - DNA, 297 bp, Enterobacter cloacae
gtgctttccgtcgataactttaggatcgtttttgcccatctcagctgcatccgcaacttcatagcccagttcgtcgagggtatccatgatgactttaaaggttttacccttgtcatggctcttcaggtttttaacgttttcaagaacaaagatggcaggtttttttgcgcggataatacgcgccacatcgaagaaaagcgttccctgagcctcacattcgaaaccatgcgcgcgcccgagcgagtttttcttgcttacgcccgcaaggctaaacggttgacaggggaaacctgctag

SEQ ID NO: 133774 - DNA, 165 bp, Enterobacter cloacae
atgcacttgctgttatccgttgttctgtatgcgccggggctgctggttttcctgtatgcgcgcaaaacgcatacacatgataatgtactgaaccgtcaggaaatggtgctgattggcatgctgttaattgcctcagttccggcgacctggatgctggtgggataa

SEQ ID NO: 133775 - DNA, 630 bp, Enterobacter cloacae
atgaaccaaacacaatttcagaaggcggctggcatcagcgccgggttagctgcgcgctggtttccgcatatcgacgccgctatgaaggaatacggcataaccacaccgcttgatcaggcgatgtttattggccagatggggcatgaaagcaccagatttacccggctggtggagagcctgaattacgcggttgaaaacctggtaccgacgtttggtagccaccgcatcacacaacagcaggccgccgcacttggcagaacggcaacgcaaccggcaaaccagaaagcgatcgccaatctggtatacggtggtgagtggggaaaagaacaccttggcaatcaagttgccggtgatggctggaaatatcgtggtcgcgggttgaaacaggttaccggcctgagtaactatcgcagttgtggctacgcgttgaaactggaccttgttacccacccggagctgcttgaacaggatgaatacgccgcgcgctcagccgcatggttctatgcctcccgtggttgcctgcttcattccggcgacgttgagcgcgtgacactgttaatcaatggcggccgcaacgggctggataagcgccgcgagctgtttaacctggcgaaatcagttctggtatga

SEQ ID NO: 133776 - DNA, 192 bp, Enterobacter cloacae
atgggaaacgatgcgcgatatagttggaatggtcagatcgcagcggttgaagcatattctgaaatttctggcttctttgggccaaaatacattcttaattttccggaatataaatccagcgctgtggtattcgataagaacatcgaagatcatacaatcaaaattggcgataatttctgccgggatatttaa

SEQ ID NO: 133777 - DNA, 360 bp, Enterobacter cloacae
atgaaaatttacgaaattacgccgattggcaaaccccgaatgactcagcgcgaccgatggcataaacggccagcaacagcagcgtactgggcatacaaagaacatgtcaggctgctgggcatctgcctgccagaatctggatatcacatcaccttcatcattcccatgccaaaaagctggagccagaagaagcgcgcgaaactgaacggccaggctcatcaacagaaaccggataaagacaacctggaaaaggcgctacttgatgccattttcgacgacgacagccgcgtctgggatggtcgggtgacaaagctatggggagagaaggggcagatcattattggggagtgcgcgccgtga

SEQ ID NO: 133778 - DNA, 294 bp, Enterobacter cloacae
atgggggtgagcgtggctatttatcgcagcaaaaaatggctcgccgccgtcgggcagatcgagctttgtgttctttgtggagcatgggggacgcaggtggcacaccggaacgaagggaaaggcatgggattaaaaaccgatgactgtgcgacggctgcgctctgcgtttgctgtcatgacagcattgataacgggaataagctgaacagagaggagcgtcggcagcttatggaccgcgcgattgttctgacagtgattgaagttgcccgccgcgggctggtggtgcccgcatga

SEQ ID NO: 133779 - DNA, 1047 bp, Enterobacter cloacae
atggataactctacgaaagaacccccatcagatactcagtcatccgagttgaaaaaaaaattacgtacaaaattgctgcaaaatattttctggggagtttgcacgttaattgttatattgttattggcttatattcttattcttagtttcggttcttcaataaaatcactgattaatgaatatcagaattttgttattcctgtcatatcagttgtaacagtgttactttcatctatgttattaactatatttctgaaggggccgtcaaagtctatatcaacgaatgatcctttaattagtaaacttgcagagttaataccattttttgggaatgctctaaaattggctgctttgattctaaaaactcctcttatatttgaggataatactaaagatattgaaaagtctgctgattttgaccaagaatattttaaaaaatccgttaaaaatagattgatggcgaaattggtcataggagcttcggcggagttaaaaaacgatatcacgagattttcatcagagaaatacttagatgatttgtatgcttcaacgaaaaaaagattattggatgaaatagaaagccaaacaactaaaggtatatttagtttgagcttaggtgttataactgcttcgatagggatgattatattagcatcgtcagcctttggagaaacatcagacaattttaggctttttattgttcattatttccctaagctttctatagcaattgtaattgaggtttttgcttatttcttcttaagactttacaagcaaagtttagatgaaataaaatactttcaaaatgaattaacaaatattgaaatgaaatatttcagtgtcatggttgtaaaaagagagcctgatgaatcagcccttgtcaatattgcaaatgaattaatgaaaacagagcgtaattatatattagaaaaagggcagtcaactgtttttcttgaaagggataggttgtattccgaacagcagaaggaagcatggaaaacgatatcaaacttaactgagaagttatctaagcaagaattaaaataa

SEQ ID NO: 133780 - DNA, 1050 bp, Enterobacter cloacae
atggcgcaggtacggcaccagctgccgtatatgaatttttaccgcttctgccagctgctggaacagagcctgccggagatgccggtgcccggcagcgactggcgggtgcggcaggagccagtgcgttttcgcccgcatccggggatggggtttccgtccggtgaaatccgggggatggaagacccggaacatccgcacctgccgccgtcggtgcgcgtcacctttatggggctgtacggcgtggagtcgccgctgccgacccactacaccgacgatatcgctcagcgacgggaagggcacgacgcgacgcaggattttctggatattttcagtcaccggctgattacccagtattaccgcatctggcgtaagtattcgtacccggccacctttaaggccggcggcgctgacaacacgtcacaatacctgctgggcctggcggggctggggatacccggctgcgctcaggcagccggtacgccgctgtcgcgatttctggcgctgctgccggtgatgatgctgccgggacggacggcggagggaatgggggcgctggtgcggctgctggcaccggatacgcgcacgcaggtttatcaccatgaccgctgccgtatcccgctgaagcagccggttgcgatgagtacatgccagccggtcagcctgaagcaccggccggtgatgggcacgcatgccacggatgtgaacggccaggtgctgttgcgcctgagcacggacaacccggaagagatccggggctggctgccgggcggtgacctgcacgctgacctgatggcgctgctgcacgtgtggctgggcgcgcacctggatgtacgtatgcagttatgcgttgcccggcatttgctgccggatgcgcggctgtcctgcaatgcggaacagatcgcgcaggtcgggcgcacggcagtgctgcgtccccttaatccgcaacagaacagaaacgacattatcaccattcaccctggacgctttcagcgcgtccgggaaaacattcagcgaaggaaaaacgatgaagatggcgattaccgctggtaa

SEQ ID NO: 133781 - DNA, 615 bp, Enterobacter cloacae
atgaatgatgtctcacaccgcgaatcgttcgcgttcagcgcccgggtactgggcgcgctgttttatttcgccccagacagcgagcagaccgcgccgctggtgagtgccctgaccgcaggtgactgggttcaggactggccgctggcggaggaaaacctgctgcctgtcgccagtatgtttaagaccccatcggatgaagcattgaaagacgcctggcagcgtctgtttattggcccgtatgccctgcccgcccccccgtggggctcggtctggcttgatcgcgagtcagtgctgtttggcgattcgaccctcgcgttgcgtcagtggatgcgtgaaaaccatatcgcctttgagatgcagcagaatgagcctgaagatcatttcggaacgttgctgatgctggcggcatggcttgccgagaacggtcgcgaaacagaacgcgaccagcttctggcctggcatctgctgccatggagcacgcgtttcctgaccgtattcgttgaaaacgcggctcatcctttctacgcggcgctgggtaaactggctcaattgaccctgtcggaatggcagtccactttgctgatcccgattgccgaaaaaacgctgtaccgataa

SEQ ID NO: 133782 - DNA, 630 bp, Enterobacter cloacae
atgcacttccatatattagttgagggtgattcagaagtaagattcatgaaaaaagtcatgccttttttgcatggagaacaaggtgttactcattcatggaacgtccacaaacatcagggagttggttcaattcctgctgatttaaatgctgtgccgaataaggcaaataactcactactccataatcttcctgcaaagttacgtgcatatgaaaaaatcgcaaaccctctcaatcggattattgttttagttgatattgatagcaatgtgaaagccacattcctaaatgaacttaataacttaaaaaatacacagtcaccaaatactgatgtaagattcgttcttgcctgtgaggaactcgaagcatggtacatgggagacagaaatgctttagtccagtataaccctaatattaatatacctatattaaactcatacattcaagatagcatatgcggcacatgggaaatgttaatgcgcgcagatgatccttcattattaaaacccagaacaccttattggaaatctttaaataaaaaagtagaatggtcgagaaaaatcacaccctatatggatttttcgaacaatgcatctccttcttttaacttccttttaagtaatctagtttag

SEQ ID NO: 133783 - DNA, 1251 bp, Enterobacter cloacae
atggcactaatcgaaggtatgagaattaaaaactttagaactttgagagacgtcacattaggaaaaacactaagtaacaagaaacagaaacctctttcacctttaactgctgttattggtcgtaatgggagtggtaaaagctccttgtttgatgcttttggtttcttggctgattgcttaacttacggggttgaagatgcctgtcaccgtaatggaagagggggatttgctaaactcaaatcctttagttcagagggtgatatggaattcgaagtttattacagagaatcagcatctgaaaggcctataacatacgaattatgcattggttttgatgagtttatgcggccaattgttaaacgtgaaagactaagacaacgaagaaggaaacaatctcatggttggcccttctcatttctggaacttagcaatggcgttggtcgtgtatggtctggcgatgctcttgcatcaactacagacgtggaggattctttaaaagaggaaagtaatcaaacaatcaatgtggaactggataaccctcaacaattgggaattgccacattgggtaatttaaaagagcacccgagaatcattaaatttcgccgttttatagaaggttggtatttatcatattttactcccgatagagcaagggatctccctcgctctggcccgcaaaagcatcttaacagaattggagacaacctaggcaactatgtacaatatatggaaaggtctcatccaaaagcttttgcacaagttctgagagaaacctccaataagatcccaggaataagtaaaatagaaacagaggcttctccagatggaagattattagtgaagttctggaatgaaggcttctcagaaccattttatgctcaacaagtatcagatggtacattaaaattatttgcttatttattgcttttgcaagatccagaaccggcgccatttatttgtattgaagagccagaaaatggtttgtatcataaactattacaatctcttgcatatgaaatacgcagtcatgcctctggcaaaaaaaattcttcacaggttttcataacaacacatcagccatattttgtagatgcattagaccctgaggaagtatgggttttagagaaaaatgaggatggtttttctgacctaaaaagagcaacagaataccctgaagttgtagccatgtatcaagagggaatacccttaggtagcctttggtatagtgatcatattgatgaaaggatttaa

SEQ ID NO: 133784 - DNA, 219 bp, Enterobacter cloacae; identical to SEQ ID NO: 121043

SEQ ID NO: 133785 - DNA, 267 bp, Enterobacter cloacae
atgcacaccgctttttcttccccgtcttctgcccctgccgcgccactgatgccggtctctgatgccgttcaggagcgctttatccgcctgcccgaagtgatgcacatgtgcggtctgtcgcggtcgactatttacgacctcatcagccgggaggctttcccgaaacaaatctccctcggcggtaaaaacgtggcatgggcgcagtctgaaatcaccgcatggatggcagatcgcattgccgaacgcaaccggggctgtgacgcatga

SEQ ID NO: 133786 - DNA, 195 bp, Enterobacter cloacae; identical to SEQ ID NO: 121045

SEQ ID NO: 133787 - DNA, 228 bp, Enterobacter cloacae; identical to SEQ ID NO: 121046

SEQ ID NO: 133788 - DNA, 321 bp, Enterobacter cloacae
atgaaaaagccattaccccccgtattacgcgccgcgctgtatcgtcgcgccgtggcctgtgcgtggctgacagtctgcgaacgtcagcaccgctacccgcacctcaccctcgacgcactggaaagcgccattgccgccgagctggagggcttctacctgcgccagcacggcgaggaaaaaggccgccagattgcctgtgcactgcttgaagatttaatggaagccgaaccactcaaagccgcgccgtcgctgtcctttctcgggctggccgtgatggatgaactctgcgcccgtcacatgcaatcacctgttgtgcactga

SEQ ID NO: 133789 - DNA, 2334 bp, Enterobacter cloacae
atgaaaatgaacgtaacggaaaccgtaaaacaggcgtgcggccactggccgcgcattctcccggcgctgggtgtgaaggtcatgaaaaaccggcatcaggcctgtccggtgtgcggcggctctgaccgtttccgctttgacgataaagaggggcgagggacgtggctctgtaatcagtgcggcgcgggggatggcctgaaactggtcgaaaaggtgttcggtgtaaaaccatcagaggcagccaaaaaggtgaacgccgtgaccggcaacctgccgccggttgccccggaagtgattgcggccgcagaggctgcaaccagtgccgaccgcaaagcggcggtcgcgctggccgtcaggctcatggagaaaatccgaccggccaccggcaacgcctacctcacccgcaagggtttccccgctcaggaatgtctgacgctcaccgtcatacataaaaccggaggcgtgacgttccgcgccggggatgtggttgtcccgctgtatgacgataccggcgcactggttaaccttcagcttatcagttctgacggtctcaaacgcaccctgaaaggcggtcaggttaaaggggctcgtcatgtcatcgaagggaaaaaacaggcaggaaaacgcctgtggattgcggagggctatgcgaccgcgctcaccgtgcatcacctgaccggtgaaaccgtcatggtggcactgtcgtccgtgaaccttctttctctggcgagccttgcccgtcagaagtacccggcctgtcagattgtgctcgccgcagaccgtgaccttaacggcgacggccagaacaaagccgctgcggccgcagacgcctgtgagggcgttgttaccctgccgccggtgttcggtgactggaatgatgcttttatgcagcacggcggggaggccacccggaaagccatttatgatgccatccggccaccggcacaaagtccgttcgacaccatgagcgaggcggaatttaccgccatgagcgccagcgacaaggctctgcgggtgcatgagcattacggcgaagcgctggcggtggatgcgaacggccagctcctgtctcgttatgaagcagggatatggaaagtcgttcagccgtctaatttcgaacgcgacgtagccgggcttttccagcgcctgcgcgccccgttctcgtcggggagaatcacctcagtggtggagacgctgaagctgattattccacagcaggccgcaccggcacgccgtctgattggttttcgcaacggggtactcgatacccaaagtgggatattcagcccgcacagcaaatcgcactggctgcgcaccctgtgcgatgtggatttcaccccgccggtagaaggggaaacgctggaaacccatgcgcctaacttctggcgctggctcgaccgggcggccagtggcaacccgacaaaacgtaacgtgatcctggccgcgctgtttatggtgctggcgaaccgctacgactggcagctctttctcgaagtgaccggccccggcggcagcgggaaaagtattctcgccgaaatcgccacgatgctggccggagaggataacgccacatcagccgatatcgacacactggaagacccccgtaagcgtgcctccctgattggcttctcgctcattcgtctgccagaccaggaaaaatggagcggggacggtgccgggctcaaggccatcaccggcggcgatgcggtgtcggtcgacccgaaataccagaacccgtactcgacgcatattccggcggtgattctggcggtcaacaataatccgatgcgcttcaccgaccgcagcggcggcgtgtcacgtcgccgggtgattatccacttcccggagcagatagccccggaggagcgcgacccgcagctcagggataaaatcgcccgcgagctggccgtgattgtgcgccagttgatgcagcagttcagcgacccgatgagcgcccgcgccctgctccagtcacagcagaactccgatgaggcactgagcatcaagcgcgatgctgacccgacgtttgatttttgcggctatctggaggcgctgccgcagaccaacgggatgtttatggggaatgccagtatcatcccgcgtaattaccgtaaatatctctatcacgcgtatctggcctatatggaggccaacggctacaggaatgtgctcagcctgaaaatgttcgggctggggctgcccatgatgctgaaagagtacgggatgaattatgagaagcggcacacaaagcaaggtatgcagaccaacctgtcgctgaaagaagaaagctacggcgactggctgccgaagtgcgacgaacccaccgcgacttaa

SEQ ID NO: 133790 - DNA, 570 bp, Enterobacter cloacae
atgatgggctttaatggctcgttagctgattcatgcaagactaaccgccagtctattctgcaagattatgaacatccttttatttcaggtattcaagaagggatacaaggaaaatgggggatcactcatcttgctaaaagactccagcaaataccttcttgcctcggttatagctgggaagatgttatttataccaacgcattaatgatgtgttctcagaatgctgcaaccctgaaaaaagaagcagctcgtcacgagatgacaatgaatgaaatcgaagcaaactcaatggcattttttgagcatgtaacagcccatttgagcgaaccagatttgatcgttgcatatagcaacagtctccagtcactctcagccgcgagtttgttgctaaagcactttggcgatgcaactactctcaaattttctcagccgaaaggctaccacactactttcgcatttatggccaatcttaacagtagaaatattccggttatctgcgtgcgacacatgtcacgatttaaacctgaagagagttatatcagggcggctgtcaaattaatgggttgttaa

SEQ ID NO: 133791 - DNA, 1797 bp, Enterobacter cloacae
atgtcgacatttgatagtacgaaacttccgctgaaggatctgttaaaagatatcgttgagggtaaaattcagctccccgattttcaacgcggatgggtatgggatgatgaacatgttcgtagcctgttagtaagcctcggccgttcatttcctgtcggtgccgtaatgcttcttgaaacaggtggtgaagtacgctttcaggttcgcccggtcgaaaatgtctctcccgttggtcttcctgcccctgaaaaattaatactggacggtcagcagcgtctgacaacattaactcaggtacttaagctctcgggtccggtaaaaacgacgaccgacaaaggtaaaccgatagatcgttattactatatccatatccctactgcgcttgaaggtgcagacaggctggacgatgcgattatcgcaacggatggtagccgacagatccgcagcgattttggccgcaagattgaacttgatctttcagaaagaaaacgtgagtgccagcagctctattttccttgctccgaaatcctcgaagcaatggcctggctgcaagatctttacacccacaattccgaagcagtacagctcttcttcgaattcaagtcgaaggttctggatgcctataatgattaccaaatcccactgattgtcctgaaaaaagacacgtcaaaagaagccgtttgtcttgtctttgaaaaagtgaataccggtggtgtacctttgtcggtgtttgagctggttacggccagctacgctgctgacggctataaccttagggatgactggtacggcagtgatatccgcaacgttgattctcgaaagcagcgtctttcagtagagccaatccttaaaggagttgaaaatacggacttccttcaagctgtaacgatgctccatacgctggaaaaacgtaaagccgaccttgcggcgggtaagaccggaaagcaggtatctcccgttagcgccaaaagggcttccgttcttgagctacctttaactgcttaccaggtatgggccgaagcggttgagaaagggtttaaatgtgccgcaaaattcttacgtcaggaatgcttcagctctcagcgtgatttaccgtaccgtacacaaattgcacctctcgctgcagtaatgaccattatttgcagtaaagatgatgaacgctggagagaaccgcagattcatcagaaacttgctcgctggttctggtgcggtgtgttaggtgaactctatggcggcgccgttgaaacccgtattgctaatgacgtcgaagaacttctttcctggattgaagccggtggggatctacccagaacaatcaatgacgctaatttccagattgaccgtctggggtctctcacttcccgtttgagtgcggcgtataagggtattaacgtacttgttctgcgagatggtgctcatgatttgttctggaaatcccagattcgtaatcttgaggcagacgaagtcgctttggatattcaccatatattcccgaaagactggtgtgaaaaacaaggaattcctcgtcgtcagtacgattcaatcatcaataaaacgccaatttcttataaggccaacagaatgattggtggttcagcgccatcagtatatctggcagcgctccagtcacattcacaggttcagctggatgatgatgcaatggatgcgctgctacgtagccatcacatgccagtgaatgcgctacgtaacgataacttcgaagaattctacgagcagcgacaaaaggaattactgagtttaattgaaagagcgatgggaaaatcacttaactcttaa

SEQ ID NO: 133792 - DNA, 651 bp, Enterobacter cloacae
atgtcacgatggaatattgccgcggctcagtatgccccgcggcacaactgtgttgatgagcacgtaaaacatcacctgcactttattgccgaagctgcctggcatgggtgcgatttgatcgtctttccggagctttcgcttaccggcccaggcggaacatccttacccccacctcctgacgatttgcagcttgcccccctccttcacgccgcccagtcacgtttcatcacggtgattgccggtattacgctccagcaacacggccagcgccagaaaggactcgcgcttttcacccctaacctgtcgaccatccagcgttatccgcagggcaacggtgcgggtgttattcctggcgataaaaggttaaccatcgtggataaccaggctgacgccccggaactggacccggaggcaacgctgttcaccagcagcctggccgtgggcgagcaccgctggcggcaatcgatcggttcgttacaacgcttcgcgcacaagtacgccatcgcggtattaatggcgaacgcgcgcggcggtagcgcgttatgggatgaaaaaggtcagctgattgtacgtgccgataagggagaactgctgctaaccggttctttaggccaacagggttggcaaggcgatatcattccattaggctag

SEQ ID NO: 133793 - DNA, 534 bp, Enterobacter cloacae
atgaccgccatgtctgtccaaacatcgcttgatttaactgatgttctatcaaaattttttgttccattacttgtagctgcgctagccgcatatttctctaccaagtttgctttgaataagttctacaaagagaagtggtgggaaaagagattggaagcgttcacagaaattatcaatattgcttatcggattaagatgagcaatgactacttcctccgttgcgaatatgctcaaatggaacctggtgagtctcggttcaaaccacatccgaaagagatcgaagagaagttaagaactgagtattggcttgatcttcaagagcttgaaagaatagcgcagttagctgatttcacattaactaccaaagtcaaaagcttgctcgacgtctatgttaatgccagaaagaaaatgatggatgattggtatgaggatgctattgaaagctatgaagcgtcagaaaaggacttcaaactctctgaaaaactgctcagtgatttagtcgctgaagctaagcgagaattaaaaattaactaa

SEQ ID NO: 133794 - DNA, 192 bp, Enterobacter cloacae
atgaacaaagcctcccccgttgatttgaggaagtgccttgagaccgcccaaatgctcgctcaggcaggaataagatttgtgccaatccctgtcgagtcagaggaagagttccaaggtcttttagctgccttagaccgtaggcttgaacgcatggcggtagaagccgaaaagaatgaaggcggtgcagcatga

SEQ ID NO: 133795 - DNA, 381 bp, Enterobacter cloacae
atgagccagtttgaaaatgtgttcctgtctgccaagaaaatcgcaattaaccagttggcagttgaagtcaacgttgaaaaagccaaggcgtttagtcccttcgtccgcgtgggtatcaatgcaactggccactttgatcgtcgtccaatgaatatgtttggcggcgtgttcgagcagaacgagctttccaatgttgacactttcccggccatcctttggcaaatcgataactacggtaaccctcagtaccctgaccacctcattatctccactaatggtgagttcggtgaatatttggaactgtttgtcatcgaccagatgcagcaattcaacgagccagccgaaagtttcatcctggaggttcaggacctcaccaaataa

SEQ ID NO: 133796 - DNA, 690 bp, Enterobacter cloacae
atgaaatctcttgcagagcagatgcgtaaccacgaccgcgagcagatgagccgcatggctcataacctgcgagagcagtaccaggagcgcgcaccggtcgagcaggtggctcaggtattcaactggctgttcaaccaactgcgtgccgcgttcccggccagcatggcgaacttccgcacccaggacgacctgaacgaattccgccgtcagtggctgctggcgtttcaggagaacgggatccactcaatggcgcaagtagatgccggtatgcgcattgcccgccgccaggagcgcccattcctgccgtcgccgggccagttcgtcgcctggtgcaaacagagtggcggggcgctgggaatcaacgttgaccaggtgatcgccgaatactgggactggcgtaaccgttcgttcgagttcacatccagtgagcatttcccctggtcgcagccggtcatgtaccacatctgcgttgaactgcgccaccgcagcacagagcgccagttgactcatggtgagctggcgagcgaagcgggcgatctgctggacatgtgggagaagcgagtcaccgagggtaagccagtgccgccggttcgcagggcgattgcagcaccggctgccgaacacgggccgacgccgatccagctgctgctggcgaagtacaaccgcaacaagtcaaacgggatggtgtga

SEQ ID NO: 133797 - DNA, 300 bp, Enterobacter cloacae
atgaaaggcaaacaggcaattctgcgttatctcgaaacgcaccggaccttcaccgcgaaggatgtggccacagagtgtggcatgaccatctactgcatcacgaagaacgctatcgatctggagcgggcccggaagattgtgcgcgtgagaaaggtctggcgaacggtgacttatcggcaggcgacgccggaggaacaggctggcaccgcgcgcaactgcaccaacggaatatttcaggagtgccggaacagtccggccatgagaagggtgttgatggtttgggggagggtaggggtatga

SEQ ID NO: 133798 - DNA, 591 bp, Enterobacter cloacae
atgatcatgagcacaattaccaaagaatggctgcagcagaaaattgccgagatggaagctgcccgcgatgaaatcccgttcggcctggacgaagacgacagcaacaccctggcggcgctgcgtatcgcgctggcatcgctcgaagcggaggctgtggcgttcagatcaaagctaaagccatcatctgctattggtagcgagcactgggattatacggaacatcgccagccagatgctttcgaacttcgaaactgcattatcgagcgcctatacaccgccccgccagcaccggtatctgtgcctgagcccattaagcgtaacgacgcggatgggtggtggatgtataagggtcgtcgagtcggcggtggctgcgcagagtggtacaacctggctcttgatgactgccgcgccgccatgcttcagggtgcagatggcaactctccggtttttcctgatgactggaaactggtgccggttgagttgaccggggcaatgaccaacgcaatgacagatgcgatccttgatgacctgcataacgtcgatgtatggcgcagtgtactcgcagcagcaccgcagcaggaggtgaagtga

SEQ ID NO: 133799 - DNA, 327 bp, Enterobacter cloacae
atgaagccgaagaagctaaatgctaagcagcaataccaattagaccttgagttggtcaagaagaaacctgcgaaccggacagaggcaaaagcccatttggcggcgcagttacggatcagcaagtacaaggcgcagaactcatccaaaattcgcattggcagcttcaggggaaaaaagaaggtgcatttcagtaaggccgaagaggaagccagggcagcgctaaataaagcaaatgccataagattttccgaaggggaggtcgagtccgttgatacggatcgaatctcagaaagtaacaaacgctggcgcgggagaactgctgactaa

SEQ ID NO: 133800 - DNA, 624 bp, Enterobacter cloacae
gtgagcgagcaatatgcatataacgttagaatcgatcataacttcgggttcttcttggaaccaaaacattacgcccctttgctgagcgtaaatgatgagtcggctgtacttactaaactgtcactcattcttgaaaattttcttgtggtttatatcgataatattcgcgatccagaaacaagtaagtatgtttatgcatcaagaaagtattttgcacctaaacttgagttatgcgtagcgcttggcctaccggttcctttagccgatgttatgtccgctatcaattccttaagaaatcagtatgcacacgatattcagagggttatgacatcagaggatgttgataaaattgagcgattgctaggtaacattaagcctgaattggtcaattttcatgacgcgatgaatttgtcatctataactcctctcttcgacgatggcatcaggagcctgcaatttatgagggagttgccgtttgccacgccagataagcagaggatgagcgcacgtttggttgctatatcttatgcgctatcaaatttctgtgcttttttcctcattaataaattagcaagcaaagggatatttaaatcaacaagagtagagtcagcagaacaagattaa

SEQ ID NO: 133801 - DNA, 516 bp, Enterobacter cloacae
atgactacgtattacacagttgatgcaggaaattactattcacaaggcatgcttattaatccagtgaagccatctattcagcctgtagagttgcaaaccatggtaacagcgctgttcccgcgtggggtttcacatcatggtaatggctatttcctatctgcctctgccattgctggggatataaatttctccatcgattggggtcttgaattttacagaagagctatgcgacctaacaccccttctcgctacgagtgtctctttgcatgtgaaaaactagagaatgcaaaggatttcagggctaaatttcgaaatccaagctctccaatttacgaagttgacgcagacgaaaacttagttcacagaggcgatatgtcgctattgattagagataattcgtgcctcgtctatacctaccagattgaacattactggtctggcacgacattttcacaacagccattctgggagatattgatacccctgccagtctctatcggacgtcgcgtggcttag

SEQ ID NO: 133802 - DNA, 285 bp, Enterobacter cloacae
atggattcaaaaaacgcagactttaaaattaaaaaggtcagctttgactggaaggaaatcaacaagtcagagctttcaagtagttatagggtcgtgtgtaaagttatatttgagggcggattggaaattgaaggaagcaatttttatacttggtataaaccaaacgcgaaccctcttggccctataaattatgggaatgcagaaattaatgcagagcatgaggcatttaaattagctttatcgcgtgctcatgaaatttttacttctcaaaccgtgcccagataa

SEQ ID NO: 133803 - DNA, 375 bp, Enterobacter cloacae
atgcttgttacagctaaagcacaaggcagaaaactcattgaatcaggaacgttccatgtagactacgaagtagcttctagtagcggacttatattagcctactcaggcctaaaaataattgttaaaaccaaaatagttactgacattgagaatgaaaatcttagcgtacgtgtagagggcaatgatgttatctttgatcacgttacagttgttcctccttttggtgcaccggtagggttaattgtaccgtctgaaattggtgagcaatccaatggccagaagatctttttctcttggttttctcacattgtgacttcaaaaaacggcaatagcactgttatcacttcatatagcttgtatgaaggtgaaaaatga

SEQ ID NO: 133804 - DNA, 2373 bp, Enterobacter cloacae
atggccactacacctactaatctgccagtaccgagcgaatcttatcgcgacctgaagtataacgcaggcaaaatcgatgagttcgttacgtcagaaaatcatgtttatgttgacaggttcggcgatgaacatcgtacaattgcgggaataaattacgatgcgaatcaggcaattctgaattatggctatatcacgaaggattcttttgaagatggcagcaccattagccttgctaacgagtgcctgcgctggaagagcaacggggaatattacagatgggacggaaccctccccaaagtagttcccccaggatctactcccgatagcactggcggtattggtgacgggaagtgggtcagtgttggggatgccgctttaaggacagagctaagcaacggtaaataccgcagtgacgcattagctgtaaaatatgttccaggggtcgtcattgatagcacgactgataaccgcgcagcagtatacgcttacacaggacaaatttatgttccgaagggtgtccagctacgctgtaatttcctgccagatgatgatgtaaccaaattcaccggtgaagggaaaattcttactcgcgacccatggggtaacgagcatgtgtttgacgtttcactggcaactcatggcagcaaatacactgcattcaacgtaataaaccagttcgctcgccgcaatacgcaatgtcgtgttggtatcgttggtgactcaatcacagacggtgcatacggaaccggatgggtagccaacccaacggattcaaacggggacctgtcttcgactaattacgaccacaatagcaatggtggcgcaggttcctggttccgtaccttcacggactggcttaaccgttttactaaaaataactccttcattttcaaagccgagaactgtgcatcatcaggaaagcgactcattgatggctgggctaatcgtaactttgaccatggtttttttaaaaacactgcatacgggaatgttccgccagacgtttgcttcatgtccatgggcgttaacgataacgggcaactggatgcgttagggttcgatcagtatttgttccgctttgagcagtttattcgcaaggcttggggttatggatgtgctgtctgcgttgtttcaatgaaccagaatggctcacagtgggcggcgctagaagcatcaataaagaagcatattgaacgcctgttccctgcggtcgagttccttgatctgtctcagccagtaactgagatgtacagagacctcggaagctatacgcttgaagatattgcgcggcgcccgacagatggcacttttgataacacgcattttgctcctctgggacatcaatatatcggcgcatatgcagcaaaggctgttatgccgtatagagtccacactgcgaaaaaagggaataacttcgtaccaacagttgataatgatatccagccatttggtttcccgtctggtagcacgtacagcgttggtatggagcggttgagtggaaacacatatcttaatggtttaactggctggggcgtggtttccccagctactgaaaatttaaccatacgatattttgtctggtgtgatacttctgatatatcaatggttatttttgaaccgtataacccaacatatgttgcagcaggtcgcgctaactccatctctatccgacaacaagataaccgtaatgcagcattcttttcgggtaatatcgcgagtaatggcgtctcatcgtttacgaacaaactcaccactcgaactggaatccttagaaaaggactgaatcagattgagattgtttacgatggtacaccgtcaaaagtataccctcccgctctgttattcagaggagagttgaacgaatcatgttctcagaacgcctctgtattcctggctgcaaatgcgataaagggtgtttacgggcaggtaagagataaagcagatctcttattagcatatggtgcagaaacagcaaatgatgaagcacctgatatgtatggtgctactaaatcatcaaatgttcagaatgttgtcctgtcaactttgcctgttgattgtggtgtggttttttactacaaacccacgtcacaaagtggagttgttgccaagcgagtggcgaccggcgttgagatctcgacgatgcttttcggcgcacttactgttgtcggcacattgacttgcgatgtgacaggtgaggtcatgctcacagctggcctggcaggttcagtacctacaataacagttaaacccactactggcgggactgttcaacaggctgtttctggatactctggtggtaagatcgctttgattaataagggcgcatcttcttcaaccatagttatcaaaaatgcagcccagtatgtactgtga

SEQ ID NO: 133805 - DNA, 1107 bp, Enterobacter cloacae
atgtccaaaaacggaaacatagttagcatacatcaattgagaggtattgccgcgcttttggtggttttcttccactttaggtttttcttgaatgatatatatgttcaaaaaaatcttggatatatactatttggcgggggagcttttggtgttgatttgttctttatgattagcggttttataattgccgcgtcaacaagaaataactctggagtgtttattttttgtataagaagatgttttagaatatacccggcatttattgtcgttttctttgtaggctatttaactttatattcatctgaaagtaccttaaccattttgcgatcttttcttttcatacacaaagattactccatgccatcccccgggtttggatataaccttctcggccccgcatggacgctaacatatgagatttacttctattttgtattctctttggctatggttataagccataaacacagattaataattagctcattatttattataatcccgttcatggtattacaaaaaatatataacggagagattttgttaacgggcacaggtgcgcccaacgttccgattgaaaacgatttttatcctttactgagatttatgggctcacctattattatagagtttacgataggcatggctctctatgcaatttatagcagattcaacttcaaattagataaattgacatcaaaatctatactgttgttcgctataggtttgtccatggcattctactttaagcctaatcactcaggtttcggaatgcaggattttggtttatggtccttgctacttttgtcagcatgtttgctatatgaaaaaaaccatgccttccatgaatctaaagcaatatccttccttggtgatatatcgttttctttatatatatgccactacccagtgatatacatattcgaaaagaacaaagatattttacttgatggctttgcagggatttcaaaattcttattgctgacttccgtatgccttattttgtcaacaatcttacattattgtgtagagaagccatttataaaaattggcaagaaaattgaagcctcaataaaaaacggaagaggattgcctgtaggagcataa

SEQ ID NO: 133806 - DNA, 306 bp, Enterobacter cloacae
atgcagatgaaagcaaaccgctacacattggaccatttatgcagagttaattgctactcatgcctggttgaaacgtcaggtggttacgcgctttttcagcctgatcttccacccgccaacggaacgcgggtgttggttcatgcgtttggtcagctacagctcgctgttgttatgggcggtgcgctcatcaccgaagacggtgaaagcatagagggagatgctttagatgaagtcgatgtcatgggagttgtgaccttttttatcaatggcgcttcggcgttctcagacgacaatccggtgatgtga

SEQ ID NO: 133807 - DNA, 834 bp, Enterobacter cloacae
atgcaaacagaacccgatgtattaacggaacacaatgaactcatctgttcgaccagcattgaacgcatagtgacaggccgcgataccgcactaaaacagatcgaacaactcattcagcagcttgatgccatttcacggctgacctcagaaattggcggtggtacagcgcaagactgggcgatgaagtccgggcaccgctacgatagctggctgactgaaaaggctgataaagcaatgtctgccgtcacccgcaatatagatcgcagtatctggcgcgatttgatgctgaagtccggcatgatggccttgatggatgctcaggctcgagaccagtggcataagaatctggaggagggcgatcttcctgcgatcagtgaggcgaatattctcagtacttttgagcagttacatttgaacaaaatggatgtctttgagcgcgggatcatcaacgtgttcaaaggtctgtcatgggattacaaaaccaatagtccctgcaactttggtaaaaagatcatcgtcaacaatctggtgacgcatagccgctggggctttagcttaaactggggctggcggcgggatcaattagcggacctggaacgaatgttatttctgctggatggtaaaccgatacccgataaccgtggtgatgttactactcgattgatggagcatattcggaacaacccttcgaaggatgtttacgaagatgatttcttcagtatccgttactttcagaaaggaacagcgcacatcacttttaagcggcgcgatcttacagaaaagatgaatgatatcgtggcgaagcactatccagggatgctggcagcgagatga

SEQ ID NO: 133808 - DNA, 321 bp, Enterobacter cloacae
atgcacatttcaactgtaccggccacggtgccggtttcgtcacgcctatcgcccgtacaggtatggcagcaattgttaacgtatctgctggagcaccattacggcctgacgcttaacgacacgccattccatgacaacacggccattaaggagcatattgatgcaggaatcacgctcgccgattctgttaattttctggtggaacgttatgaactggtacgcatcgaccgtaagggattcacctggcaggagcagacgccattcctgaccgctatcgatattctccgagccaggcgagctaccggattaataaatacttaa

SEQ ID NO: 133809 - DNA, 324 bp, Enterobacter cloacae
atgtcgttatctgattctccccaatggggactgcaaagtgatattaccccccgctttggcgcaaggctggtacaggagggcaactggctgcattacctggctgacagggctggttttacggggagttttagcccgatacacctgaagaaattagatctggctttcccgctgtttgtagaacaactggaagaaatgctgcgtgctggcgaactaaatccacatcagcaacgtcaggtgaacatccaacttgcgagtttaacctgtatagctgatacccgtggtagctgcggctacgtttacatttctatttatccgaccccgtaa

SEQ ID NO: 133810 - DNA, 471 bp, Enterobacter cloacae
atgtccgaaatcgcattatctcccgtttttccggttaacgaacaacgcattatccgtcgcgccctgcgtctactggagaaatatcagcgccagccgggagagtcatttacctcaacctgcttcactaaaacctggctgcagctacaaatggcgggccttgagcgggaaatctttatcgtcctgtacctcgataatcagcatcgtttgctggagcgtgaaacgctgtttaccggcacgctcagccatacggaggtacatccccgcgaagtggtcaaagcggctctacgccataacgccgctgcggtcattctggcccacaaccatccttccggcgaaacggagcccagccaagcagatcggcacatcacaaagcgggtagtgaatgcactggccttggtcgaagtacgtgtgctggatcacctcgtggtaggggatgacgtgatgtcatttgcagagcgcggttggctgtaa

SEQ ID NO: 133811 - DNA, 546 bp, Enterobacter cloacae
atggaaaaggattgtcagaaagatataaatatatcttctttcacaatagtaagggtatgggtaaaacctagttacagcaaaatcatgccactcgtcagccgattggctaaaaccttgcctgccattgtcgttttaatgctgtgccatccgtcatctgcttactcagatgaacaacgctatatcagtatccgcaataccgataccgtgtggactcccggtaatatctgtgtgtatcagttccatctggataatggtggtagcggtgtgggttttggtcctctgtctgtttcgctggggctgaaagacaaggtgggcaacacgctggcgacgggaacaatggacgtagccccctttggcgaaagcgatgctactcgttctcaggaagcttttcttgagcatgaatgtgtcgaaaacgtcagcgctattgaaatcatgaatgcgaccgaagagcgcaacggccatcaggccaggctgccactgtccgttttcgaccctcagtattatcagccactgtcagtatcggttgctgtgaataaggcatcataa

SEQ ID NO: 133812 - DNA, 648 bp, Enterobacter cloacae
atgaaattacttaccactacattgctggctaccagcatttgtctgagtgcagtttttccggctgacgctggcaatatcgtcggctctgtcaaagcctgggagtacatgcaggctgacggctggaaatcagctgatggcatggatgacaatacgctgcacaatatgctctaccaggccaatgttattgataactacccgtggacgaagcagtttttgctacgtacccgtggtggtggtgcaattttcctggccgataagaaaacccacactattcgtcaactaaaactgaatcctgtcggtgaaacctacaacgatattgaaacggtttatcagggagatgataaaggggaaggctgctactttgccgttattgataaccaagcttcggtacgtgataaggctatcgatgctcttatataccccgactggtctgcaccccaagatacggatgctgttcttaaggctaagattgcaaaagtcagacaacagatagccccaaaagtcattatggtgatgccagataattgtgtgaataaacagcagcaagccacattagcggctaagcgctcggaagaggatcggaaactacagcaatgggtcgcacagaaaagcttagcggaattgtgtcgtcgcacaggcaactgctga

SEQ ID NO: 133813 - DNA, 702 bp, Enterobacter cloacae
atggttcaggttgaacgtcgtcatgatcggcttgccgtccgactgtcgttaattatcagccgcctggtggctggagaaacactggatttacgagcgctggcaactgaatttggtgtgtcggttcgaactctacgccgggactttcgggaacgtctgatgtatctggatctggagtatcgcaaaggccgatgccggttgctatccggcagccgccagagagagttagcggtgatgaaatttgcccgtcagtcaggcgttgaagctctgtttccttatatggataaccatctggtcagttcactgttgagcggttcaggagagtctccttgccttatctggcagggaacagcccaggtgtcatcaccagaatcaggcgtattcactcggttggtgagcgcggtatcagaacatcgaaaggtgacgctgctcggtaacggttgccgctgtacaggcctcgctccctatcggctggttctgcgtgacggcgagtggtatctgacaggcgagcatcagacccgtatagcagtatttcccttgacggatattcgtgcagtcacgctccacaacggcagcttcgctcctgatttagcgatgcgcgatatcctctctcacccggattttcttcaggctttaccccactttcgctttttccattcattgcttgtcgcaactgccggcgggcttatacctcagaaggaataa

SEQ ID NO: 133814 - DNA, 876 bp, Enterobacter cloacae
atgaaaaaatcagaaggtctgcaggctatcgaaaagccactgacgtcactcccctatgccattggaaaacatatacttgaccatattcaaaagctcactcattacgaaccgatcatcggcattatgggcaaaacaggggccgggaaaagtagcctgtgtaatgcgctgttccagggtgaggtcactcccgtcagtgatgtcgatgcttgcacccgtgacgtactacgtctgcgcctgagcagtggcgagcatagcctgatactagtagacctacccggtgtaggcgagagcgagcaacgggataaagaatatgaatctctatatcgcaatattcttcctgagctagatctcatcctgtgggttatcaaagccgatgatcgagccttctctgtggatgaacgcttctaccggcaagttatgactggctaccagcaacggtttctgtttgtcgttaatcaggttgacaaaatcgagccaagccatgagtggtatgtcaccggcaatgcaccatcgccgcaccagtgggtgaatattgaggccaggctggcgtctattcgccagttattctcaccacatcatccggtgtgcgctgtctcagcgagaacagaatggaatctcccatcaatgatagaaacgatgatgtgctgcctgccagaccgagccaccagcccattggcgacacaattgcatgggcggttatgcagtgaaccggtaaaaaagcaggctcgtgagggctttggtaatgcggtcggggaggtatttgattctgcggaagcggcatcatttattcccgcgccactgaaagcagttattcgcactttccgcgatgccgtagtatctgctgctcgcgccgtttgggactggattttcttctga

SEQ ID NO: 133815 - DNA, 1446 bp, Enterobacter cloacae
gtgaatgctaatgaaccttcagcctcatttaacaatgatgaaacagccccccttccagcttcccaagataagaagaaagcgccaagcataaacataattaaagtgcgcgatgatcacttcccgttacagttcattattgatgaaaatgatacgaccaaatataaattggctgaaggtatagaagcatcttggttaggctctgattcatttggaattaaggagttacgcaaccgtgttgaaccttggttaacatcgctttttcagtcagagcatctttctcttttggctggttccggcttaacgcacgcgattcactacctggctgccgggaaaggagctgcaggtatgagcaccctgccgcttagcaaccacctccccgaaattaatcaagcggcaaaaaacgcagccatcgcagctggacgcaaagaaggcaatctcgaagatcaattgcgagttgctaatgagttacttcgtggctttgagattttgcaaaaaaaaactgaggctgaagctcttcgtgcagaactaaaaaacggtatgcaagatttcgcacattcaattctgaagagtgaagaaggtatcgcgattgctgcagaacataaacgagagcaagcattcaatactctaattacttttctgatgagttttgccagccgtaccggggtacgagatcgcctgaatattttcacaacaaactatgatcggctcattgaagctggcgctgaattagctggactgcatttattagatcgttttttaggcaacttgatgcctattttccgttcctcacgtttagatttagatatgcactacaatcctccaggcattcgtggagaaccccgttacttggagggtgtggcacgctataccaagctacatggttcagttgactgggtacaaacgaagaaggatatccaccgtattggcttgcccttcggtgcagaaagtacagaaccatatttaaaagcaccaggtcttgccggtgccaccgctcatcaattgatgatttatcctaatgcggcaaaagacagagaaaccgccgattacccttatgttgaattattccgggatcttgctgctgcagtatgtcgtccgaacagcacattagtaacctatggctacagttttggcgatgagcatatcaacagagtaatccgcgatatgctgactatcccttccacgcacttagtgatcatctcgtttgacgatccccttggccgcattatgcagacataccaagagatgggaagaccatctcagatcagcttattgatcggacctgcattagctgacatagctaccttgactgaaaactatctccccaaagcagctattgacaagacaaccttccgcatgagcgagctactcaaacaacgttggggaacgtcaaatttagaggataagaagccgcctgagaatggaacaataggagggattcaagaatga

SEQ ID NO: 133816 - DNA, 2115 bp, Enterobacter cloacae
atgagtttatctccattagcttatgctgactcgctgcgtattggctcaatagatttcgtctctcccgatgaaattaaggtgctaatagacatagaggcaccggatggagtagcacttaataccggtacgccacgcccatttcctcgcattaacggttatgtactgatacccagcgatgagggacatatggttgcccagatcgaatggattacgattgaacgttctcagtatacccaacgtaagggaatgcaagaccttgggttggtagacttaccttatcccttacgtaaaatgagtttgaacccgatcggtgttttggcttatgaaagtagggatgctcaaggtaaggaaactttccgttttcgtcggggtgtagaaagttatcccaccgtgggcaatgtagttatattgcctacacccagccaattgagagcaattgtcgaatccggtgacaaccgtaggattaagattggtactagcccattagctgccaacgctgaggttaaaattgatccagatcgcctgtttggccgccatttagccgtactgggaaatacaggtagtggaaaatcctgctcagttgcgggattaatccgttggtccatggatgaagctcgtaaagcacgggctggagaagacccgaatgcccgctttatcttgcttgaccctaatggggaatatgctaacaccttccgcgatatgagtaaggttcgtgtttttgcggtcgaaccaagcgacgccattgagcaactgcaaataccaatatggttctggaatactgtcgaatggggttcattcactcaagctagccctaaagcgcaacggccaacgttgatccaagcgttacgatcggtgcgtgacgggggattaactggcgttgttactcccagtcacgagatgcgtcgttatttgagaacacttgtaagtattttacagttggtacgtaattctggtagtccatgggcaaactttcctcatccgaagaacttctttgagaagctcaaaaaatggcaggagggattgaatgatgaggactcctttgctcaagccgagaagacagcgcttgatgcagttaaggataagctttcaacattaattaatgctcgaagtggtcaatatccaacctatgattttacacgtgtagaaattgatgggcttctatcgctgctacaggatgcacacgccgtattcggtggcagtgataacgatattctccctatcgatgctgatgtgccacgccctttcactggcgaccaactgcttaaaagcgtagaagctacagcagaattgctcggagtttccgagtatgtcgaaactatgttaatgcgtatccgtacaattctttctgactccagaatgaaggtagtttctggcgatgcaatggcgttgtcgctggaggattggttaaggagttacattggtgacaatcaagccaccaacgggtcggttaccgttatcgatctctccttagttcccgctgaagtggtgcacatcatcacagctgtgattgcccgaatgactctggaatcattgcagcgttaccgtaagttaaaccacggtaaaaccttacccacagtactcgtcatggaagaagctcatacttttattaagcgctatagagatgactgtgaggatcaaaactctgctgcaatctgttgtcaggtatttgaaaaaattgcacgtgaagggcgaaaatttggtttagggttagtactctcttcgcagcgtcctagcgagctatcaccaactgtgctttctcaatgcaacagttacctgttacatcgtattagcaacgatagagatcaggaactggtgcaaaaattagtgcctgacaatctgcgtggactgctacgcgatctaccctcgctaccttcccgaaatgccattttactcggttgggcttcagaattgcctgtactggttcaaatgaatgcactacctgaacaccatcgtccaaaatcagatgacccagatttttgggccgtatggtcaggagaaggcttacctaacaatgccgctgggagtttgcaagagcgtagcgtagattggaaaagtattgcgaacgactggcagcagaacaatgagccaaaacaggatgataaagacaaaatttga

SEQ ID NO: 133817 - DNA, 2397 bp, Enterobacter cloacae
atgaaaccagtaaaacaacaagaccttagcaacctgaagtggattgccgactttatctggaacattgccgatgaccggcttcgcgatgtgtatgttcgtgggaaataccgtgatgtaatccttcccttcaccgtattacggcgtctggatgcagttctagagtcgaccaaaaaagcggtgcttgagcgcaagaaattcctcgatacgcacaatatcgcagagcaagatggtgcgctgcggatggcgtcaggacaggcattctataacacatcacaattcactcttaccacactcacaagtagcgggcatgggcaacgccttcgcgacaacttcattgattacctggatggattctcaccgaatgttcaggatatcttggcgaagttcaaatttagagatcagatccagacgatggtagaagccgatattctcggtcatctgatcaatgacttcctggacgcaggagtcaatctgtctccgctgcctgtaaaggattcagatggtcggattaagttgcctgccttagacaaccacggtatgggcactgtattcgaagaactgatccgtcgtttcaacgaagaaaacaatgaagaggccggtgaacactttacaccgcgtgatgtagtcaagctgatggctaagttgctgttcctgcctgtggctgagcaaatccagtcaggtacttaccttctttacgacggtagttgcggtaccggcgggatgttaaccgttgccgaagagacactgcacgagttagcagccagccacgacaaagaagtatcgattcatctatttgggcaagagataaacccggaaacctacgcaatttgcaaggctgacctattgctcaaaggcgaaggagatgatgcagagaacattgtaggcggtgcggataagtctacgttatcggccgatcagttccagtctcgcgagttcgacttcatgatttccaacccgccttacggcaaaagttggaagaccgaccttgagcggatggggggcaagaaagagttcagcgacccgcgctttattgtcaatcatggtgacgatcctgagtttaagctcataacgcgctcgagcgacggacagcttatgttccttgtgaacaagctccagaaaatgaagcacaacacgccgttaggcagccgaatcgcattagtgcataacggttccgcgttgtttactggtgatgcagggcaaggcgagagtaacattcgccgctgggtgctggaaaacgactggttagaagccattatcgccttgccgcttaatatcttttacaacaccggcatcgcgacctatatctgggtgctagctaacaagaaacccgaacaccgacgaggtaaggtacagttaatcgatgcttcccaatggttcttgcctttgcgtcgaaatcttggcaaaaagaactgcgagctaggggacgcagacattgaacgcattatgaaacattatctcgaccagccgcccgctgatcccgctgatatagaagcagcaaaggcaacgcctgagtctaaatggtttgataatgcagacttcggttactggaagataactgtcgagcgacctttgcgccttaagagccaactgaaacgaagcagcatagaaagcctacgctttgctactggtgatgaagaactgcgtatcgagatttatgcaaaatatggggacaagctgtacaccgaatttaccaagttcaagccagaaatagagctatggctaaaaggtgatgacgaagacacagaagatgagtctgatgatgataattccaaggtcaccaaaaaggctgtgcctgagaaacgacgtaaaaaactactcgacccatcaacgtggttacgtgacaaaagcttactagaaatagccaagttggcgcagcaggaacttggtgccgatgtattcgaggaccataatgagttccgcgcacgctttgataccatgatgaaggcacataataaaaagctgagcgctgcagaaaagaaaatcatatataaagccgtgagctggcgcgacgagacagctccacctgttatagctaaacgtagtaaaatcaaggcatccgagtatttcgaacctagctatgatggagcgtatttggaaacagatggcaaagatcgttttatagtcgagtatgaagctgataccgatttgcgcgactacgagcaggtaccgctcaatgagcctggtggtattgaagcttttttcgtgagagaagtgctcccatatgcgcaggatgcttggatagcaatggaaaccaagaagatcggttacgaaatctcgtttgctcgttatttttaccaacctacaccgcttcgaacactagagcagattcgcctagatattctcaacttagaagctcaaaccgatggtctcttaaataagatcgtgggaactgaatga

SEQ ID NO: 133818 - DNA, 1404 bp, Enterobacter cloacae
atgatggcattaaaaagtatttacccaagataccgcacagcaaaaatgcgctggctaccatctgtccctgaacattggaatgaacaacgtgccaagaccttctttcgcgaggtggacgaacggtctaagacagggcaagaagaattgctttctgtgtcacatttgactggcgttacaccacgcagccaaaagaaagtcacgatgtttaaagccgagagctacgttggttctaagttatgtcgccctggagatattgtaattaacactctctgggcttggatggcagcacttggcaccagtaaatacgctggtatcatcagcccagcatacggggtatatcggccatatcgagtcgatactttcaaccctagatacctagactacctgttgcgtactcatgcctacgttgccgaatatattgggcgctcgacaggtatccgctcctcgcgtttgcgcttgtatccgaaccagtttctggacatcgtcttactgcagcccccacgccctgaacaagaccatattgtagatttcttgcaggcgcaagatgctaatattgctcgttttatcaaaactaaacgggatctcattagactgcttaccgagcagaaaatgtatatcatcgatcacgcaattacgcgtggtattgatatctcggccgagttgaaaccttctgacatcgaatggttagggaaagtgccaaagcactggaaaactttaaaacttaagtttgccacaaaacgaattgttggtgggtctaccccaagaagcgacgaaccctggttttgggatggtgatattgtttgggtgaccccacgagatattagcaaaacggattatctgtattcatcacaaagaactatctcagaggctggcttacgctcatgttcggcatcgttaatcccgccggggagtatcatcataacctcacgagcacctgtgggaaatgttgcaatcgcacgagttgagttatgcaccaatcaaggctgtaaagcaatagtacctaaatctgacatcgtcatcagtgattttttatatttgttattactccgtatgaaggaacgcttgcagattctcgccaatggcacaacgttcgcagaaatcggtacatctgcattagcaaatgagttcattcctgttcccccaatttcagaacaaacacatatctgccaatggattaacgaagaatgtaaaccactcaatgaagctataaatcgtgcggaagatgagatcagacttatccgcgagttccgcgatcgacagattgccgacgtcgtcaccggacaagtggatgtgcgcaactgggtaccaagcactgacgatatagtaaccgaggaagacttagtggcacttggtgaggacgaagaaaccaataccgatctggagagcgaaaatggcaacgactga

SEQ ID NO: 133819 - DNA, 3000 bp, Enterobacter cloacae
atggcaacgactgacaccagcgagaagggtttggaagccctgatcgtgagcgacctctgtaataatggtgactacgttcagggcaattcaactagctacaaccgtgatgtagcagtggacgtagtgcaactattgtcattcctgcaggccactcagcctatagcttttaccgcattggaactgggcaatgaaggcattaagcgttcgcagtttctccacaggctccaaggcgaaattacaaagcgcggcgtagtcgacgtattgcgcaaaggcatcaatcacggtcctgagcacatcgacttatacaagctgctacctaccccgggcaatgtcagcgctgccgagaacttcagcaggaacattttcagtgttacacgacagttgcattacagcaatgacgagtcgcagcgctcactggacatggtgattttcattaacggtctcccggtgctgacattcgagttgaaaaactcactgactaagcaaactgtggccgatgccatcacacagtatcagactgaccgtaatccgacagaattactgtttcaactaggtcgctgtgttgcacacatggcggtagacgatgctgaagtgcgcttctgcactcacctcacgggcaggacctcgtggttcttgccattcaaccaaggctggaatagtggcgcaggcaatcctcccaaccctcacggtttgaagaccgactatctgtggaagcaggtgttgaaaaaagaatctcttgccaacatcattgaaaactttacacaggtagtattggaagaggacgaaaagggtaagaaaaggcgcaaacaggtattcccacgttttcaccagttacgtactgttcgtgctttgctccgccgcacgagtgaagatggggtcggtaagcgctacttaattcagcattcggctggcagcggcaagagcaatacaattgcatggctagcccatcagtttgttgagttaaagaccgcctccaataacatgctggctcaatttgattcagtcattgtcatcaccgaccgccgcgcattggacacccagatcgcccgtaccatcaagagttacgatcacgtggcatcgatctttggccattctgaagatgctgccgagttgagaacttttttgcgtaaaggcaaaaaaattatagtaacgacggtacagaaattccccttcattctcgatgagataagtgatttcggtaacaagaagtttgcacttttaatcgacgaagcacattccagccaaggaggtaagacaacagccaagatgcatatggctctgtctggcacaaatagcgatgatgatgaaattaaggatgaatcagttgaagatataattaacaagctgatcgtttcacggaaaatgctatctaatgctagctacttcgccttcaccgctacgccgaaaaacaggacgttagagttgttcggtgagcgctatctggaggggggtgcggtgcactttcgctcaccggaggagctgacctatactactaagcaggcaatacaagagggattcattctcgatgtgattgctaattacacttcggtggacagtttctaccacgtcgccaaaacggtcgaagacgatcccgatttcgacaaagttaaggcgctgaaaaagattcgccactatgtagagtctcacgacaaagctatccgtaagaaagccgaaataatggtcgatcacttcatggcccaagtggtaggaaagcagaagatcggcggaaaagcccgagctatgatcgtctgtaacggcattgcaagagccatagattatcatcgagaagtgtctgactaccttaatactcttaagctcccgttcaaggctatcgtggcatattcaggcgacttcgaagtcaacggggagaagaagtccgaggctgatctgaatgattttccaagtaaagatattccatcaaagctcaaacaagatccgtatcgcttcctgatcgtcgcaaataagttcgtcacgggttttgacgagcctctgctacacactatgtacgtggataaaccgttagcaggcgtgcttgcggttcaaacgctttcaaggctaaaccgtgctcacccacagaagcgagataccttcgttctggattttgccgacaacgctgaggcagtgagaacagccttccaagactattatcgtacaacagtccaggctggtgaaactgatcctaataggttgcatgatttgaagagcgatctcgacgtaaaacaggtttacagctggcagcaggttgaggacttagtggcattatatgttacgggcgcagaccgggacaaactcgacccaatcctcgacgcctgtgttgcggagtacattgataacctgaacgaagatgaccaagttgagttcaaaggcaaagctaaagccttcgtccgtagctatggtttcctctccgcaatcctaacttacggccacccagcttgggaaaaattggccattttcctgaacttcctgattcctaagctccctgcaccaaaggaggaagatctttccaaaggcgtgctggaaggtatcgatatggacagctatcgggttgaagcacaggcgtcgctcaagatgtcaatggatgatgcagatgccttcatcgaaccaccccctcccggcggtggtggtggcagtggaacaccagatatcgacaaactatctaatatcattaaggccttcaacgatatgtttggcaatatcgaatggaaggacggagacaaaatccgtaaggtcatcactgaagagatccctgcccgcgtagcacaagataaggcctaccaaaatgctcaagccaactcagataaagagaacgcgaagctagagcatgacaaagcgctaaatcgtgtggttcttgaactaatctccgatcacacagagctgttcaaacaatttagcgacaaccccagttttaaacgctggcttacagatatgattttcgattcaacgtatcatcctggtactgtttcacaaaaatcaccgccgcaaactggttcgtctgtatga

SEQ ID NO: 133820 - DNA, 627 bp, Enterobacter cloacae
atgaaaacttatgaaggatcacatggtgaacatgttctggaatattgggtaaagattaatagattgctcagtcgcttgactgaccgttatcccaggctaacggctgtacgtgtggatctccactatccaaaaatagtcgctaacggtgacaatatctgttgtttccctaatctggaagctggggtcatttccaggatgcgtgaatccctcggggccaagctggaagctgaccgtattcgtaagaaacgtgaaggtaagcgtatatatcgctgccctttgtttattatgtgggcgaaggagtattctaaatcagggaagtgccattatcacatttgcttgcttttcaacaaagacgcctactatcacctcggggattataagcaggaagataacctgagagggatgattacgggggcttggtatagcgccttaaagctccagcgggacgattgcccagaactggtgacattccctgataactgccgctacgtactggataacgaagcccctgactttgaggatcattaccaggcgttgctaacccggctggactacctgaccaaaatcgagtctaaagtgtttggtgaaggggatcgtaacttcggttgcagccagataaatttgtaa

SEQ ID NO: 133821 - DNA, 564 bp, Enterobacter cloacae
atgtcaggctttttttaccatctataccgaaatgtggaggaagttgaggatcagaatcttaaatcggagattgaagaagttcgcaaaaatctatcgataagttcggaacggacactgattgacagtcaacgatcacccaacaaatcggattttttgaaaattcttatcaaccgaggaatggtcagaggcgacgatctgattgtattagacctaaatagtctggggagtaacgttgaaatgattcaggagaacataatacgttgcgctaagaaagccatacgtattcactgttactttcctcaaaagaagctaccaacggctaatggtggatacattcttacgttactgctccctatgattcaaaatgaatgcagaaggatgaacttggctgcttttaagacaagaaatatcactaaaccattagggagaagagagggcagtaagcactataacaatattcagaaagctaagtttagaggattaacgcaatcacaaacggctaaatatttgagggtcagtatatcgacaattaaacgtcactggaacagcggaattatcggttaa

SEQ ID NO: 133822 - DNA, 444 bp, Enterobacter cloacae
gtgaatgatattaaaaacagcttgccagataagagaatgagcaatgttgaaaaagaggaaattaaaaagaagttaaagaattgcattgaggggactgaggcgaaaaatgctatttatatttacacggatagaaaggtgagttatgcaaaaagattagcaactggctttgctactattcatttttttaaagataccagttatgaagattacttttttaatcttagcagagttgcattacttcctgctattgagttaattgaacatggaatagatagcgttctcagaaagcactctgtaaacacctcgttcccgcatatttgttggattccgattttttatataaacgataaggcggtgatgatcccagtgattcaagagcgtgacgttccatcttccttaaggtctggagggaattttattatcattaatccttttgctaattag

SEQ ID NO: 133823 - DNA, 237 bp, Enterobacter cloacae
atgaacacatcatttaaccaaccaacaccagagcagcgcctgcaaactcttcacaactatggcgagccatcagatcgcttggtgcgtgaacaagagcgtcagcgcataacatcaatagctcgttccactgcatggaaacttgagcaagcaggcaaatttcctttgcgtaaagctattggggcaaagtcttgcggctggcttctgagcgacttacttttttggatcagcgttcgatga

SEQ ID NO: 133824 - DNA, 1020 bp, Enterobacter cloacae
atggcgcaagatttttactctctggaggagatggcccctcgctttgatgtggatgctgatgtgttcattagggcgtggcttgacgaaaggctgcctctttacattcacttcggtagtggtagtcaacggtgtacgattaggcgctgtatttccgctaaagtacatgaacacgccatggatgacatactttatggccgtgatttctatcagagcaaagatagcccaaatcactatgcacagatgtttattcctgaaaaaccgctagcagctcatctgaaaattcaaactcagtttgatgctgtactgggagggtattatgaatacacatatcaggggaatgcccatggatattggatagccaagccaacgacaattgcccacttaaaccgtgggaaatatatactcactgataaagagacagttggaagtaaatcgtcccctgttggtgatgtgatggtccatgcttacgatgagtatgattttcttatttttcctgaaactgtttatatcgataagttatcattttttgttaaagaaaatgatattaaagataaccttccggaattgtggagggatatggaaccatcagatgtactcagcgatcatgcgatttctccagtgcagttttatcgcccgcccaatatatattttgcactttatttaatgatttctgaatggtgccctaaacatcccgatggaaagccaatgacaagtaaacttgttacatatttcaacgagacatgtaaattggcttttaccaaaggctccattagccgttgggccgaacgtcctgaattaaaaagtaacattcaaaagcgagagatgaaaggtcatcgagaggctttatctcatctccttcaggtgtactgcgacgaaaataaaatagataaaatgccgacgaaagtcacagagatgctcaacgagcttgcccgtgttcatggctttggtccagagcttttatttgacaccatggaagttactgtatggttaaaacaaccatatggttttggtgaaaaatag

SEQ ID NO: 133825 - DNA, 903 bp, Enterobacter cloacae
atgtcacaagttactcaaaataaagtggtcaccgcaccggtgccaatgacgccgatgcaggaattctggcactacttcaagcgcaacaaaggcgcggtcgtcgggctggtgtatgtttccatcatgatcctgattgcggtgtttgcgaacgtccttgcgccgtataacccggctgatcagttccgcgatgcgctgctggcacctcctgcatggcaggacggcggaagcctggcgcacctgctgggcaccgacgacgtgggtcgcgatgtgctttcgcgcctgatgtacggcgcacgcctgtcgctgctggttggctgcctcgttgtcgtactgtcgctgatcatggggatcgtactcggcctggtggcaggctacttcggcggcattgttgataacatcatcatgcgcgtcgtcgacattatgctggcattgccaagcctgctgctggcgctggtgctggtggcgatcttcggtccgtcgattggtaacgccgcgcttgcgctgacgtttgttgcgctaccgcactatgtgcgtctgacccgtgcggcggtgctggtggaagtgaaccgcgactacgttaccgcctctcgcgtggcgggtgccggtgcgatgcgtcagatgtttatcaatatcttcccaaactgccttgcgccgctgattgttcaggcgtcgctcggtttctctaacgccattcttgatatggccgctcttggcttccttggcatgggtgcgcagccgccaacaccggagtggggcaccatgctctccgacgtgttgcagttcgcgcaaagcgcctggtgggtcgtcaccttcccgggtctggcgattctgctgacggtgctggcatttaacctgatgggtgatggtctgcgtgatgcacttgatcccaaactgaagcagtaa

SEQ ID NO: 133826 - DNA, 1263 bp, Enterobacter cloacae
atggcaaaaatgacagacatacaaatcaaggcatggatcagagctgacgaacgcttcgaagcaaggtcagatggcaatggtttatctctctgttttccaaagaaatatgcagctccattctggcgttttcgctatcgtttctctggaaaacagcgggtaatgggtatcggttcctatgctgaactctcactagcaaaagcgcgagagaccgccaaagaactctctgcacgtgtagcattgggttatgacgttgccggagagaagcaagaacggaaagctgacgccctcaaaaaaatagagtctgaaaaacatgcacttcgggtatcccaattagccaacgaatattttgaacgccagatacttaaacgctggaagcaccccgacatactgcgccgccgaatcgaaaaagatataaatccaaacataggcaacctgcgaatagaggacgttcgcccctatcatattgatgatatgttgcaaaagatccttaaacgaggtgcgcctaccgttgccaatgacgtcctcagatggactcgacggatctttgattatggaatcaagcggcacatgctggctgctaatccagcaagtgcatttgacatctctgatgccggaggacaagaacaaagccgtgaacgctggttaagtcgagaagagctggtacagctttttcaggtaatgcctttgaccaaagggttttcccgtcaaaatgaactaactatgaagctcattttagccctatgctgccgtaagatggaattgtgtggtgccagatggtcagaatttgatctggatgaaggcgtctggcatttacctgctgagcgcgttaaaaacggcgatggtattgatatcccgctggcggtacccgttgttggctggattaaagaattaaaaatcatgtccggcaacagtgaatgggttctcccagcaagaaaaatgcaacatcgcatgattcctcatattcaggaaagtacattaccagtagcgttggctaaaataagatcaaatatgccagatgtgccaaatttcacgattcatgattttcggcgaacagcccgctcccatttagctgcgctgggggtagatccggtgatagcagaacgctgcttaaatcataaaatcaaaggcgttgaaggtatatataatcgctatcaatactttgaagaacgtaagcaagctttgactgtatgggctgagctacttacaacattggaaaagggtaataattacaacgtagaaccaataagaaaagaaatagcgtaa

SEQ ID NO: 133827 - DNA, 546 bp, Enterobacter cloacae
atgaacaattcatctatcgctaaaatattaagtatctcgttgttgttttcttgtaatattgtctattcatcttcgcataatttacatttacaagagactgcaagttcagtgtcaactcagcaagatggagtgacaaataatgatgtattaaaatacttatctgaaaaatacagtaatgaaatctcaagcttgggacttacagataagcaactcaactctaatgtttatgttcgcgcaagcttgaatgataactttttatttttctcgaatctgaaacagtttatctctgtgttttacgaccttccaaatcttcagtcagtcaaagttgttaagtatgataattatataggtttcaaagtaaaacttgctggacgtcctgcaacagggtttgcactttatcaagaggataatgagtttttcttgaagggtgttataaatgaaaaaggacttattgcggctgagaatatagaagaggaggggctggtatttaactcatattattcagtcgcttttgttgtatttaataagaatggtgttaaatattaa

SEQ ID NO: 133828 - DNA, 375 bp, Enterobacter cloacae
atggcgaagcttacatccgaagtcactgataagatggttggtcagcgtatccagatgcgcagaaaagaacttggtatgactgcacagcaattagccgagtatgcggatatttcccagcaacaactttcacgttatgaaagaggagccaataaaattaatgtcgctcatcttgtaaatattgccataaaaatgaatactcctattggttggtttttcatcgattgctttgatgagaactcctctggtaataacgaacaaccagaatttgttccagtgaaagatgtagacctaaagaatagatttgaacaaatttggcctcgtttaacacatgaacaacgcagggttctaatcatgttcctagatgaatacaaataa

SEQ ID NO: 133829 - DNA, 1068 bp, Enterobacter cloacae
atgatcatcaataaacacaatatagatacatgctcatcattaccaattgggagtgatgttaatggtaatttattaaaaataaggatagataaacttacaatcgtaagttcatttattgaaaaagaagaaaagagtgaaacttataaaaaacttaaaaaaatgagaaaaaggaatcatagtaagtattatataacccatattcaaaataaagaagacatgccatacaggaccgcattattaataaaagaaaaaaatcatttctctccattgctactgcgaattgactattcaccaattaacagaaacactggaggaataaggttagatttctatccgcaatacctttcagctaaaaaaaatgatcaactattatcttggcttaatatgcaactaggagaaatattttatcatttgctgacaagagcatgggttactcggattgatattgccttagatctttacgaccgatatttagataactacatatgggagttgcaacggtcgggaaaacctagatattttaatgagggaaatggattaccaggcattcaattaggtagtaatcgctctgtattacatgtgctttgctatgaaaaaatagatgcatttaggaataaaaatgttagccataagaataaaaataaatttctcaaaattaagcgtaatgagcataagaacttcttacgtattgaggcgcgatatagacccaactctaagccaacaagcaaacatggtagcccgctaatgcttcgaaatatacttgagatggaaaatccatttaagcgtttacaattttattccaatgaattaaaaagtgaattattaataaaaaaacacattatttcaatcccctcagaaccaagtgtattcgcattgaaatgccgggttaagaaggaaaatagctgttctcgtattcctagaaatgttcaaagaatcatcaatgaacataaaatttcaatttttaacaaaaatataatttgggataattggccaatttatactaaacaactgggtggaatatttacaatagcctattcatataaagacagagataaaaatctctgttaa

SEQ ID NO: 133830 - DNA, 873 bp, Enterobacter cloacae
atggataatatttctatagcaattaggtttgattatagcgagcatcggaagaaccccgaggatgtactcgttatcctcagtaagtatgtaaagttttatagagatattggattcatagcgctagattctataaatgaaaaggattgcgctttatttgatttagtcagcctacaagacggttctgctatagcatggattagatgtaggttttctgaatggaatgattttatctttagttcagcagaagtacttgctaactatttagatcggaattctgaggtcacaacaatggaggatttagatgctgtctcaagtgttttatccgaatctattgtcaaaaattctgatcaaaaaattaaaatagagccatgtcttgacattgaacaacttggaaaagttctttctgaatactcagagctaagtctaaaactatattctgatgaaagcgcctctataggaaaaggtcaacctggagaagtgaaattagaaaattttaaaactcttaataaaaattttacttttaatgacaatgtaatagatatgttcaccagcgaagtaaaacatcataaaagaaaatcaaaattttatgttcatgtcccagttaacaaaggacatatggtttggcgtttagaagaattaactactgaaaatagatttacagcaaaagttgtgaatagtgattggttagataattatcaatctgggcttatagatccgattggaccgaaagatcttatggaagcagttatagaatatgatgaagttatatacaaagatcgcagaaaaaagaatattccaaaaataaagaatgcgaaagtgatcgagattataaatatagcaagaagcaaaggaaagcaagatgactttttctaa

SEQ ID NO: 133831 - DNA, 1701 bp, Enterobacter cloacae
atgagtgaagaatataaacaaaatcatagctttactcgacgtaaagccacgtcgaaaaatattgttaactcttcattatgggctgctgctggggactcgcttggttggatctctgaactcgtaaacggaagaatggggctggaaaggcgtatcggttcacagcgacttagtaagccagttgcatggagccggattgtaggcggtcgaggcggcccaaaagtcgctttgccagcaggaacatactccgatgatactcagctcagattagctgtatcccggtcaatcagaggcaatggtttttttgatgtagaaaattttgctaaaattgaacttactgtatggcctagttatgctttaggtggcggtgtagggactaaaactgctgcgcaaaatttagcgaaaagaacggtaaattggttcaataatttttactctactggtcgacagtcttatttttctagtggtggcaatggcgcagccatgcgtattcaaccgcatgtttggtcttcatgtggtaaccgttcggaagatgaaatacttctagatgtgcttaaggattcgttggttacacatgggcaccctcatggcttttgtggcgcaatattccatgcgaaagcattattagatattttattatatagaaaaataccagatgctcgggattggagaagatatattgaatcattctctactattcctcagttaataaatatggattctcagctatcctctttctggttggctgagtgggaaaggaacaatgaattatctctaatcaattcaatatataaatgtcaagaagaaatattgaatgatttagatagaattactgcggcttttcaaggaaataaagagaagacctataaaaatattctggaactcactggttgtctaacagatagatatcgtggttcaggagtaaagacagccttagtatcagcagccttagcttatatttatcagtccgataatatagaggatgctttaatatgtgctgccaatgaaattgatagtgacactgatactattgctagcatgtgtggagctttactgggagcttattcagagcatgagcttacatggcccttacaggatcgagattatttaatatctgaatctacacgacttgctaatattggtagagctagtaatcaaaatagttttgaatatcctaaaattcagagttggattcctccatataagcagaacgacgccgtagtaagagttgataatgattttgcccttgtggggttaggtatgttgactactattgatgagcgttattatgaagcaaataatgcttgttggcagtggtttgcattaccttttggtcaaacgattcttgcaaagcgaaagtctgatagaattagagaaatacataaaagtcagttgccagattttgcatttacgactaaaactattaatagtgaagtcagaaaagaaaatgatgttaataatgactctctttctaaaaccgacgttatagcaatgcagagggatctttttgaaaaagaagatgatccaagagattggcttgataaaattacagatgttgtaataaattcaaactttgatgatgcagtacttggtcgaatgttgaatgaatgcattaacaagacacaatcagttcagatggctgttagtttttccgcaatagtagcaaaggcaaaaattgtcagacagcgtaaaaataaagaataa

SEQ ID NO: 133832 - DNA, 672 bp, Enterobacter cloacae
atgaaaaaggaaatatacgaaaaaagaggtgttaatgaagtagtacatttcactactaataaaggactgctcggtacccttgcatgtggtttcctcttatctcgacaccgcttaccagaaaatgaacttctacaatatattatttttaataatgcagaggttcgacctgagcattccgaatattttgacaaacaagagaactggattgactttgttaacttatcactatctgaaattaatagaagatattttgatgtgtcaaaaaataaatggcatgaaggaaaggatattttctgggtaatattgtcatttgatccaataataatgacacatgagaacgtatattttgcaactactaataatgcctatctttattgtgaacgaaaaaaaggtgtagaaggatttgaaaatctgtttgctgacgaggttaaacgaaaagatggctactatggcatttggaaagcaaagaggttaggtcgtgggagtcacttagcaacttgtgagcaggccgagattttgtaccctgctggtgtaccggtggaacatctaaaacgtatctatgtaaggacagaagaagaatatgatattgtaggtgggtggctcgcagagtttcatgaccaatgcgttgaagtgtgcatttcaccagctaaatttgaggggataccaaattga

SEQ ID NO: 133833 - DNA, 1401 bp, Enterobacter cloacae
atgaaggtactgagtaacataagacctacccctgaacaactttcattggttggacagaatagagagggggtagaagttatttgtggagccgcaggtagtgggaaaaccacaactgcattattgaggctaaaatccttatgctacatgtttaatgtcaggcatcagagagaagggaataccgatcctgtaaaaatactagtattaactttcaataaaacactagctggatatataaaagagcttgttcatagtcaactacctaataccattaatgttgaattggaaataagcacctttagtaagtgggcatatcaaaatgttagaccaaaggaaaaaatagtaagttattcaagtggtcttctatattcttacgcccgggctatcgattccctatctcatgattatgttgtgaatgaagttgagtatcttcttggaagatttaaaccagagaatttatctgattatattacagccgagagaactgggagaggtattagcccgagagtagaaagaacagttcgacagagaattttagatgaggtagtgaccccatataaattaaagctacaacaaaacaatgccgttgactggaatgacgttgctatagcaatgcgagaggaagtggattccttgggttatgaaatcgtagttgttgatgaatgtcaggattttacagcgaatcaactacgagctattaaacatcatttaggtgaacatcatacggctacctttgtaactgatacagttcaacgaatttatgcaagagggtatacatggtcagaagctggttatgacgtaaggcctgaacggtctcatattctcagagcgaactatagaaacacaagagaaatagctgcgttcgcagcatcggttatctcaggaattaatgttgaggctgatggagcattaccaaatttaaatgaagcaaattcatccggaaacctacctaaagtgattgttggattttataacaatcaagtccaatatgctttggattacataaataaaactgtggatctgacatccgaaacagtagcttttttacatcctaaaggttggtttggctatctaaagccaaatttgatgaaaagtggaattccctttgttgatattacaagggctgattattggcctgatgatgaagaggttaacgttgctatttcaacattccattcagctaaagggcttgaatttgattatgtctttattcttggattaagtgacgagagcacggcgtatcctgaagagttgatcgatgatcaattacttgttttaaggcgattacttgctgtagctattgcgagagctaagaaagatgtaattataggttataaatcaggagaggaatcagatttaattagatttttttccccggggacattcactgaggtgatcttataa

SEQ ID NO: 133834 - DNA, 444 bp, Enterobacter cloacae
atggccaaactaacgtttaacgccatcctggtgatctgtaccggcaatatctgccgctctcccattggggaacggctgctgcgccggctgcttcccgctgcccgggtcgattcagcgggaacgtgtggcctggaagggcgcaccgccgattcacaggcgacagagatcgccgccgaacgcggcaccctgcttgagggccacgtggcgcgcaggctcacccccgccatggtgcgcgactacgatctgattctggcgatggagctggaacatatcgagcaggtcacggctatcgcaccggaggcgcgcggcaaaatgatgctctttggtcactggacgggcagaaaagagatcccggacccctaccgtaaaaaccgggacgcatttgaatatgtttatgggctgctggagcaggccagtctggaatgggcgaaacggctcagttaa

SEQ ID NO: 133835 - DNA, 1254 bp, Enterobacter cloacae
atgaataagcaatcattcagcgaaaaaaatttaaagaaaattttgcaaacaaggcacagaaaagctcgttcgttaaaatcaaaacccacaaagaactctctttctgtcctttcaaaatcaatcaccgataaatcattcactctagatgacttcaatcattataattcaaataataaaataatatatacaactgccatagttgatgatgacatagtattagctaaactaaattccaacattgctaaagcatataatctaaggcaaagtgatagacatagcattgtaaagcaagttatttctttattaaaggaagaaaccccgaaatatatatataagttcgacattagcgatttttatgaaagcataaacccaattgttcactgctcaaaaatattagaaaataattttttatccgctgaatcaaactttgtgttaacagagtacatcagggttctagaaaaaatgataattaatggaatgcccagaggcataggactaagttctacaatttcagaattagtcatgaattcttttgacaagcaaatgaaaagcaatcaaaaaatatatttttacacgcgctttgttgacgacatactaatattttcaacagaacgaataaatataaagaatgaaattataaaattcctgccagatggtctcaaacttaactggaagaagaacaaagtaattgcagtcacaccttgcagatgttatgtaaaatgcatctgctcaaaagcaaaatgtaattgctttgataaatgcaaatgtaaagcagttaacgcccagatacaaaactttgactttcttggttacaactttgagttccctgagctatctttcaataaatcaagcgaaaaattgaaagtaggattgtctaataaaaaaaccttaaaattaaaaaatagattatacaaaagcttcagagactaccataataatggcaattataatttactagaaaatagaatcaaattcttaacgggaaatcatttcatttccaatggaaaacataaatctgatagaatgaaatcaggtgtttattataattacatccatttaacatcattaaccagatatgaagagcttgatttatatttaaaaaaaatgatccatgctaaagtctccactaaaatatttctaaataacacgcataaaaaatcactaaataaatattcatttatttcaggatttaaatgtaaacttacagagatattcaacggaaaccaaataaacaaaataaaaggatgctggtaa

SEQ ID NO: 133836 - DNA, 1968 bp, Enterobacter cloacae
atggataaagtaatcataaaaaaacatgacacccttcgtacattgttaacagaaacactaccatatgaagtaccattaatcttttccaacataggtttctataagttcctcaaaaaaagggacaaggcttcctatttttttaaggaccttttggtagaaaacaaatcaccgatgattccattcaactactttattactaaaaatgaaaaatcaacaagaaaaatcagtattccacatcctatagtacaatatgagattggaaatttaatacattcaaatgcagagtatattacatatttatgttctaaatctaattttagcataagaaaacctacagcagttgcagcatattattatgagtcttcaccattcgattctcaatataattcagaactaaaggatgacgatgtcgctcagcaagacacaaatgaagatgaaaaatattcatcttcatatttctcttatgatggttacactctcctttataaatttttcaattcattaaaatttcaatctatagagaaaaaattctcatattctttgcgctttgatattgctaaatgttttagcagtatttatacacatagtataagctgggcaataaaaggaaaggttttctctaaagaaaacctttcttcaaattcttttgacagcaaatttgatcatttattgatgaggatgaatgataacgaaacaaatggaatattaattgggccggaattttccagagtttttgcagaaataattttacaagctatagatgtagctgttgagcgagatttagaagaaaaaggatatagaaataattttgattatgttgtaaagaggtatgtagatgattattttgtttttacaaaaaatgaaaatgttggcgatataatttatgattcatttatccatgaaatggctaaatttaagttatatattaatgagtctaaggaacagagagaaagaaggccattcattactaaacttactattgctaaaacgcatgtattaagtgagatcagcgatttttttaaatcaattaaacgggataaaaaccatttacctaaaaatgagtggcaaacaattccaagcattgtatttatctacaaaccgtatactcgatctaacactttaattacgaaattcaaatccattgtcaagcaaaatgatacaaattatgatgcctttagtgggttaatgatgtctgtgcttagatcaagattacaacgaataaataatgagatacagtatattacagatatagaaacctatagctctacgtatcgtaacttcatcatatttaatatagatttcttaagtttcttgttcgcaatgaatataaaatcaagaacaagtcatttaatgtcacaactaattgttattatcggagaaattaatgcaaaattagtaaaatcagatcaagatgaagtaataaaaaaacttaaagacgaaacgaggatattgatagacatcgctgttcaaaatggtaagcctagaatagaatttatcaactttatgatcgcagtacgttccatctttaaggatgccgttttggatgatgaatctatcaaacatttttataagatagataacaatatgacctctcatcttgattactttgaaacttgctcatgcttacatcttctttgtaacaaaaacaacaacaataatcttgttgaaagcatatatttttcatttcatgagaaaattaacaatacaaacaatccgcgaaatcactcagagatagcacatctacttttagatcttggaacctttccacatatccccattgacatttataaagacgcactgaaattatatttctataaaacttatggaatatatccaacagttcaagaagttaatgcaatatacaataagattcgcgaaagaaaattgtttttcattgactggaatgaatcaattaacattaaaaaattactacagaaaaaagaaatgcaaagagggtatgattcataa

SEQ ID NO: 133837 - DNA, 234 bp, Enterobacter cloacae
atgccgtatgaactgtctcacctgaataccttgtgggatgcactggggaaaacaacggtcagggatgaggacggtgatgttgtgaccgacgaacccttcctgcatttcccggcaggtactcctctcttccatatctggtcatggtttgaatccctgcacgacgggttcgtcgttgccgtgaaactgtacaacacatcccctcccgacgcgtcaacagacaggaaaagcaaatga

SEQ ID NO: 133838 - DNA, 570 bp, Enterobacter cloacae
atgaataccaccacttgtcctcccggcagtggggaaatatctcccactgtacagcgcaccatcagacgtgcactgaccttactggaacgccagttacgcgagcccggagttgcatttacctccagccaggcggtccgcgactggcttcgtctgcagctcgccacgctggagcgtgaggtattcatggcactcttcctggataaccagcatcgtcttattgctcatgaaacgctctttaccggcaccatcaaccatacacaggtacatccccgtgaagtgataaaggcagcactgaaatacaacgcggctgccattgtgctttcgcacaatcatccgtcaggttatgcggaacccggtcatgtcgaccggctgctcactgaccatctgaagcaggcatttccggcactgatgaaacagatggagctcatgctgaccagtagcgaactcacgccccacattcagcgctgcattacgctccacgcaaaagggctgatatgtgaggccgatacgctcggctcctgtggctatttgtacatcgtaatttatccgacatctgcaacaaccgcataa

SEQ ID NO: 133839 - DNA, 375 bp, Enterobacter cloacae
atgcaaaaacaatccctgtcccctcatagggcggcctcgtcacgtctgtcgtcagtcgaaatatggcgaaaattactgaagtatctgctggagcaacactacggtctgatgctgaacgacacaccgtttggcaacgacagtgtgatccagaagcacattgatgcgggcatctcactgtgtgacgcggtgaattttatcgtggaaaagtacgacctggtgcgtactgaccgtcacggcttcagcgtgaaagagcagtctccgttcatcggcagcattgatatgctccgcgcccggaaggctaccgggctgatgacccgcaagggctatcaaaccgttactgacatcacaggcggcagattcagcggagggaaataa

SEQ ID NO: 133840 - DNA, 135 bp, Enterobacter cloacae
atgacgttagccctgatcgttgacgccgacaccgtcagcgatcagcccctcaggtgccagtacaacgactggcgcttttatcagatctccatcagtttatacagatgttcgctcagacagcgggtatggcggtaa

SEQ ID NO: 133841 - DNA, 321 bp, Enterobacter cloacae
atgctgcgggaatgcctgtggatagccgtacattaccgggataacgaagcggtactcacccgacagttccggctgctgaccgtgttactgtatctgggcggttattttccgcaagggaataccgatggtatgctcccggagaaatgtttcattttactgaacgccccggaattaagctctctcctggcagacgatacggcccctgatgttctggtggcgttctgccgcaccctcttctactgcagacagatatctccgctaaggtgttaccgccatacccgctgtctgagcgaacatctgtataaactgatggagatctga

SEQ ID NO: 133842 - DNA, 990 bp, Enterobacter cloacae
atgaaaatcaacatcgatatcagcgtcatcattcctgccttcaatgcagctgacagcatcggagctctggtccatgcactgcttggcgaaacaacgctcagtgctgaaatcattgttgtgaatgacggttcaaccgacgaaacatggacggtactcagcgccattacagatgaacggcttattctcattcgtcaggaaaatcagggtgtgtatgcttcccgtaatgctgcactggcgattcaccgtggcgaatgggtggtgttcctggatgcggatgaccgggttgcggcagattttctgcaggaacggttgcgcacagcccgcgaagcgcaggccgatgtcgtccttttcaatgcccggcatacagacagcgccggacatctgcgacatcccgttcaccgcagacagccttacggtcagacgctgacgggtcagcagtggatacgccattgcgtcagtcagagggagtggccgcattacctgtggctgcagataatccgttcagcgtatatccgcgagcatgacctgcgattccaggaagggaaaagccacaaggacattctctggacgatacagcttgccgccgcagatggccggttttatttctctgacaggcaggattacctgtgggtgaataacccggcgtcaattacccaccgcccggattattacgatatccgcgcgttcagctatagcgacgtgattgcagatattctggcactcagtacacagacgcagtaccgggcagtcagacgagcactggtcaggcatgcactggtggaaagccgtcactttctgggcctgtaccggcgcagggtgaatgaccggcacgcggtccgggcgcgttttcgtgagcggataagctttcgccatctggtacccggcgtgagcaacatgagcgatgtctttttcctcctgaagctggtccgcaatatttatctgcctggtgtccgcaatactcccgcagccgtttcgcaggtgcggcgttaa

SEQ ID NO: 133843 - DNA, 750 bp, Enterobacter cloacae
atggagcattatcttgaattagttgaggctgtcgcattttcgcatccaaagagctacatggaggaaaatgaagatgccattttaccagcattaataacaaaaaacgcaatatttattgctcttgccgatggagtcggtggctctaatggcggtagtacagcttctaatatagcaatatctactgtaagaagagaaataatagacaaccctgactgcaatttaaaagatatttttaataaagtatctagtaacataaacattgaagccgaaaaacaaacaaataagaaagatatggcaacgacactggttatttgtaaaatcacttccggtaaggtggaaattgcaagtgccggtgactcaagagcttatcttattgaggggaaatcagcaaataaactaaccaccgatcatactaaaaagcaagagttaattgattctggtatttttaaaagctctgaattaaaggggcattactcgggaaatttactaactaactcattgagagcaaataaaaaatttaaagttgatattgaaacttacgaatcgaacagtggttcaattgttattgtgtcagatggtgtttacgaatacttcgatggtactaggatagttggtaatagtagtgaagacaacttactccaagtttgtagcaaacttaaaaaaagggtactaaaaaagggtcctcacgatgacttctctctggtagctgtgcgatttaaaagcggttgcaaggaaatcaaatcggattag

SEQ ID NO: 133844 - DNA, 732 bp, Enterobacter cloacae
gtggtagagcgagttcagttgcaagatggaagttttgtcgctcgaaaaacccttcaattaaaagacgatcaaaagcaaaatgacgatttaaaaaggcgtttcaaaagagaggttgagtatcaaagtagctttaaccacccaaatatagtgaatattttacaagcagacttaactggacatccaccttcatttatgatgccacttgcaacatgtcatctagggggggaaggcaacgcaggactaacttttaactatgatacaaaagtaaaagcgtttttaaacacgcttgctggcttagaggaattgcataacaaaggtcatgtacaccgagatattaagcctggaaatattctacgatttgattatcctgatggatcttatatatatgcggtatctgattttgggttaatttcaccatcagacagaagtagtactactaatattacttctacaggtagtgcttttggcaccgaactatatatgccaagagaatgctatgtgtatggttttagtgtggctaacgctcaatctgacatctactcattaggcgtattgcttctatttttatttagagaagacggtgaaactctcggatgcccctatgatgaaagaaaatctgcaggtgcatttggagacatcatatctaaatgtacaaaaagagaaccgaaagataggtatgactcaattgcacaacttaggactgcgtttaataatgtagcaagaggacggtaa

SEQ ID NO: 133845 - DNA, 588 bp, Enterobacter cloacae
atgctcagttacctattccggcgtttgtcgctttatttcggcagcgcactctgtttcttcattttatgccttgtgatgacgttcaccaaaagtgtgacgctcgttatggtcaatgattggttgagttctgtaccagaggctttgaggtggtgggaggggttggtacttctggttattactggcttcttcacttggtactttcgccagcgtgaccggattgcggccatcatattttccagtttaatactaatcgccttgatgacactattctttgtggttttaactgcagaacaaccggtaatcgttgggatttcgcttgcaggaagtgtgacaatcatggctttgatcgctaataaaaccctgggtttcactcgccgtgatgagcgttatcaactatttagcagacgtgctaaatttctggctactttttatagatcgcagcaagcaatgaattctgtctttacgcaggagaatttgcaggagttaaagcagtttaacgaagatctatggaggaccaagcaaagtgatactctgagcgattcattttacctcctgaagaagcttgaagataaacttagaaaagattga

SEQ ID NO: 133846 - DNA, 2751 bp, Enterobacter cloacae
gtgctgctaaggtcactttcagaacatgctgccggatgtttctacggcagtgaactgctagcctcacagctgtggatttttttgcagcaaaccgcaaacggggataagactcagcgtgtaaaggcgctacaggaaatctgctatcagcagttgattgaaagtgtggacagtcgccacccgcgccgttaccgcctaaacgatatcagccaactgatgaatcagctttgcgatggcgacctttttcatacgggaagactaccctggctaaccaagctttttgatcagttaatggtgcgcaacggcgatcttatctgctatcgcgaaacggaagttcaggcctatgccaggctgacggcagagttggacccgacgctgctagtggcttggaatctgagtcagtggctggaagagagcagtaatcccacggcaaaggatatacagcgaattgtggctgctcaggacaccttttttgcaccgcctggtaacccggtacagccctttgcggaagggcacgtgcatatcggaggcgtgaccgcagacagtgcaattcttgatgaatacctcttggcaaacccggcctcagagctacccgagaacaagcgttcaactccctggcatcttcagcagacttcgcaactcaataatctacttgaacgcttaagagcattattgtggctgctgctggatggcaaaagtgataatccgaccacctgcattgatcagcaaccgcagctggataattgcgacgcccgatcacatccgtggcaagaagagtgggtaaatctcgttccacagctctcaatgccgctacaaaaagccaggcttcccgactgggaaatgacgacaaaaatccatgccgtaaatgaagtgggttcccccggttggctgctcagtcagtttgccgtggcgatgaagtgcaacttacgcgggcgctggttgtggctgcaactctatctttgccgttgttaccgctctcctcaggctacaccacaggttcgggtcgccattctctgttggtatcaatcgctaaatgagtttcgtagacggctgattatggatggtcaggggttgacccggttctctaaacactattttaacggacctttgggcagggggagcaaggcattacgcaaagacaatataagacaattattatcagtggctggcgatgtggtggaaattaagtcacatccgggcactttctgtgccgactttgccgcagattttgccaccacgttggcgcaggagacgggtttcacacttccggacgcgccttatatctttggcgagcatgaaatcgtgccggatgcgaaagtgcataactatatgcagcagcttgagcgctggcagttttgcggccatttttctcgctcggcaatgccccaacaacgcggtagagcaccagtcgccaatatgaaagcactgtggaaatcagccatcgaattgatgaaaaaagtagacaacacaaccgcctggaaccggcccgaattcatgatgggctatcgtaatccgcattttcactttcagcccgcgcgctggtttcgcgggctggacgtggcgggcgatgaaaacgatctgcgcatcgaatggtttgccccagtgctacgctggctgcggcgggggttaatttcacgccctgagggtgagtatgcttcggctggtttccatttgagcatccacgccggggaggactattcccaccctctatctggcatgcgacatattgatgagacggtccgtttttgtgaaatgcgcgacggcgatcgtttggggcatgctttggcgctgggcattgaacctcagtggtggatggcgcgccagggggaaatgattctgccagcagacgaacatctggataatctcgtctggctgtggcattacgccgttacgctaagtggacgtttaccactggcgcaacaggtgcagtcccagttagcgcgtcggatagcccgcttctttcctgaatctggctggcaaaccgttcctgactttgctggcagccgtcactctgctccgctcaagcatgaaagcgtcaatcccgaaatcctttttcgcgcctggctactgcgcaaaaactgtcattttcgattgatgcagttgcatggcggtactcctctcagcacacttgaattcagcgccttacccgactttaccttcctgaaaagccctgatcctgcggcggtgctgtatgctaatcggcaccagcacctgtccgccgcaagcgctcagccgttggtcattgtgcgtctcggcgatgagcggcaagcgcaaagcgaccacttagctcagggcggaaaaagcacgatgggagatagcggaatgctggaggatatcgataccccggcagaggtggaatttatgcatgcagtgcaggattatctactggatcgatacgatcgaatgggcttgattattgaaaccaatcccacgtcaaacatctatatcgcccggctcgaaaagcaccgcgaacatcctatttttcgctggagcccgcctgatgagacattgctagcggcgggggaagtctataatcgttttggcttacgtcgcggcccaatgagggtgctaatcaatactgacgatcctggcgtgatgcctactacattacgtaccgaatttttattactccgtgaagccgccatcgactcgggtatcagtcgaacggtagctgagcgctggctggagcagatcagacagtatggcatcgagcaattccaccgaaatcatatgcctgtttttaccccacattaa

SEQ ID NO: 133847 - DNA, 2442 bp, Enterobacter cloacae
gtgctggttaacctgaaagagtatcttcagcaggatcataaagatttgttgcatgatatacacatacttaaaccggttgatcccacgctactggaagataacgaatcactttttctccatatcattgtcgccgcactcctgtctgataaggcaataaaattggcgcaaagccagtcgccagccaaaagccaggcgttaaataaaagtcttgaatcactcgcacatgcattagcttctgtcgaaacacagagcgctgattacggcatggataagctacgcgctatgttcggcaatcagcatctggccgactgtgtgcagcacttttttaaaactactctcgaactgctggataaaaagctgctggtattgccgattgatgatgtcgatacctctttaagtcgtgcttttgaaaaccttgaaattatccgccgctatctgacaaccccgtatgttttgccgattgtcagcggcgatcgcgatctttatcgtgaagtcacctggcgtgattttcacggacgtctgaccaaagattctcattatcgaccgcgcgaggcctatgacagagccgtagatctggctatagaatatcagcgcaagctgttgccgttgccgcgtcgtctggtgatgccggaagtgagcgaatacttgaaggaaaaatcagatagagcgatcaatctggaactgaaaggagagaaattaatctctctcaataatttctatatctggttacagatgtttatttccggtccggtgaatggcctcgaagacagccagctttccttgccaataccttcaattcgcgcgctgactcagctgataaaccactgtggctcattgattccagatttaccctctgcaattcgcaacgcgtctgatgaattacaggttaggcggctttggcagatgccggggataaatccacaagcatttgatactttttatcaagagtatcgccagcagagcatgtcatccaaacgtgactatgcacgtgcatatcagcgattttatgatgagcagcaacagtccataacaattgaagagtgcattctggacgcggaggaaattgatagatgggaacaggcacttctcgattacttccgttatgaaatcaaggccggagcggtatatctggtgctgctcgctagtcgctactggcagtcacttaaagacaaccgttcagatatggttgggcgatcagtgcttgacactccactgtttaaaccgttaattcacggtactggcgatcttaaccattttgcaaaaacatacgatttttctgaatggatcaatcgcctgcaggggcgcctaccggatagctggcttggcagtctgcaatctcatcaaacgatcctgccttatccagtggcggaagtgggggtcaataccgcaactgactggaaatattggctgcaggtgccggatgaggtaaaagagcaggacgtgggcgacaaaattatttttcttgtctctttatcgatgcagtacaacttctataccaacgccaaacagtcactgatgataaatatcggccgtatttttgaaatcgtcgttgccagcctttgcagcgatgtacgcctgattgatttacaaagaatcattcagaacgcgcccttcttctcagccagagcgttggcaccgactaaaaatgtcacggtgacagaagaggatactaggaacaaattcaatgacgaaactgagacgggcgatttctaccaactgcagggggatgtcgtggatatccaggagaaccaccttgcggagttagtgcttaacatttcgcagtggcgcgagcgtcacgatcttaacaatgtgcgcttttcaccatggctggtctataaggtcttcaacaaggtctttagtcaggcggcaaatacggtacattttcccaacggttccaaagatattggtaaagtgatcgaaagtatcggcaaagttttttattcaacgtggtcagcttttggcagtttcgaaaaggggcgcctgtttggcctgccggaagtggtggcaaccgtaaatttaaattctccctataactttgttagtaatgaccatttcaatgtcaatgtcgggcctttcgtagtcagagcagaacaggttgcgccagcaaaaagtaaatacgctgcgagtacgcggacggccagctattacttggccgatcatcctcttaaactttggatagaggaagcgctggcggtatttgctcccgcccccaaaaaacaaactccggacactgagattagcgatcctcgtatctggcttcgtgaaaaattgggtttggagaaggatacgcgtttaacggataagagaattgcagcttcattggaaaattttaataatgatgaacgggcgagtttgctgaatgagatgttcgctttttaccctgattatcatgtgaccaaccgccttcacgaaatcatcgaccagatgaagggggaaagatag

SEQ ID NO: 133848 - DNA, 294 bp, Enterobacter cloacae
atggatcgcctgtgcgaaacctacaacggcggatacaggaattattacacgctcagcaatggcggtgccttcatcgcacctgacagcgaggacaactggtccatattcaaaaaactgaatggaaacagctcagagatgagcagcgaagcagcgtgcatcagtgtctgcctgttgaactggagccaccatgtctgcagaactggcagccccgccatgagtgaacactactatgacctgcgcgaatttgcgctgagccatccagaaagcaacgccatcatgcacatcatcgactaa

SEQ ID NO: 133849 - DNA, 468 bp, Enterobacter cloacae
atggaaagtatcgcattacctcatccactcacttcacaccgcaccataaaacgcaccctgacgcttatcgaaaatcacctgcgcgaaccgggcgtggcgtttacctcagcagtactcacccgcgactggctgagattgaacctcgcaggactggagcgggaagtgtttatggtggtgtttctggataatcagaatcggctgctggcgcacgaaacgctttgtcacggctccatcaccagtacggaaattcatccacgtgaggtggttaaggctgcattgcggcacaacgcagccgcagcaatatttgcccacaatcatccctccggatatgccgagcctagtgacgccgaccggcgtatcaccgaacggctgaaaaaagcgctggcgctgatcgaggtgcgcgtactggaccatctaattgtcggcagcaaagagattgtttcgttcgccgaacgcggctggtcatga

SEQ ID NO: 133850 - DNA, 162 bp, Enterobacter cloacae
atgcattctgaacaatggggactgacgtgtaataaaacgccgtgttttggtgtgaggctggtgcaggaagttaaccggctgcatttcttggctgatcgagcggggtttactggtgacttcagcgacgatgaagcacttcgccttgaccaggctttccactga

SEQ ID NO: 133851 - DNA, 381 bp, Enterobacter cloacae
atgcaaactttaccgttaaccgagccacgggcggatgagccctgcccttcgcccgtgcaggtctggcagttactgctcacacatctgctgaataaacactatggcctcacgctcaacgacacaccgtttggcgacgacagcgtgattcaggcgcatatcaatgccggtatctccctttgtgatgctatcaatttcattgtggaaaggtatgaactggttcgcagagaccacagccgtttaagcctcaccgaacgctcttcactgattggggccatcgacattctgcgtgcccgtcgtgcaaccggtctaatagtcagtagcgtctacagcaccataacccgcatcacaacagaccgatataagggaggagaagcacagtga

SEQ ID NO: 133852 - DNA, 210 bp, Enterobacter cloacae
gtgaaaatagatctgaacatcaactctgacagcatcagcgtgctggcattcaacatggggaaaatcgcggtcgatgttgacggtatcgagatcgctgagctgataactgccgttaatgctcaagggtttacgctgcgtatcgcggaggaacctggcgaggtgattgtcgaaaccagctctcaccttctcctaagttgccctgtaagatga

SEQ ID NO: 133853 - DNA, 1311 bp, Enterobacter cloacae
atgaagcgcctgataccgccagacgactgcccggaggaaattgcccaccgtctcgacgtcatacagcagcaccgggcgctcaacgcgatcctcggggttaaccctgacgctatgtctcaggcggaacagcatcagcagcagcgtcgacgtggagaaccgatcggccccctgcacggcgtgccgctgatcgtcaaagataatattgcctgcgcgccgatgcccattactcttggctgccgggcgctggcctcacttaacgcgacagcggatgcacgggtggtgcagcgattgcgcagcgcgggggcgattattctcgccagggccaatatgtccgagttcgcgttcgatgtgcgctcgcgaagctcgctggggggcgatgtggcgaatccactttgcccgacactcaccgccggaggttccagcggaggatgcgctgcggccgtggcggcgggaatggcggatggcgcattgggtaccgataccggcggctctatccgcattccctgtagctataccgggctggtggggctacggcctgcctttcgccgttcacagctggacggtgtagcgccgctctcgcccagcaaagataccgttgggccaatggtacatagcgttgaagatgccgccttgctgcatgcggtgatccatggcctgccgccggttgcgcttcctgtgcgttcgctgaaaggcgttcgctttggtgtggtaaccgcgttacagggagaggatgaggtacagctggaggtctggcagtcggcgctgcacacgttgcgccgtgccggagcgacgctggtggaggtttcactccctttccttgaagaggtgaggcaggccacctgcctcagtctgtatgaatttcgcgtggcgattgacgactggcttagcaaacagcctggcgctccctccggactgacaagcattgtggactccggcgctttcctgccggagtttgcgccgtttctacgtcagatgctggcgagtaacacgctgaaaaccccgctctggctggcggggcgtcgctttcagcgcctgttgcggcagaacctttgccaggtggctgaggcgcaacgcatcgtcggatttgtgtatcccaccgtacaacggttaccagaaagtatggcgaagatgccgccaggctgcgcgccagaactggccgctatcagcggcctgcctgccattacgttgccctgtggcgtaagccgtatcgggctgccggtagggatggagatgttatcggtgcaggaggatgaggcggcactgatggtgctggcgctggcgtgtgagggggcgctgggcgagaagggatag

SEQ ID NO: 133854 - DNA, 306 bp, Enterobacter cloacae
atgagcaatttgacctcattcgactggtggctggcaacctaccttgtggcggccggattcggatatgccttttacattggtcagttaatcgtaaagctactgctgatcagattcgccagccataaacgcatagacgacggtctgtggcgcctgggttctctgctggagactcactacggcgaactcaaggagaacgaaactatcactattcaagcgaagcgttttacggccatcatcacgagaacgccggaacagaaggtgagtttgatcaaaaagatagcaactgaacgagctacagaaaaataa

SEQ ID NO: 133855 - DNA, 153 bp, Enterobacter cloacae
atgattccatacatcctattatcttttgctgggggcgtggccctcggcttcagtatctgtcgcgatctggtcaggcaggaactgaaaaccaaaacgcttcgcatcggtaagcgtctgtatcgggttgttcacgagacgggagtgcagaaatga

SEQ ID NO: 133856 - DNA, 213 bp, Enterobacter cloacae
atgatcatgttaagtaaacgggagaaagaaactctgcgtgaaataagccagtggaaggagttctatgccaactggaagccaaagacccgcgccaaactggaacgtatgaatcttgtcgctaacgtttcgccaaagggatgtgtggagaactatcaactcactgaaaaaggacactcactgttgcagcaattgactgaggcgggggcgttctga

SEQ ID NO: 133857 - DNA, 177 bp, Enterobacter cloacae
atgctcggctggatgattgtatttttggtcgtcggcattgttattggcagtctggttacgtccagctgcatcaacgattacgtaaaagctggtgtcatgcagagacgtggccgcatttaccgcattgtagatatcacgtacacactgaaggagattaaggatgatcatgttaagtaa

SEQ ID NO: 133858 - DNA, 1323 bp, Enterobacter cloacae
atggaaaaactgatcgccctaaagcacaagctggatgccataaaaacgatgggaaccaacgccaagaaagaggcgctggccaaccttgatgaatttgagcagagcatggtctcgctaatgctcaacccattcattcgattcggtgtgaagaagtacaaagtggccgagccactcgatacttccgtacccagcgaccagaaggtagtcgagctgctggagaagctggcggcgcgcgaactgaccgggaacgcggccattactgctgtcgaatcactcgttgcctcaatgtgcgctgacgggcaggacgtgtttcgtcgcttcctgctgaaagatccgaaagccggtgtcggtatcagcctgtgcaacaaggtgttcgaaaacccaattccgaattttgaggtacagctggcgtctccgtacaaggagaaaggcgacaaatacccatttaaaccaaatcccaaggccaagtggccaatgatcggcagcctcaaactcgatggtctccgggttatctgcgaagttatcgttgacgaggaagaggtgaacttcctgacgcgtaccggcaatccgattacgtcactcgatcaccttaaaccagccatgctggagcgaggcagactctccggtttcaagcacatctttttcgatggtgagggtactgcaggtacgttcaaccagtccgtgtcggcgcttcgcaagaagaacgtgaaagccattggtgccgtttaccacatcttcgatttctttttaccggagtggcgtgctcaggcaaaaagcaaagagtacctgaagaccggcatgaagctgaaagagcgcctggctatgctggtggcgttgttccgcaacacttgcggggaagattacgcgcaagatgtccacctgcatccgttctacatcatccatagtcatgaagacttcatcgaacgctttatgaagcgcctggacgagaacgaagagggggagatgggcaaagatccggattctgtttacgagttcaaacgcacccgcagctggtggaagctgaaagacgaggattccgaagacggtgaaatcatcgacttcgagccaggcgacccggactctggctttgcgcatacgctgggcaagatagtgattcgtctggagaacggcgtcatcgttcgtgccagcggtatcaagcataagtacctggacgagatctggaataatcaggagaagtatcgtggacgcatcgttgaggttcactgccatgagaaaacgccagacggtagcttacgccacccacgtctgaagtggccgaaatgtctgcgagacaccgaagaccgtattggagataaagactga

SEQ ID NO: 133859 - DNA, 477 bp, Enterobacter cloacae
atgtccacaagaacagatttgtcgaaaatcccgtctatctccggaaacaacggttattcgctgcgctgcccggaagtgaagatcaacggccatgaggcccattgcagctatacagtctgccagcacaccatcctcgcctacaaagagaagcgtctcccggctacatctttccagtcctgcgctgcggccattgctgctggcaaatgccaggcgctgaagatgatggtcgaagagatccgcaaaggtgaacagctctacttcatcgatatgactgcgcttatcaaagaagtggaagagcaaaacgaccacgccagaacacttacccgtaagcgcaacaccatgacgattaacagtctggttaaacgcacgaagaaaacagaaccagccaaacccgaaaccacgtccaccgattcactggcgcccgtcactgatgtgtacgcggcactcattgaagaagcaaccaaagaaaacacatga

SEQ ID NO: 133860 - DNA, 795 bp, Enterobacter cloacae
atgaaagcagatattcagaagtccgttaccgaaatcatcgacaaatcaggcgtagaaattgatacagaagagcgccagaagattatcgatgaggcgatccagactgcgctggaacacatcgccacgtctgtgagcaccgcacctcttggggaaggctcgaaatacatgcgggtctgggttcgttttggggagtccccggagctgcctggtgttaagcagaaacgcgcggcactcgtggcgttcactcgcaagatgaaggacgcaacggtcgaagtacgcgccggtgcgtggtacgacggccgcgttgtctacaccaatcaggcggtgtgcgatgaaggtgaacgatttgaggaaattgtcgacgcaactcttcgcgcgatcaaagccagggctggtgtagaggatgatccttctatcgcggcgttcctgagcattgtcgaactgcctgaagttaccgaacgcgttacagatctgacaacaccacctggtttgctggagttggtggtcagtggcgataccaaaaaagccgttgagcgcattcgtgaggtggaatacggcatcatctgcgatatgtgccgcagcgacttagacctggtgcgcatcattgtcgacgcgggtcaggcatgtgacggtgtgctcgccagttttgcagggcaggtggcacgcctggccaacgagctgccgatgattaaacaggaggcaaaatcttacgccgtccaccatgccaacgatttactggagccataccggttcgaagccgctcaggacaaaatgactggctgggcgacctggtaa

SEQ ID NO: 133861 - DNA, 432 bp, Enterobacter cloacae
atggacttaaaaatgtataaaaagactatgatttcggttgccaccatagcggcgacattgttgctttctgggtgcaagccgagtgacgaaaaagccattgagcttgggcaaagagaaattgccgacgcaatgaaagatcccacatcggtaatgttccgtaacgacaagtttgttggtcgcaaagacctggatgacggcaaagttgttggatatgtatgcggcgaagttaatgccaaaaatgcttacggtgcgtatgttggctttgcttcctatgtggtggagcttgagatgaccccgaaaggcacattctccaaaggcgttgagtacaaggttccgtggatggagatcgcccctaacggtggccatgaattgcataatttcaaacagatttatcgccagttctgtaaatcagaagccacctctgcaagttaa

SEQ ID NO: 133862 - DNA, 1116 bp, Enterobacter cloacae
gtgagcgacttgaaagaattactgaccgagctggattttgagcaatggctcgatatggaaggaatcatctaccgtcgtggtggcgtcagtactcgtggacgtgaggtgaatatcaaggagtgcccggtatgtggcagctcaaactggaaggtttatttcaatctgaccaatggcgtcggcaaatgctttgctggtgatcatcccgaagagattcagttcaacaagctggtcttcctcaagcactacagcggcaaatcccgtcgcgattttgaagagtacgtccagaacgcgctgatctcacaaggatgggcgccgaagaaggaagaggtcgtgctggccagcaaggttgaactcgaagggccagtagctctcccgcgacattatgaactccccattgacggtcgtcttcctgattatctggtggagcgccagatttcacctgagctggccaaatactttgatctgcgttactgcgttgaaggcaagcacgcatacgtcgacccgtacacagaccaggtcaaaggacaagtgttcgacatgcgcatcctgataccagtttacgatctggatggcgtgatgaagaccttccaggggcgtgacattaccggggctgcagaacgccgttatctcttccccatgcagctgccggcgtcgggtaagtttctctacaacggccacaacgcagtcggaaaacaaacggtcgttgtgtgtgaaggggcatttgacgtaatgggcgtgaagcgtgccatcttcgacgaagagacgctgcgggattacgtggagccaattggcacgttcgggatgcacttgtccggaaatatgaatgaggacgctgaagatcagttgggcgcgttcctgacgctcaaggcgcgtggattacgcaacatcatcatgatgtgggatagcgagaaacaagcgatccgcaacactatgtcggcggccaaacgtctcaccagcatcggactgaatgtcaaagtggcctgtctgggcgaagaaggtctcgaccccggcgacgcgacgccagagcagatcctcaaagcctattatcgtgccaagccgtactccagacagttggagctacaaagcaaggttctagggataaaggcattgttataa

SEQ ID NO: 133863 - DNA, 1341 bp, Enterobacter cloacae
atgaccgaactttgccacacaggacgagggttgtctgaagagttcgacgacgacttccagaatcgactcgcagcctacttctgtcgcgaccatgaatttctgactcgcgcgggtgatctggttgcgccaaaccagttctccaatgcggccaacgccattctggtgaacatggtgtcgggctactacagaatgtataagagcgcaccatcatcgtcggccatcctcgacatgctcaaacgcgccaaacgcgataagacgatccgcgaagagcttttccccgacgttgttgaggcgtttaagaggattctcgctgagaagctgtcagatacggcgtacatggtcgaccaggtcgccacgtttgccaaaagcgtagcgttcgacgacgcgctgattaaagcggctgagatgaaagagaagggcgatttccagggcgcgatggcaatcatggctaaagtccagcaaatcggctctaacgaagcgaccggcatttacgattacttctctgaatcagcagagcgttacaaggcgcgtgagtacgaagcgtccgacgattacgtgccaaacagcatcacaacgggtctaccgctgctcgacaagctgctttaccagaaaggctgggcaaagcgtgagatggtgctgttcatgggcttcgcgaagtctggtaagtcgacggcgatgggtgagttctccatcaacgctacgcttgccggttacaacgtcctgtatctgtcgctggaagttcacacctccattctgtcagatcgctttgacgcccgtttgtctgagaccgaaatgtccaagctggtggagcgccgcgacgacgtccatcgcaaactggcagaactgggcgcgacgaaaggcgtggggagcttgtggattgttgagcgaccgtccggaagcatgtcgcctgcagatctggatcgcatgttgggcagcatgaaagccaatggcatgatccccgacatggtcgtggtcgactacgccgacctgatgcgtgccagctacgacctccgcgacgaccgcgccaacattcgcagcatctacactgacctgcgtgcgctgtacgacaaacacaacgttgccggtatcacagcatcgcagactaacagggaaggtggcgcttctgaggtggccacaatgatgcacgcagcggacaacatcgagaaggtgcgtatcgctgacctcgttatcacgatcaacaaaacggaagaggaagaagcgaaaggcgaagcgcgtctgtacttcgctggttcacgtaaccagaaaggtggcgtaagcatccgcgttaagcagaacctcgaacaaatgcgattcatcgaacgaattatggacgtcctctaa

SEQ ID NO: 133864 - DNA, 726 bp, Enterobacter cloacae
atgagccagatcttctttaacactattaacaacgaccagtacgacttcatgaccgagtgggacaccacagtcatggacaagtgggtggccgagaatattgggctgtcacgctgcaaggatgaggctgagttgttcgagacaaagtggtttgattaccgcgacatgcacccgcttatggccacatgcctcttcactgagacgtacaagcgccagtactcatacatcatgctgtcgcatggccgtgaacactatgagacggcccaatttactaccggtttgaaacgtgtgccgtatcaggagctgtcgacggccaacaaaacgtctctctggaaagcacgccagtttgccgaccagtactgctgctcttatgactacttcatttctaccgttctttccgcagctgcacgccgtctgtgggacaaattgccgcgcccccagcatctctggcagcccgagctgatcgagatattcgaagagaagttagccaaacgcgctgtaacccgtctggatgactctctggtgagttttaagcatctgggagacatgcaacacgacccgattcaagaacgctattttgagtgggttctggagcgtctgcgtggcattacccgagacaaacgcgtccgcatcatcttctccgctgtctggttgatggaaatcgtgcctgagcgtgtgatttacgcgcacttcccggaagaactggaagaagcacggcgattctgttga

SEQ ID NO: 133865 - DNA, 759 bp, Enterobacter cloacae
gtgctgtacaaatacgtagggcatgaagacccaaacgaattaatcaaaattcttaaattcttcatcgaagatggaaccatccgagccacccggccacacgacttcaatgaccctgccgagttcaaagccaaatttagttttgacgccacgatcccggagaagcgtttccgatatcatgagatgtggcctggcaaaagcgacgaggacggtgagaactggttaagagggcgaaccaaaaacgccgaagagtttgacgcctatatgctgcgcggaaatctgcttttgaataccggtgtgatatgcctcaccagaactgacactaattacctgatgtggtcgcattacgccagctcccactctggattttgcatagggtttgatgacgctattgtggaagcgctggatgaccgacacacagcgttaaacggtgatgtggagtacgtggaatccccgcctgaagtgaacttctataccgctgatgtgtacgacattgtcagagccatctttctgcacaagggtgagagctggaagtacgaagaagagttccggattatctctgagctgccagggattaagaagttcgacacctcgctcatcaaagagatttctatcggatgcaaaccctatccagagctggaaagttttgctcgtgaactgctggacagcaatctggccgtgtacaaaatgctttgccctactgactcgtaccaactgaaacgtgtggcgctggacaagaaccttacttttcaaggttactag

SEQ ID NO: 133866 - DNA, 360 bp, Enterobacter cloacae
atgtccatgagaatgggagaccttgcaaagcgcaaagagccggaagagcagccaaaaagcagcaccccaatgcgccagccagtcagaccgcaggggcgtccgactcgtgggaaagagaagattaagagccgcacaatgtcgctggaagacgagtacttcgatctgctggagatgatgaagttcatccctcgtttcgagaagttcacccgttctgacgtgattcgtgcagccattttccatctggcagagaagtcgccgcaggaaatcgaggacatcgtgaagctgaacgaggcgatcaccgctgccgacgtcacgatgcgcaccgatgaaatcaagcgtgagctgatgaagaaaggttaa

SEQ ID NO: 133867 - DNA, 750 bp, Enterobacter cloacae
atggcaccttctttaattgatgaacgctacaacaagcagttgaacaaaatgccgctctctatgggcggctatactattttagagacctttcatttcgcgacaccagacggcgatgttgttcgtctggtggagatgcgtgccgataaaggcgagttcgacaactttctcgttgtgtatcttttgccctcctataactcagattatcaatttgacgaaatcacgcgggttatggatgacgaggggatgagtgcgtttgaggctgccgaacacatcatcaaaattgagatcgtggatgcgactcttagcccagaagagctgaaggttgtgggtcggtttgcctataacgattttccgtttattggcatcgatgggaatgaatacctcggtaagcaaatcaaaggcgcttatctcgaaccgccttttgactcagcccgcataggctctacagcatatcgcttcatactggacaaataccgccacctcgtttgcgacaatttgcaaaccattctgggtgcgtccatgtggtcaggtactatgcggagatatggcgaggttatgatctacgataccgtgaaaaaatgttgccttgaccagctcggagataaagcaaagggttctgccaccggcttcctgccgtgggatattggcagtttgcctttaagtcgcgtaacagaagagtggggagaccgcgagctgcggcttgacaaaggctcttgtacgcacatcgtcaacatcatctctctcccataa

SEQ ID NO: 133868 - DNA, 423 bp, Enterobacter cloacae
atgctcaactatcatgacaaaacacgtactatgcaaacgatccgcacgaacactgcggtagtcgatagcttccctatgcgttttcacaacagtgaagactcagtggaagtgcgccgcatgttatgtcgcgaaacagctgaccgccagcacttcattgtcacattcaaaagcgatgttactcgcgcagagaacatctccaacagcacctcaactgtaactccgttggcagaggtcgttgtgcgcaataacaaattgcgttttgttctcaagccgcaagaacagtaccccgaaattgttgatgttaaagaatccattgttccaaaaattgagaaagccgttgtacaattcatgaagaataagttcaacgacctcaaggaaagcgttttaccagaacgcaaaaaagaacaatggcaccttctttaa

SEQ ID NO: 133869 - DNA, 243 bp, Enterobacter cloacae
atgagacatttaatgaagtgcggcggaaaggcgcttctgctgttcatcgtgagctgcatggtaagtgggtgcgtgattaagacacagacttccggcgtgctcttctgcgatacagccaaccctatctatgtgagtaatgaggatttaatgaccgaagagacagagcggcagatcttgactcacaatatggtgggcgagcgtttgtgccaatggagcggcaaaaaagcagacgaaagcgtgtaa

SEQ ID NO: 133870 - DNA, 693 bp, Enterobacter cloacae; identical to SEQ ID NO: 112265

SEQ ID NO: 133871 - DNA, 324 bp, Enterobacter cloacae; identical to SEQ ID NO: 112266

SEQ ID NO: 133872 - DNA, 234 bp, Enterobacter cloacae
atgaaaaagatgatattaattttaggtatggctttaactttgactgcgtgccagaaactaccagagccggtttgctatgggcgagcaatgataggcggcgttgacactggtgtgccaatctatgcgattaagaaagaagggcattacacattataccgtgcaggtagtgtctttaactggcgttgggtcggctctggtgctttcacctcactaagctcatgcccaaaaatttaa

SEQ ID NO: 133873 - DNA, 609 bp, Enterobacter cloacae
atgtacggaactaaaattgttcgctctgatggcaagatttggatgtctcctagtcttacccctatggtctttcaaagtaagcatgtggtgtcacttaaaggggggagtgagttcaatacggggctttccccagatcgctctcctattgtctttgtggcgtactcgaaggcagtttcgctactggcaagccgattagttcgcaataaccaggttatttacagcttcggcggggtaggcagcgactccagtgtaacggtgtatgtgttcgcaactggcatttcaaaaaaagagaagtgggggatgagtttctttaattcatcgggagtggagatctataacacggcaaatattccattgtcatttacgtttcttgataataagagctggaacagcggagataaacacaactttgattatccagtagctattgtgcctacatatgctaacgcattcgccataccgatgccgggtggtgcgaagaccctagtatacggttacacatgttatgggaacaccgtgagttcaattctcgttaatgaaattaacggtggggctacattagctatcaataaccgagttccagttttgaacagaaacctctacggataa

SEQ ID NO: 133874 - DNA, 255 bp, Enterobacter cloacae
atgagttacggagccaaaatatggtcggcttcaaagcaagagatggttgacgcattagcgcctatttattacctggattattttttgccttctggcagcggaagcaggagttacaacattgagtcaggtatgtctattgattattacatgatggaaacaatcaatggctatttgggaagtgtgtcggtatccggtaacacaattaactggacggacgctcgcggtacagtttatttattggtatttcagaaataa

SEQ ID NO: 133875 - DNA, 555 bp, Enterobacter cloacae
atggcgattggctccggatgggtcgggtcgtcagccgtatcaacgacgagccagcggtggatgtctgccgctggctcggcggtaaaggttggcacaccgttttatatgagttcgttaatcggtaaagccatgcaggacttcacaatggttgttggcaacagcacttacggcatcatggtgcaggccacaaacactcagtgggtaacgggtacagtttattatggtgggtactctaacaactccacaacgacgggggctgcattagcgatctccggaacgagtgcgaggattccgtcaattaatgcgacggggtctgttagtggaacgcttttggggtgtgcgattacacacatctctcagggcaaggataccgcttatatctacatcgggttaacgaacggcccaaaccaaagtttcacgctgtcattaggaggaacgaatttctcctttgccgcgcattcatttgcgaacaacaccagacattaccgcgcttcagcaagttcaaactggctttataacaagaagggccaaactctcgcaggagtaaaagtctaa

SEQ ID NO: 133876 - DNA, 4245 bp, Enterobacter cloacae
atgtggtacagggaaggtactatcacatttacacagggaagtgacacgcttgagggcactggcacgttttggaacgtcactgccaatggcgtgttgccgggcatgattgtcatcggccccgataacaagctgtacgaaattaagcgtgtgctaaatgacacccgcctgacacttatggagcagtactcgggtgagacccagaatgatgtcccatgccgcatcatcactacctatgaaggcgatctgacacagttcagtgctcgcttcacggcattgatgactcgaatgtcagccgactcgaagacaatgcgaagctggttaactgccattgatgaagtgacgctcgaacgcgaggacggcactgaggtgacagtcaaatcgctcacccaaatcgtcaatgagcacaatgccaaccagcaatggtacagggacaatacggatgcaatcgatgccgcgggtgacaaagctaaacaggcagccgccagcgcagcagcagctgccaatagcgcaagcactgccggaacaaaggcgactgaggccagtaaaagtgctgccgcagctgctgcatccgaaagcgttgccagcgaagccgctaagggtgcaaagacctccgaaacgaatgcagaaagctataaagagactgctgtagcttcagctgccaccgcaacggagaaagccgccgaagcaggggcatctgcttcgagtgccgcagcgtccaaaaatgccgcgaaagcctcacaaactaacgctgctggcagcgctgtctctgctgcggattctgcgaccgcagcatctaattccgccgcggctgctgaagtttctgagagcaatgccgccgcatcggaaaacgcagcagcgggtagtgcagctgccgcacttgcatctcagaacgcagccaaaacatctgaaacaaacgcggcgcagagcgccgacgggtcggccgccagcgctgccgcggctaaagtgtctgaaaccaacgctgccgcctcggaaacagccgccgccgcgagtaaagtggctgccggtttaagcgctgacgcggcggcggggagcgccactacagctggcgaatatgctgatgcggcagaggccagcaaagatgcagccgcatcaagtgctggcgaagcgaagaagtctgaggcaagcgcagccgcatctgcgaccaccgcaactgacgcgctggcaggtattgaagcaaaggcaacagaagccgctgagtcggccacactcgcgacagcaaaagcgtccgaggcctcgacttcggcagctgaggccaaagcatcccagacgaaagcgaaagcatctgaggacaaggcatacgaatatgcgcagaatgcgcagtccagtatcgccagcgtgaaatggaaaggtacgtccgccgaactggacttgacctctgatacgcccaagtgggtaaaagtctcgcgtgcgcgtatgccgcaagcgaccagcactgtctacatcgaagtgatcggtggcgctggctatgatgccgatagcccaggccaggctgcgatggctgacattgttcttcgcacagcggggggcgatcccaaaggtctcaatgctgttgcctatttaacgcaggactccgctgtaaatagcgtggccaccgttaataccgacgaagaaaattacgacatctaccttcgcgtgggcgcgggcgctcaaaagttaattgtgaacctgcaattctccggcgccgcggttgaatcgctggaagtgatcgaatcggttgactcgttgcctgaaggcgccgtagagggaatggtttatcatcgagtactttcagacattcatggtgctattacaggctcactggtaggcaatgcaagtaccgcgacggttttagagactgcacgtaagatcggcggtgtgctgttcgatggcagtcaggatattgagctgccgggcgtgaatgcgcagggtaatcagaacaccactggtaatgccgcaaccgcaacaaagctacagaccgcacgcagaatcggtggcgttagttttgatggctctgctgatattgatttacctggcgttaatgctgccggtaatcaaaacacctctggcaacgcagctacggcaaccaaattgcaaacagcgcgtaagattggcggagtgtcgtttgacggttctgccgacatcaacttacctggtgttaacgcggccggcaatcagagcactacaggcaatgccggtactgcgaccaaacttcaaacgccgagaacgattaacagcgtttcctttgacggttcggcaaacatctcgatcccgacgcttgtttctcgtgggcgagtggaggctttggccaccaatactcaaggtgcgatagctggcctccagatgtatgaagcctacaacaacagctacccgacgacctatggcaacgtcattcaccttaaaggcgcatcagcttctggtgagggagagttcctgattggctggagtggaacaagtggcgctcatgcgccggtatacgtgcgttcacgacgcgatactacggatgctaactggtctggatgggcgcaggtctacactaccgcccacaaaccaacggcacgagatgtgggggcgatggcatcgaccacactgtcgttcaatggtggtgctgctggttggttcaaaattgcgaccgtaaccatgccgcagagcaccagtgtggttttcattcgtctgctgggcggggctggttacaacacgggtagttgggatcaggcaactatcagtgaccttgttttacgtgcaggcaacaactctccgaaaggcatcacagctgtcgtgtggcgtcgttctggtcaggggattaacggcgcagcgtggattaatacgtcgggcgattcctatgatatctacgttaatttgccgaactacggaaccacgctgaacgtccagtgggactacaccagcaacgcaggtgtgaccatccatagttctccggcattttcggctgcccagccttcaggaagtactgctggtacggtttatacgatatacagcaacctgctgaaaccaaccgccgcagatgttggagcattgccgctatctggcggaacaatgacgggagtgttgacgctgcaaaatgtgagtcagcctctcaagacgccaggtggcggcattctggcaaatgatggaaatttatacatcaataagtcgggatttgcaggctggattgatgcactgtttttgaagaacagcggcggcaccctgactggtaacctgcgtttgtctgctgacaatgcctccattgtctgtggtaacaatggggatattggcttcatcaaaaaacagggttatccaggcgcgatcgtgactggttcgacaactaagttcatgattatgcgtagtaacgcggccacgaatatttcggctgcaaatacgctcaccgaagtgatggccatccagccaaccacaaatcgcgctgacttcgtaggtgaggtggtttcgcattcggcaaatgcgttacgcgcggcttatgggaactacggcttcttcattcgcaacgatggtggcacaacctacttcctcttaacggcctccggcgacaagtacggaagctggaatgctttgcgtccaatgtacatcaacaacgcttcaggcgaagttacgatggggaacgggttgtcgcttgccggtggcttaaatgtcacgagcggaaatgtcagaatcccgacgtcgagcacatcgtggatcgacatgaggactaacgcagcgctttcaaacagttctgctgtagcaacgtcctcagcatcagcaattgttcgtcaagagcacgccgatcgttactttatggtcggtgggttggggaactcgcagttcgggttctacatgattaacaagtcgcgtactgctaacggaacggatgcacaggcttttctgcagagcgatggcgtgtggtattgcgggggcaatggtagttttaacgacgtttatattcgctctgaccgacgcagcaaacgccagatccgcaagattgagcgggcgcttgataaagtggagcagattgaaggcgttctttatgaaattcaggtctatgaccgttacgaacagtctggtgggcttatcgcgcaggacgttcagaaggttcagcctgagttggtgacggtcgataaaaatgaccagtctggcgaagaccgtttacgtctgaactacaacggcattattggcatgttggtcgaagcggtcaaagagctgcggcaggaggtgcgcgagcttcgcgaggaagtggctgttttaaaagggggtaactaa

SEQ ID NO: 133877 - DNA, 4278 bp, Enterobacter cloacae
atggaacagttcaagaagaaaaggttgcctctcctgatcgcaggtgcaggcggcaagaaaagcagcagctccagccgcacgccggttgaagccgatgataccgttaactcgcgtgctatggcgtctatcctcgacttgctcggggaaggcgttattggtggtctggttgacggtgcaaaatcgattttcatcgatgatctgccgatcctcaatgaagacggctcggccaactatagcggcattacatgggattttcgcgacggttcgcaagaccagacgcctatggctggctttgattttgttgaaacgcctcggtcggtcaacatccagttgaagaaaacgcatgaggttacagtctccatcgacaatgatgaggctgatcgcgttcgcgtcattatgaagttcccttctctgcgtagcgtggataaaaagtctggcgacaccaacggcacgaccgttaagttcaaattccagatcgccaacggcgacagcacatttgacgatgtgattgccgatggggagaagggggtcgatgtcgcgctgacggcaaagaaaaccggcgtttattatcgcagttacgaactcaaactgccaaagcccggccgcgcatataaagtgcgtgtcatccgtctgaccgacgatagtaaaactcagtatctctataacgatacctgggtggattccattggcgagattgttgatacgccgatgaactatccgaactctgcgctggtgggcctcaaggtcaactcagagcagttcggcagctctatgccttctcgttcgtatctggttcgtggtttgaaaatccgcgtgccgtcaaactacaacgagaacaccaatacctatgaggggatctgggatggcacattcaaactgctgtcatcctctaacccagcctggattctctttgacgttctgaccaacgctcgctatggcctggggcaatttgtctcggaaaacatgatagacctcggccagctgtatcagatcggccgttactgcgacgaagaaattgacgacggattcggcggcaaagagaagcgcttcgcgatcaacacccagatcacaagccgtcaggatgcttatcgactgattcaggatatcgccggggcattccgtggcatggttttctgggctggtggcatggtgaacgtcatgcaagacagtccatccgacccggtcatgatgtttactaacgcaaacgtcaaagatggcctgttcagcagcaaaggctctgcgcgtaaagatcgcccgtctgtggctcttgttacctacaacaacaaggaagacggctacaagcagaacatcgagtatgtcgaagaccaggaggcgatgcgtcgttatggcgagcgcaaaaccgaagtggtggcgttcgggtgtaccagtcgtggccaggcgcatcgtgttggtctgtggctcctgtataccgctcgcatggagtccgatgtcattacctttaccgcgggcctcgatgcttcgttcttgattcccggcgaaaccgtgctgattcagaacaaataccgcgcaggtaagcgtaattccgggcgaatcatggccttcaacaagaacagcatcactcttgatgcgccggtgtcgttaaagaaaagcggtagctacattcgtatcttgaatcaggaagggaagatcgttgaacgcgacattctggagacaggggatagtgtcaccaaagtgacgttctcaaaggcgctggcatcaggtgaaatgccagtcctgaatggcgtctggactatcactgaaccggatctggaaccgatgcgtgtgcgcgttatcaacgttgcacagggcgatgcgccagggtctttcgatgtaaccgtagtgcagaataacccgtcgaagtacgaggcgatcgacaacggggcgacgttaattccggagaacaataccgttctcgacccgacttactcgaagccgactaacctgcaagtcaccgaagggacgtatatctccagtccgggcaacctctcaatcaagctcgttgccacctgggagggtaaatctgctgagtactggatcagctggcgtcgttcagacgaaaacaatgtttctaactggcagtccgcgcgtgtcaccgaagagcaatatgaaatcaccaatattgccgagaatggccagtacgatatccagctttacgctgtgtcgttcagcgggaaaaagacagagattatcagcactgtctacaaagttcaggggacgatgacgccaccggatgcaccgactgcgctgacggctgtgggcgactaccgcaatgtggttctgaattgggttaaccctgactcaatcgacctcgatcacatcaacgtgtatgcgtcccagaccaacaacctggacactgcaaaattgattgcagaagcagccagcaccacctttacgcacgcaggtcttggtgatagcgaaacctggttctattgggttcgtgctgtaaacaaacgcggtatgttgagccagcccaactccaatttgggcactgaggcgatgacgaaagacgtgttgtctttcctgaccgggaagatcacctcttctgaattggggcaggagctgcttgaggaaatcgacaccaaagcctcgcaggaagccgttgacgccatcaataagcagatggaggaaagcctcaaagaactcgaccaatctctgtcagaactgggcggcaagctggaagacacaagtgaccgactggaacaggctcaggaagagctgaaaacagaagtctccggcacgttggacaaggtcaatgatgcgttgcagcaggttgaggactcgaatgccgcgctggttgagttgcgggaaaccgtttcagaacagggcaaggctgtagcgagtgcggttgaagccgcccaagccgctttggacaattcgtctgccttaattgctgaagagcgagaggccagagtagagggtgacaaggcgaacgccaaacagatcgaggcgatgaagtcttctgtcgatgatagcgtagccgctgtcgaagaaatgaaaaagaccgttgccgaagtcgaacgtgccagcgcggaagtgacgacaaatatcgaggcattagccaaaaccaacatcgacctcgcgctgcgacaggacgaagaccagcataagcagatggtcaataatgcgaagatcgccaccactcaaaaaacctttgctgacgatatgtctgcgatggcctctaaagtggaagagatccgcgcagagattggtgaggacatccgggcatctattaccgaagagacgacagctcgtgttgaagctgataaggcgatcgcaacacaaatcaccaagctggaagcccagatcaatgatgatatttctgcggccattgtttctgagcaggaggcccgagcgactgcggatgaatcgctttccaggcagattacgtcactgcaggcgaaggtagaaggtgacattagtgcggctcttacggaagagcagatcgcacgcgcttcaggggatgaggcattatccaaacaaattaccagcctcaaggctcagacgggggaggatattaaggcggcagttgccagtgaaacgaaagcgcgtactgacgtagatagcgcactggcaacccagatcagcacgttaaaggcccagactgcacaggacatcaaagcagcggttgctactgagactaaagctcgtactgatgccgattcggcgctggccgggcagatcacaagcctgaaagcccagactggtaaggacattaatgcagcgattacgtccgaggcgaacgccagggctaatgctgatggggcgttggggtcacgtatcgacacgctaaaagcctctgttgacggtaactctgcaacgattaggcaacaggcgacagctattgcagataccaataaaaaggtctctacagcctggacacttaagatggagacatccaccagcggcgggcagaagtatgttgccggcatcgcgctggggatcgacagcactggtctgtcgcaattccttgttcaagccgaccgttttggattggtgaactcagtgaacggtaaagttacaacgccgttcgtggttgaaaacagcattgcttacatgaatggcgcctatatcaaggatggcacgattaccaatgccaaagtgggcgatctccagtctacgaattttgtttccgggcgctctgggtggcggtttggcaaaaacggagttctggagattaacggcaacagcggtggcaacggtcgtttggtcattaatggtcagcgcattgatgtttatgatgacaacaatgttctccgggtgcgcattggcttgctttga

SEQ ID NO: 133878 - DNA, 591 bp, Enterobacter cloacae; identical to SEQ ID NO: 112273

SEQ ID NO: 133879 - DNA, 798 bp, Enterobacter cloacae; identical to SEQ ID NO: 112274

SEQ ID NO: 133880 - DNA, 699 bp, Enterobacter cloacae; identical to SEQ ID NO: 112275

SEQ ID NO: 133881 - DNA, 336 bp, Enterobacter cloacae; identical to SEQ ID NO: 112276

SEQ ID NO: 133882 - DNA, 4581 bp, Enterobacter cloacae
atgtcacaaaacgtagagtttatcctgtcgctggaagacaagcagtttacagcgtcaatcgaccgggcgggtaagctacttaccagattcggggagcaggccacaaagcccgctcagaaaattaacaatctggaacgctcgttgggttcggtctcccgcatcatcggcgttctggagtccaagctcgatgccacggcagacaaactacaggatgtagctgccggcttcgagcttgtgtctgatgtttcgcgcaagacgcgaggcaacattaccagcctcaactcaggtctcaaaactctgattgagcgcgtcgacacaaccacctcatccgttaataaactcaccacatcgctgcgcaaggttcagtctgaactcaacgagttttccgattgggcaacgttcgctggtaagagcgccagccgcttcggtacggaggtaaaagaagcctctgcatccgtgagtggcatgaatacgcgccttaacaccacgacgaagcgtctcagcaattggggcgtcacaacgagccaggctgccgaggggctgaagaaagtccgcgatcagatggatgcggtgattggccgccagcagctgatcagcaagccggtgcgtgtgcgcaccagcggctacggtgagggcggtggtaatggcggtggcggtcgacacagcggttcctatagccacggcgggcgcggtgctgaaaatggcgtgttctctggtctgcgcggcaatattttcctgctgggcgagattggtgatgcggcaagaacggtaactgacatcctgttcggctggcagaagccaatcgttgaagctgcctccgaaatggagcgtatgcgcgtcatgttgcgcgggctgaacaaggacaaggccaaccctggcaaagcagccgcagaggatatgcagtacatcgtggatatggcgcaaaacgccccgtttgcgatgcaggcgctgaccgattccttcgttaaattccgctcggcaggtctcgatcctactgacggatcgctgaaagcactggtggactccgttgcacgcttcggcggcgatagcgagctgcttaaacgtgctgccgtggctgttcagcagatgtccggtaagggcgtcgtgtcgatggaagaactgcgtcagcaattaggtgaagccgttcctaacgcgatgaaggcgatggcagacgctgccggtatcactatgggggaactgaccaaagcagtctccaccggtactgtggaagcaaaacaggcgctgtcgctgatgttcgttggtctgcgtgcagagaacgaaaacgccgccaaagacatgatgcagacctacaccggtgcgctggcgcaactgcaaacctcatttacgctgtttgccgatcgcgtcggtcaggcgggctatctggattctctctcaaagggaatgaaagagctggcctccatcatgaacagcgctgaaggcatttcattcgctaactcattgggttccggacttactaccgcaattgacggcttacgtgagctggcgcagtggctggcgaaaaaccaggagttgattgtcaacctgggcaaagtagtggccgcaatggtggcgttcaagctgatgcgtgccgggattgctggcgtgattggcactgtcgggcagatggttaacacgtttgcgacgatgtcgactgccatccaggcgccgttcaatctgggggcgactgctgttacccggtttaatcgagcctctcgaatggggttggcacctattccatcgctgatcttcgctatccgcggcgcaattacggggctacagggggcattcgctggtcttactgcgttcatcgcagcaaacccaattggcgcagcgtttaccgtcgctaccgtggctgtggccggtcttatcacgtatatgaccatgctccgcagcgaaacgtcaaaagtcgttgacgagatccgcaaaatcccggaggcgatgacggcggctaaacgtgcgcagatggcagagcgtgcggaaaagctcgaaaaagagatcatcgcagaccagcgagcgctcaaaacaggcgaaagcgtgagctatgtgtccaactccgttggcgctgtcactcacaaagagtcaaaagccgatatcgaggctcgcctgaagaagaatcaggaagagtaccagaagatcaccggcactattgcgctgggtgacggggctgtagccaaacgtctggctaaagaggcagcagaatcccagattgagaaaatccgggccgacaatcaggtcttctctgcgacatttgtgaaagcacgtcaggaggctctggataagatccagaaaatcaatgacgacaaatcactgtccgacgatgagaagaacaaacttctcgcaccgctccgtgaaacggtgaacaagtcatacctggaaccggcgcaaaaactggtcgattccctgtcctcccgtaaaaacgcgaccgagaagcagattgcccactacaacgatctgctcgtaaaagcgaagaaagagggcaataccgagcagattcagaagctacaaggcagtattcgaggctatcaggagcatctggaagctgtcgctcaggagttgactcaggccgagtttgagcgtgataacgctgccaaaactggtaagggcgtcatgtccaaccagggaaccgttttggggcttggtacgagcgacaaggcggcccagaaagctctggcacagtacatgcgcaaccagatggactccgcaacctatcagcgcacgttgccggacggcacggcgatgctggatttcgaaggcaagccgattattgggcctaaacagctcaagactcagttgaacctgcaaaaagcatccagtgccagctctctggagaaaatgagcgatgaggaacgcgccgcagctattgccgcgctgaccaaagcgcgtgagcaggatgcagcagctgccgagaaagcgggccagcgtacagccaacgcctcccagcgtgccgcgaagaaggaagaaagcgcccagcgtaagctggcggctggataccagaaagcgctggataaagccgatcagcttatggggcagatgggcgaaagctcgaaagcgaccgtatcgtttgaccagtcactccgcgacaccaccaaatcgctgaccgacctggccaacgccgtaccgaatgagttcatcactcaggagatgatcgacaaagccaagtcacgccttgctgatctggctaacgcgagcgacgactaccgcgagatgttcaaccgccgcaacgtcgagcagatgatctccacctgggcgccggaatccgattccatcattagcgcgggttacaagccgtctcgtgaagagaaggtggccgatttcaacgacacctacaaccgtaacctgaaagcgttgatggatctgcgtgaccaggcatctgatccgaaaattgtggcgctgtacaccaagcagatcaatcagcttgttgccgctggcaataccgcgctcatcaaagagaccggcacggccacccagaagctggcgcttgagtatgaaaatctggccgagcaactggaaaatagctggagcaatctgttcagcagtcttaccgatacgctcaccgacttcgtcatgaaggggaaaatggacttctccagcctggcagaatccattctccgcgacatcaccaacatggttgtgaagacgcagatcaccctgcctctcatgaacatgctggggatgggaacgacggcagctggcagctctcagagcggcaatctgctttctggtgtcgcgtcagcggttgccaatcagggcgtccgtatgaatgcggtcaacggtgacaagtcagtaggtgaagcgacgaaagagacctccagttctgtgtccggattgggtcagacgactcagcaaacgaccagcgctatcggtacggcaaccaacgcgattgggagttgggtgtcggggctgttcagtagcaccgaggccaaagacgctgaaactaaagcagtgaagacctccatcttctcaatgcagaatctcagctctgttactggcgcactctccgctgcgttcgccatgttgggggcaaatgcttccggatcaggcaacaagtggttgagtttcggttcgacagtggtttccggattggtatcagcctgggctggtggcgggtttgatagcctgatgtcgggttcctctggcagctcagggtttaacaatctgactggttccgcggcagatggtacgaatggcattccttcaattccgaagttcgctaaaggcggcattttcgggaaagacggagtggttccgctgcgggcgtaccagaaaggtggcatcgcggactccccacagctggcgttgtttggcgaaggagacatgaacgaagcctacgttccgcttccggatggtcgttccatcccggtcacgctcaatgcagagagtgttaaaggcggtggcggcggcgtgttctcccccgtcagcattgagatcaacgtcaacagcgacggcagtgtcacggagaacagcaattccgaaggcgcatggagtcaggccgcacagcgcatgaaggcgatcgcgcttgaaaccatcgctcaggagaagcgaccaggcggttcgctcaaccctaactctcaacgtaactaa

SEQ ID NO: 133883 - DNA, 318 bp, Enterobacter cloacae
atgaccaaattactcgatctcgactccattctgcctccgaagaaaggcatcaagttcggcggccaggaataccccatcgttgaaatgactgttggcctgttcgtctccatcaagcagatggaaggcaaagacctccagaacatgtcgcctgttgagcaggttactgcttacgccgacctggttcgcaaggtcatcccatccgtgccggacgctgtactggaaaaactgactgttccgcagctccagcagatcttcaccttcgctatggaagtgattgatgaagagaacgaaaaagcggctggtgaaggggcaaagtaa

SEQ ID NO: 133884 - DNA, 747 bp, Enterobacter cloacae
atgtccaatacccatgtaaaaaacatcaaacttggcgcctgcaaagtgtcgtttggtggcgttgatctgggttacaccaaaggcggtgttcaggtcgaggttgcgaccgaaactctgaaagtcaccgtagaccagctggggcagaccaccatctccgagctggtgcagggtcgtaacatcactatcactgcgccgctggccgagtctgtgttgaagaatatggtcgatctgatgccgggttccaccctgagcgaagaagataacgctgtaaccatcacctccgcacagggcgtcaacctgatcgacgtagccaaagagctggttctgactccgcaggataccaccgactacgttctgaccatcccgaaagcggcgaccgcaggtaacttcaccatgacctaccagtctgatgatgttcgcgtgttctccgttcagttcaccgcttacccggatgatagcggcgtactggggaaaatgagcggcccaaagccggttaaaaccgtctctatctctccggaatctccggaagttaaagctggtgagaccgtgcaactgactgcccagatcaccccagaagatgccggcgacaaaactggtgtgtgggaatccgacaatcaggagaaagcaaccgttgaccagactggtctggttcgcggagtagctgaaggttcggcaaatatctccttcaccagcaatagcggcggcaagaaagcgaccaaagcagtaacggttaattctgcccaataa

SEQ ID NO: 133885 - DNA, 384 bp, Enterobacter cloacae
gtgtttattgaagcatttgcgagcctgatgcagaaggcgaagatcggtacagtcggcactgacattttctgtcactacatgccagccaatgtgaagtccggtgttctgttggtgactcccaatacggggatcaccattgaccatgagttaaaaggcttctatcacgactctttcaccgtcatcgtgcgtaatgcgacgatcacaaaggcggtggcgaaagccaataagatcatggacatgttcccggtggaagaaaccgtgtcagagggcgtttacttccggttggttcgaccaatgtcgatgccgatcacttatcccaaaaacgaaggctcattaattgaagcgggcatcccgattgaatttgcgggctatttgttgaattaa

SEQ ID NO: 133886 - DNA, 474 bp, Enterobacter cloacae
atgggtctgaagtgcgacgcgcatcagtttaagcgtgctggcgacaggctcaataacagccagaaagcctttaagcgttatctcatccgtgacatggagaagctggcgcgtctggttgagcgtctggcgcgggcaatggctccgctggagactggctcactcgaaagcgcgatcttcgcgagagtggtcaaagagggttataccgggctgcgtattgcgttatcggtatccggggccaagccacgcgagaggcatccgggcgttgaggttggcgattatgcggagtacatggagttgggcaagtatcgtctcggctatctctcccgcatgaagagcgtcaccaacccgccagtcgctggtgtgaagccacgagttgggcctttgttccttgagagagccgtgcagatcagtgagaagcagttcactcagacgatagcagaagcggcaaggaaagcaggttttacgagaggttga

SEQ ID NO: 133887 - DNA, 345 bp, Enterobacter cloacae
atgaacatttcatggcaagccgagatagcgatttaccgtctgggttcgaagaacgtctacggtgaagcgcaattgcagttcgtcaggaagacgaacgtcggcgtcgttaagtttgagcaaagtaacgagaagtcatcggtacgtgcggacagctccggcagtcgcggtaaagcgaatctggaattgttcgatgctgttctggtgatcccacttgagaccgcagtacagcttgatgacgttctcattctggaggggcaaaagctgaaggtatccagcgtgcatcgtcgctggggactgcgtgggcgccctgggcatctggaagtaggggcaaacatatgggtctga

SEQ ID NO: 133888 - DNA, 834 bp, Enterobacter cloacae
atggcgcagatcgacacgtaccgtagcggggaagcagtttccctgtcgtttgcatttaacgttctggatattgagtcggccacgtataccgtcagagatggcgctggtgcgatcatcgtcaataacgaacctctcgatattactgaggggcagatgtccattccggttgtcgtgtcggccgaacacaacctgctttcagataaagagcgcgatctgcgacacgtcattgtcaaagcggtggcatccgggctgacgcatgaagagcgcaagatgtacgttctgctaaatagcttcgagctgtcaattccaggccagtcattcgcaacggttacagacgcccagatgcaagctatcgatatgctgaacggcgacaccctgttagctgatggcgaagggctgatgcgcaaacgtctcattgaggccaccagacgcgtcaaaacgctgccgttctcaatccgcaaagtcctgcgtatcgacttcgaccgttacgaccgcccgcaaaacatgctgaacgtctatgacattccgtggggcgctgacggggcatatcgtcacgatctgattgattgggagcagatgacgccggagaaattcgacgagttcccggactacttcaaacaggcattaatgctggccgtggttaatgaagcctgcgaaatcgctaacggtaatgacgtagcggcagcccgcgaggacggcattctgtctgagtccattggtgaaacgaccaatatgtaccgcaccggcaaagcggcaaatgtgcatgtggctcgcagtacctggcgactgctggtcagttacatcaataaccgcatgattgttcgccgtgcgtaa

SEQ ID NO: 133889 - DNA, 396 bp, Enterobacter cloacae
ttggggtatacgggcattctctgtggtatccagtttgtcgacggcatctcggttgccgaactgccattcatcgatcagcagcggatttgtgcctccatgcgtgccactaccgttgaaggcaaaaatgtatctccttctgccgcatacagcagtcgcaatgatttgactgcggacgacattgtagagacggcggccccggatattgtgccaatgaaacgtggcacagctgaagcggaagccaagccggtacagcgctttactcgtgaagagctagagtcgattgcggactgcgaaggtattgcgggtctgcgtcagatcggcaaccagattggcgtgaaagccaaaggcatcgttgaaatgatcgaaggcatcctgaaagcacagggcggtgagtaa

SEQ ID NO: 133890 - DNA, 924 bp, Enterobacter cloacae
atgccagaacaaaagatgaagatcacggaagaggcgtttgcggatttcactgggcatatgtgccgtgccgggttcaccaattccatctccaacgagcctctgagcgagcgccagcagaaccatcttgcggcttgcttccgggcaattccgttcactcagtctgtcaccattacaccggctgcgccgtccgtattggtgggcaaaaccgttcaacttagtgcaggtatcaccatgagcaaaagtgcagattcattcacctgggcgtcggccaatgaccaaatcgccactgtcagcggtacggggctggttactggcgaggctccgggcaaagtgaagatcaccgccaccgataagcagactcagctttctgcgtcagtcgaagtgaccgttgagcctgtcagcgtggagtccgttaccgtaacgccagactctacctccgttgagaaggggaaatcggtcaagttgcgtgttgatgtacagccgtcaaacgcaaccaataaaaaagtcacctggacttccaaaaatagcgacaaagctaccgttgaccagaacggtaacgtagctggcgtagccgttggtacggcaaccattgaagtggtttctcaggatggcagccataaagccactgccacggtgaaagtcactgagcttgtcgttgctgttactggcgtctctgtcgatccgagcaccaccagcgttgaagctaacaaaacggtacagctgaccgcgaacatcgaaccggctggcgcaaccaataagcgcgtaacctgggcatcaaaaaatgccgagtttgcgacggttgatagcgcaactggacttgtaaccggcgttgctgcaggtactgccactatcgaagtcaccacggaagacggcagccacaaagcgactgcgaccgttgaagtgaccgcagcaccggctgcgtaa

SEQ ID NO: 133891 - DNA, 882 bp, Enterobacter cloacae
atgccattactgcgtgatgaagctgaaaagctgtctaacaacgaacttgagcagggcgtgatcgaaaccatcatcgatcgcgatgacctgttcgcaatcctgccgttcatgaagatcgactccaaagcgtatctttacaaccgtgaagctaccctgagcgaagcgacctttattgatgtgaacgacaccatcaccgaaggcgctgcaaccttcaccgaacacgttgcgaaactgcgtatcctggcaggcgacgtagacgtcgacaaattcctggcgaccactatgtctgacaccaacagccagctggcaatccaggttcgtcagaaggtgaaaggtctggcgcgtgcattccgtcgcaacctgattctgggtaactccaccgagaacaccaaagcattcgacggtattccgaagctgatgcacaacgatcagaagatcgacatcgctaaggcttccatgacgttctccatgttcgacgagctggtggacgcggtgaaagacctgggcgctgactgcatcatgatgcgttccgaacacctgcgtgcgtaccgcgctctgctgcgtaccgtcaacgtaggcccgtccgaaatcatgatggagaacttcggtcgtccgatgctgtgccataacggtgttccgttcatcatcaacgacttcattccgaagagcgaagacaacaccgctgcggacatctactgtctgcacctgtccgaagagaacggcgtgaccggtctgtacggtggcgaaaacgccggtatcgttgttgagaacatcggtactgtacagaacaaagacgcagtacgtacccgcgttaagtggtactgctctctggcgaacaagcacgacaaggctatcgccgcactgaccaacgtaaaaatttga

SEQ ID NO: 133892 - DNA, 894 bp, Enterobacter cloacae
atgaatctgtggcaaatgcttttggcccgtcgtggcctgatggatgcagccgaagcgcatgagcgcggcggcgctggtggcggcgctcctgctggagacaatgagcagagtacgcaagacccaggcaaacagggcgagcaaaaagagcaaccgaagggtgacgacgagtatgccggtatgactcaggaagagttgctggcagaactacgaaagtccaagaagaccggtgcagacctgctgaaagagaacatgaagcgcaaggagaaagagcgcacattggccgatcagctggctcagtacggcgatattgacccggcgcgtgctcgccagcttctcgaagctgaacaagccgcagaaaccgcacgccgtgaggcagagcaggctgaactggaacgtcgcggcgaattcgacgctgtgaaaaagcagatgatcgaagcacaccagactgaactggcgcagcgtgacgagcgttattccgctctggaaagcgaaaacgccgcactgaaggctcaactggttgaaatgaccgttggcgcttcgttcagtggctctgccttcctgcgtgacaaagttctgatgactccggctaaggctcgcgttatctacggctctcatttcgaagtgggtgaagacggtagtgttgtgggctttgataagccagccggtcagaaagaacgtgcagttctggttgacggtgaaggcaaaccgttaccgttcgaatccgcgattgaacgcattctgcgtgcagatccggaagctgacgcactgttgcgcagcgaagccaagcagggtgctggttccaatagcaaaccgacccacaaagtaaaccagccgaagagcaagtcgactatggataagttgacctccggtctggggaaaatcggactcaagtaa

SEQ ID NO: 133893 - DNA, 1575 bp, Enterobacter cloacae
atggaattgactgacaagcaaatcaaagaccttgtggcacgacgccaccctgaatatgagaagaaaaaagaacattgggacttcctcgccagcacctacgctggcgggcgtgcctggttcaacgacaatatcttccgttacttcaaagagggcgatcaggagttcaaagagcgcctggaacgcgcttatcgcttcaaccatacgcgcgaagtggtaaacctcatcaacaaatacctcttcaaagaggtcattcaccgcaacactgatgaagcaccggagcagatccgcaatttctggaagcgagccacgcgccagaacgcctccatcgatgcgtttatggcggctatcgatctgcaatcatccatttatggccgtatctgggttgtcgtggacagcaccatgaacgtcgatgttgagtctgttgcagacgagaagaaaaatgatgcgcgtgcctacgcttactggatttcgccgcagcagctgcttgatgttgcctgggatgaagacggcaatatgttgtgggcgctgattgttgaaatcgcgcgcgacgacgaagatccgttcacatcaaccgggcaggaataccagcgttaccgtctgtggacgcaaaacgagtggtatctgttccgtgaagaagtgaagaagggttccggaaatagcggtcgccgtcaggccaaagtcgttctggaggatagcggccagcataatctgggcgtggtgccggtgttcccggtggattgcattggtgaaagcgagtctccgtatttcagcccgtcgttgattgacgatattgcctatcttgatcgcgccgtggccaactacctgtcgaaccttgacgcgattattcaggatcagacattcagccagctggcgatcccggttcagtcattgctgccgggcgatgaaaaccacaccaaagtgcttgaaatggggacaaagcgcgtcttcaccttcgactctgagagcggtaatcagccattctacctgtctccggacccgaaacaggcccagatgattatcaccacgattaagacggtgattaacgagatctaccattccgttggcgtggcaggtgagcgaaccaagcaggataacgcacagggcatcgataactcttcgggcgcagcgaagatgtacgacttccagcgcgttaacagtctgctggtgacaaaagcagagcgcctcgaaagggcagagcgccagatgatgcagctggcagcgaagtggatgggtgtcgaactggatgaagaccactctctgatcgcgtacccggaaagtttcgacatccgcggtctgactgatgagtttgcagttgctgaaaagctctcgctgcttcaggcacctgattccgttcgtcgtcaccagatggaaatgctcatcgagaaagtgttcccgaacatttctgaggcgatgaaaaaggaatttgataaagatctcttgaaatttcctccaaaaaatgatctaaacacccttgaaaataagtcagtacttacttatgatcgagatacagcccaagaaagcgggcaagatcaaccccgagggaatggggactcatctactcaagagaccgagtga

SEQ ID NO: 133894 - DNA, 1257 bp, Enterobacter cloacae
atgaccatcccgtcgtctctgagtctcgtacagctgcattctgggcagatgcaagtcttccagtcgccacatcgtttcaaagtggtgtgtgcgggtcgacgctggggtaaatcccggttgtcaatctccaccatcatccgcgcggcagccaaagagaagaagcaacgtgtctggtacgtcgcaccgacttaccagatggctcgccagatcttgtgggatgacctgcaggaagttctgccgcgtaaatgggttcgtaagaaaaacgacaccacgatgaccatcgtgctgaagaacggctctgaaatcgcgctgaaaggtgcggataagcccgatacgcttcgtggtgtggcactgcactttgtggtgctcgatgaatttcaggatatgaagccggacacctggtacaaggtactgcgtccgacactgtcctctacccgtggcggtgcgctgatcatcggtacgccaaaaggcttctccgagttccacaagctgtggactatcggtcagaacaaagatttgcaacgcaaggggcagtggaagagctggcagttcgttacggctgattctccgttcgtaccgagcgcggaaatagaagcagcaaagaacgatatggaccctaaatcgttcgcacaggaatacctggccagtttcgaaaacatgtccggacgcgtttactacccgttcgaccgcaatgtgcatgtgaagccactccagttcaatccgaaactgccgatctgggttggtcaggacttcaacatcgaccctatgtcatcggtcatcctgcagccgcagccaaatggcgagttgtgggccgtggacgaggttgtgctgttctcttccaacacggctgaagtgtgtgatgagctggagcgccgtttctggcgctggaagtctcaggtcactatcttccctgacccggcaggtgcgtatcgccagcacgcacgcggcgaatcggacgtcgatatcttcaaggaaaaaggtttccttcgagtcgattatccgaagaagcacccgccgatcgcagaccgtgttaacgcagtgaaccgcatgttgatgagtgcctcgggcgaaacccggttgtacatcgatccgaagtgcaaacacctcatcgactcgctggagaaggtgatctacaagccaggctcacgcgatatggataagactggcggcatcgaacacagtgcggatgcgttgggttatccggttcatcgtaggtatccggtgaaaaatcgtgttattcttggtggatctagatag

SEQ ID NO: 133895 - DNA, 642 bp, Enterobacter cloacae
atgactgtagaaaaagacgagagcaaaactcgcctgacaccagctgagtgggcagaagccgaagcgaagtggacttccggcgaatacacactctccaagctggaggaagagtacggcattcgtcgtgaaacgctctccagacatttcaaaaagcgtggattagagaaaggcgcggactccgttgggaagatggtgcgcgagtcgctcaaatccgacgcagagctgcgtgcgaaggcgcgtgcagagaaaatcgaagagcgccggactcgttacgacgattgggcgttcgcactcggtcgtatggtgatgcatgaggtggccacagccaagaaggacggcaggccactggcagccatcgaagatgacctgaagagtctccagcgtgccagcggcacactcgctaagtgcttcgaaatatcgtcgaaagcacttggtatggatcgcgtggagaacgaggacgacgaaatcccgaacctggtatttggcgaacttacgccttcccaggtggcgcagctgcgtaaggaagatgatgagccggatctgattgatgacgatctgcttgagtcactcgaagaggaagcactgagcgaagctgagggcgattctgacgcgtctggtgatgaaagtgatgggagcgtctaa

SEQ ID NO: 133896 - DNA, 267 bp, Enterobacter cloacae
atgacgttgaccgacaaacaaaaagacatcatcaaaaccatcaatttaggccatgagcgtgggcatctgctcgatctggacgagctgcttgaagtgctgccgtacaaaacgaccaaacagagtatgcagttctctatccgcgcactggtgaaaaaagggctggtggagaaaggaatgtgtcgccagcgcggtgattccggctaccaccgtcgcacgctgggactgaccacgttaggtcgtgccagagccaaattactggtgatgtaa

SEQ ID NO: 133897 - DNA, 891 bp, Enterobacter cloacae
atgacggacatcatcatcaaacgctaccgcccggaagagttcccgcgtcatctggactttctggagcgtatgaccgttaccaaaggcacggttgaagactggcacgcgctgaagtcgctgcactacaagacggatggtaagccgttcgcgccaacgtattatcgctgcgaactggacgaccggctggtgggcgtcgtggttatggcttacccgaaactgctgctggcgcctcgccatcgcatgtttcctaagctgaagccaaccaccaataccaccgtggccaaccagtattggggccggtacgtgaacaacaactttgcggtgatcagccgttccgttgtggacactcagtaccgcggtgtcggcgtctcctatcgaatgattaacctggttagcaggatgcacgaccggccaatcatcgagatccagtcgtcgatgagcaaatacaacccgttcgccatgaaagcagggttccagttcatccgtccggagcgtccgaagagctatgagagtgcgttgcgcgtcttccagcgtcattttcgttctgaccctggcgacaacgaagcgatcgtcaaagagctgttcgctatgagtgagtctcgccgtcgtcgtgcgctgcgcgatctggtcgctgactaccacaagaacagttccctggccaaagccgggcgtaatcgtggcacgacgattcaggacattgccgacagcctggtggacgaggccagcatcgtgaagctgctcaaggacattcacaacctgagcttcacgtctccgctgtatggcgtgtaccgaaacccggactttggtcgtcagctgccggacacgctgccactgctggcattcgacaaacagcctttgaataaacctcttgaaattgcattaccggcataa

SEQ ID NO: 133898 - DNA, 255 bp, Enterobacter cloacae
atgcctgatttgaagctcgtagagctgaagccatcgaaagaggctgacaacaacaacgttgaagtcatccgcctgctggaagaagcactccagtacgccagagaaggcaaaagccagagtctggcactgctgatgatcaacaacgacggcagtgtgctggattgctggcataacggtgggggtccatacgtcatggttggggcgatggaatcgcttcgcctggacttcatcaatgccaatatcgagcgcaggtga

SEQ ID NO: 133899 - DNA, 639 bp, Enterobacter cloacae
atgagcaaatacaccatcaacgtatcgtttcagacccgcgtgaacaaaaccacgcgcacgctggagattgccgaatcgttcggtcttggcctggacgaaaaagagtggacgctttacgacaatctggagctggaagtgaagcagggcgatgtggtgtacatcaccggccaatccggttccggtaaatccgttgtgctgcgcgagctgcaacgccagatgaaggatgaagggctttctgtagcctccatcgatgattttaccttcgacaatgaggttaacgtcatcgaccagctgggcaaaaccaccagcgaagcgctggggctgctgtctatggccggattgaacgacgcctatctctttgtgcgcaagccatccgagatgtctgacggccagaaataccgtctcaagatcgccaagctgatcgagtccggcgcgaaagtctgggctgccgacgaatttggcgctgttctcgaccgtgtaaccgcccaggttgtggcgtcgaacctccagcgtgccgcccgaaaggttggcgcgacggtaatggtggcgacgacccacgaagacctgaagaacgcgctgcgcccggatatgcagatcaccaagcactacaaagaacgcgtgaaggtggaatatgcctga

SEQ ID NO: 133900 - DNA, 669 bp, Enterobacter cloacae
atgaccaaaaactttgaaatcgtctatcgaaacccggcagaactcatcccgtatgagatgaacgccaaaaaacatgacgaacagcagatccgcgatctggcggccgccatcaaaaagcgcggttttgaccagccgatcacggtcgacaagcacgacgtcatcattactggccacggtcgtcgcgaggcggctcttctggctggtctggagcgtgtgccggtcatcgttcgcgacgatctgagcgaagaagaagtgaaggcgaagcgtctggaagacaaccgcctggccagtattgactacgacgccatcaaattgcagcaggaactggaatccctggtgctgggcgacgtcgaggtcttcggttttgaagagcgcgagctgaacgtgcttgtcggcagcatgaccgaagagatggaaaccggctctctggtgctcgatctgggcgaagagacggagcgccagaaggaagagcacaccgagatcagtcgcgaagtggcctctgaagaagtccgcgtcatcgacgtattgggctttaaaacgctccctgctggctctgccattgtggttggggatttgcttgcccacatggaagaaatcacgggagagagcggggtagacgctttcgtggcgtatgcggagaaagtttcttctggggagctggccgcatga

SEQ ID NO: 133901 - DNA, 681 bp, Enterobacter cloacae
atggatgtgaaaattacgattctgcaggtggaagtcgcgaacctgcgtccgaatccctggaataccaactccgttggggcgcaaaacttcgaaaaactgaaaggctctatcgaaaaattgggcttttttaagccaattctggcgcgggagctggacgggggcatttttgagatcctcggtggtgaacaccgctggcgtgccgcgatggagcagggcatttcaacggttcccgtcatctccgtgggcaaaattaacgacctggtggccaaacagatgtccctcgtcgacaacgagcgctacggcgaagacgatcaggtcgctttgcagcgcttaatcgaagaaatccagtctgaaatcgactaccggttgtccgatatcgccccgtatgacgacgaaatggcggcaacactcgccaaagcgtccgttatcgatcttgaagcgctggaagcgctctcccgtggcgatgacgagccggtcgatgaggacaaacgcgagaaaaccgagcgagtcggcgctgaacaccagacgatgcgcttcaaggtgacgtttgatgcgtcagatcgggtcgccgacaccatcaaaaccatcatcaaagagcagggaatcaataccggtaacgaaatggagaacgccggggaagccctggtgtggctggtcgactactacaaggagcgtatgtaa

SEQ ID NO: 133902 - DNA, 1560 bp, Enterobacter cloacae
atgacagttcggattgtatcgaatgcagtcaatgcgctgatttctggcgctgatgacaacgtgaagcggctcgttcaggagatgttgaactatgaagtggaggctggggactggaaaggaaccagcacgatgttcaactggagcaaaaacgcgttcccggctgggtttgcgaaaccagttgcagccaaccttctgaaagctggcatcaaatgcgtgcatgtgcgcaaggaaaaagccctcgcgctgggcaagccgaacccggtagttaacccattcccgtataacccggactatgcgtatcaggatcagactgtggaaacactggtgcgcgaagggatgatgattgcccagattgcgacgggtggcggtaaatcgaacgtagcgtgtaaggctgctgctcgcattggtcgtatgacgctgtttttaaccacgcgatcggttctgatgttccagatggcagagaacttccagaaatccatcgactaccgcgcggagaatggcgagccgtggctgaaaggtcagagagttggggtgattggatcgggtgagttccaggtctcgcgccatatcaacgttgccacggtgcagaccctggccagttttctcgaagagccaccgcgcgacgcatcaccggagaaaaaacagtaccacctgaagcgccgggaactggttaaacgcttcctgtccagcgtttctctgctgattctggaagaggcacacgaatcatctggttctaacttctacgacatcgcccggctgtgcatcaatgctgactaccgtctggcgctgacagcaacgccgttcatgaaggactcgactgaagcaaatatgcgtctcatggccgttgctggtcgcattgagataaaggtcacggagaaatatttgatcgatcgaggtattttagccaaaccctactttctatatcataaaatcgcgtacactccagacgaggtgcggattagagccgaacttgcttcaaaacacctaaattttcgggttggaatgagtacggcttaccagaaagcctatcagttaggcatcgtttataatctgggacgcaacgaagctattgtgcgtgaagcgttaatgtacaagagccacggtctgaactgtatgacgttggttcgcctgaagcgtcatggtcagatcttgatggaaatgatgaaagagaacggcctgaaggtcgatttcatctacggagaatcaaaccagactacccgacaagcaaagctcaacagtctggcggcaggcaagatagatgttctgattggttcaaccattctggatgttggcgtcgacgttccaagcgtaggtgcggtgattctgggtggtggcggcaaagctgaagttgagatgcgccaacgtgttggtcgcggtcttcgagccaaaaagaatctggctaacgtgtgctttattaccgacttcattgacgtgagcaacaaatacctcatgtcgcattcatatgagcggaagcacattatcgacacgacgcctggatttgccgagggagtattgccggtgggtagcacattcgatttcactgttttgaatagagagtaa

SEQ ID NO: 133903 - DNA, 279 bp, Enterobacter cloacae
atgagcgagaaacgcgctatacactgccaggttcagttaaccgaaaaagcaaacgacaagctggaaacctttcagaatcgactgcgtgaacgcaacataaaactgtcaaaggcagacatcattaatctggtgctgtccaacatgacgatggctgattttgataaggcagctacatcattagaggcttcagccaaagctcgcgaaaaggtcatgaagatttacgaaaactcgggtatgaccaaagaagatctggccgatattctaaaacgcctcgattga

SEQ ID NO: 133904 - DNA, 258 bp, Enterobacter cloacae
atggtgggcgcaggttgcgacgcatcgatcttcatcaatggcgaaaccgttgccaaactggagacaggtgaaaaagtcacttttcatctggatgccggagaatggattgttggcgcttcactggaaggcgccgggctgtgcgcactgaaccctgctcgtcaggaacgcgagacgatcaccaaagctggcgagacgaaagtcttccgggtgttcaccagcaacgcaggtgacatcgatatcctaccaacaacactgtga

SEQ ID NO: 133905 - DNA, 528 bp, Enterobacter cloacae
atgacgaatattactgacatcacctacgggattcctgcagaagtctggccgcgcgattacaccaacgtggagaaggcgctgatgttctggcgtaagtatctcattcctgtaagggtcacgatggaagatggtcaggtgttctgcatgtacgttcagggtctcatgtcgtcgcgcaacaaagtcgacctttgccctgccccgttcgacaaagaaaatcgtataaggctcccacttgagcgaatcagcacgattgaatcaggtgtgacagaaggcattgcgcacgatttcacgggtcggacaacggtacacccagactatgtggacaatcggccatctcgccgtgatttcttcaaaatttgtcgccaggctcatgagatgcagaagtctataagggtctacatggcggatggccgtgaaattgagggtgtgtcttcaggcgttgacgcttgccaggtcactctcaacatgggggacggtcggaagacagtcgtcatgttcgattgggtcgaacggattttaccgttttaa

SEQ ID NO: 133906 - DNA, 651 bp, Enterobacter cloacae
atgtctaacgttgctatctctaaaaaatccatcatcgacgctgctgtagttatcgctaatgaattgcaagttgcagccaataatgctactcagacttataacaatcattatcagaatggtacgcatacaaaagcagataaagctaacatgcttgcagcgactaccaaactagcatacttcaccaacaacgttttaaacgctgttaatgatgagaaattagctggtgtcttttactacgcgattaaagcaagcaaacaagcacctgaagcgtttttccgtgaagctatgacaaatagctactcattagaaaaactggtttatctggttaagtctatcaagtctggtaaatgtgtttattccgtcgctgatatgtccggatctcgcgtattcgctttaatcgaaatgattaatgatgaactggaaacattcacaaatggcgctgttttcgatttgatgaatgaagccaaaaaagaaaatgaaattaaattagacgctggctacactcaagccaaccagctgattaatctttgtgaacgtctcggactggtcgagaagatcaaaggaatgggcactgctaaaaacggatctcagcaatatcgctttatcaagaatgatttttataactatctggctgatgctttcaaagcgtaa

SEQ ID NO: 133907 - DNA, 204 bp, Enterobacter cloacae
atgattagttatgaccagatccgcgcggaatatcgcgcaaaatatcgcgcttataaacttgaattaatcgacgacttaaaagcgcaacgtgacaaattaaattttacgttttctgatttgcttaacagcaaaagagactgtaaacgcaaacgtgaatatttgcgcttgtctgaaatgatcggaaaactgcaaaacagcatttaa

SEQ ID NO: 133908 - DNA, 483 bp, Enterobacter cloacae
atgaactttatcgctactgttaacacccctgcgcatggccatatttctgtgacgttctctgataacgagaaaagcgtgctgggcgcctggcgtgacaacgtaaccatcgaactgtccggtaaagagaaacagcagatcaccaatgacataatctgcaaccgtcgccataagcgcgtatttgagaaagcgtatgtctccacctccggatttggcgtattcatcttcccggtacgcagcggtcgcttctgccagtcaaaactcatcgagttcgccacgcagatcgcgctatgggttaaaacagaatccgggttcgacttcagcgaacaggaagcagtgggggaggggatgcgtatcgccaacaacgccatcaagtgcaaaaacgtcacctacgaagcaggaatcgactcgtggagtgtctcgtgcggtgaatacgtgaaagaggtgtacggaaagaaccgcattcacatcctggctggcaagtaa

SEQ ID NO: 133909 - DNA, 177 bp, Enterobacter cloacae
atgctggtggccttaaatgaccatcctgtttcccgcaggctaaaaacacccacctcttaccgccaggctaccgaacaaccctccgactccctgtcggccaccagcagccggaacagaacgcttggacgccttatgcgcgtagtgataattaaaccaacaagaaaacaagttgtttaa

SEQ ID NO: 133910 - DNA, 282 bp, Enterobacter cloacae
atgaccgatttcactatctcccctaaagctgaaaacgtatggctggaatcctggctcgacctgtcgccggaagagcagcaggaaatggatcacgttgaacaggacgaacaatgtgatgcccgcttcttccgctttgaggacagcgtttatgacattgccgacttcatgcgcgatgaccgcttcccggactggcacgcaggctacccattaaatgccttcgccatgctgatgatccgcgtggatggctccggcgataccatcgacgtcggtctgctccactaa

SEQ ID NO: 133911 - DNA, 396 bp, Enterobacter cloacae
atgactgttttacgcgaaaatcttgtgctggatttacattatgcgtccgaaaccaccttcggcgagaaagttgccaaactgaccgtcgttctgcgtgacaacaccaccggaacggaggttcacaccagcaccttagtgcgcgagggggaaggtgaaagtgcgatctacagcgtaggttatcagaacatcagcaacgcagccgacccgctgctgctaaagctggaagcgtatttccgcactgcggacaaggcgatgttcgataagctgatgaccagagtagatacgctgtttacctccgatttgaactctaacagcacctggatgggtcaatacggtctgcgtatcgtttccagcgcgatggtagacgaatttattcccgaaagcgtgtttgaataa

SEQ ID NO: 133912 - DNA, 312 bp, Enterobacter cloacae
atgaaaaacgcgatgatcaccaaactgagtgcgggccagccacgtaaagaaaagccaaccgcaatgagccagctgaccctgctcgatatcatcgccaacggcactgccattcgcctgttcaaagagacgctggtctcattcgacagtggttcccgcacgcgttacgtcatgagtgtgcgtcgccagagtggaagagggtggatggcaaaacaagttatctggccggaaggagaactggaaatggcgctactggaggcgaacaaagtcgcccagcaagaaatccagcgtgcttctcttctggcgacagcctga

SEQ ID NO: 133913 - DNA, 219 bp, Enterobacter cloacae
atgattaagatgcctgtgatggttgaggtgtggagtgtggattccctggccgagtgcctggatgcagtggggccggagttgtaccgcaagttgtggtcgttcgtcccggctgaaggggaatcacccaaagggaaggatatctggcacctgctcagtgaagatgaacagcgggagctggtggacgcggtacacatcgagttcccggacgacgaagattaa

SEQ ID NO: 133914 - DNA, 216 bp, Enterobacter cloacae
atgtacaagcatctgaatatcagcatcaccctctgtggcgaggaagcgtcctccgagtgtgagatctccctcgatgatgttatccgttctcaggatgttgctggtcgcgtggcgacgctcatctctgaaggatacagagaagggacgtttgatttccatatcgaggacaacccaatgtccgtcgcgtggaactgcacgacgtcagaaacgaagtga

SEQ ID NO: 133915 - DNA, 243 bp, Enterobacter cloacae
atgaacactaaagactacacagacgggtacttcaacatcgacgccgagagaggcgagttgctacatggcggcatcactgtcggacgcgtcattttggttaacggtcagatttacacagagctggacgataccagttcaagcgcacctgtcgtctccggccccttcgggacaagagaagaggcgctcgatgatttgtgggacaacagggacgatgcgaatcagggcagtgagattttcgaataa

SEQ ID NO: 133916 - DNA, 399 bp, Enterobacter cloacae
atgaaatatgcaccagtggcactgacattttgggcggtttctgctaatgccgtatcagttgaggagcctaacactgtcgtgtacccacgatgcacgaaaatagatccggaaacataccaacggctaccaggctataacgttgttatggatataggtaacaaattcaaaattgtttctcctaacgggaatgctgttatttccttaccgcttggccaaagcgaaaaggataagaacatgtacgacgcctcagtcggtggagtctacttctctcgttaccacgttcaaccggatggtaattttctctactcagcctggagcgagaaagcgaaagttacagtgctatgcaatggcaaaagcggcgagcgccacttcgttgaccctgttcatttcgagaactga

SEQ ID NO: 133917 - DNA, 333 bp, Enterobacter cloacae
atgatgctgaaaatcaccgaatcgtataagacggcggtgatcagcaccgcccacgttacacagcatgactctgagtgtctgcctaatatctgtttcgacccactaacagatcgtggactgaattgggtacacggcacggagtacggatggattgtccgcgcaggtatgcgcggcaacgactggaaagaagagctgcgtgattacggcgtcacatggcaaactatcgagaatatccagaaggtaatggatgccggctttgacgcggtacatttcgactgtgacgctgatatagtcgatggtctggaaagttggacatggtggggtaagggataa

SEQ ID NO: 133918 - DNA, 237 bp, Enterobacter cloacae
atgttcggaaccgcaaaagacatcatcgaaaagctggagaactacccagaagacgagccgctgctgatggtgatgtggcacaaggaagatgtaggtgaagtgcgaccagacctgactgacgaacagtgcgttcaggttttgcgaaaaatcaaagagtgccatgacgccagcgtcggcgtgaattgggatgtcatttctgacacggccgacattctgtttccaaaggagaaggcatga

SEQ ID NO: 133919 - DNA, 204 bp, Enterobacter cloacae
atgaagacctatgatcgcaaccgtaacgctatcactaccggcagccgagtgatggtggcaacgaatggtgcaacgggagtcatcaaggaaatctgcggagaaggcaaatcagaagaacaattacgccgctctgactgcgtgtcaatcgaaggtgtggaaggtctattctgcccaatggatttagttcgcctggggttccattaa

SEQ ID NO: 133920 - DNA, 699 bp, Enterobacter cloacae
atgaaaaatatcctactggcatcattgttggtggcatcgccggtctcatttgcagccagctttgactgccaaaaggcttcgacagaaatcgaacacaaaatctgtgacaacgaacgcctgtcaaaattagacgaacaacttagcgcaacctattccagcgcgctcaaggctaacccagaaaatgcagacaccctaaagacggttcaacgtcagtggataaatatgcgtggaaaactcactgatgataaggctcttgagctggcttatcttatccaaattaatggactcaaggggttggatggttcggccagcatagcggtggtcaatgagacaccgaagccggtgcagaagcagcctgaagttcaggaaaagacaagcaaggcagacgcaaagcaggctaagagcggtgatgagctaactctggagtcattccgagctaagtatattgaagttgacggtgaatactacagcacgacatcccttcccagagggagttcgttcttattcacctgcgccagtcgcattgccgatgaccaagttaatgtctggaagaagtacgcagcaaaagagggcaagatcgaccttttctttgagcttgagactcgaatacacaccgcgatgctgaatgccaattttcagaagctgaatagtgatttgactaaaacaggcatttgcgatctgattaccgctgttccgtaa

SEQ ID NO: 133921 - DNA, 552 bp, Enterobacter cloacae
atgaaggtcgagaaattagatgttctttcctttgtgctgacggatctggaacgtctcgacccggtacgcgtaatgattgaaaactacgagccgggcaagggaagagtcaccatcacctgctatgggaaagcgtggactgctgcctggttcgcgatgggcggtgacgatgtgcagacgtttattaagcgagtgagcaacgattatttgattggttgcctcgaccctcaactgcgaagcacggtcgacgatgacaacgacgcaaatctgcttttcgtgaaatccgaaatcataaagttacgcagggggagagaaatcgacgcggaacaggcccgcaatatgtgggacgaggcagaaaacgctgatgacgtaaaagagagttgctgctgtttcggagtaggtaacgaactgctgagtttgtttggcgatgatccgtggtatgcaggctggccaacggtgccaaatccagcataccaataccttgagcgtattgtcagagcggtacgtgatggactgaaagtgcttgacgatcagtcgagagaagcagtcggttaa

SEQ ID NO: 133922 - DNA, 642 bp, Enterobacter cloacae
atgtcccgtatttccaaagcccatatgtttgccgctggcgctcatggcggcgttggccagaaaagaaaatataccggtgaagactacatcaaccacccggttgctgtccgcgagattgttgcctggcatggtggaaccgtagagatgcagatcgcggcgcttctgcatgatgtggttgaagacacccatgtcaccatagagatggttcgtgagcacttcggtgagcgcgtagccgaaatggttctggctctgaccaacattgccagaccagaagacggcaatcgaatacagcgtttcatcatcaacgtccgggagctggagcaaagcctcgacatgcagacgcgcatgatcaagctggctgacctgctggacaatacctcttctatcgtgagtcgcgaccctgagttttcagccatctacctcgcagagaaagagctgatgctggccgtactctttgacggcaaggagattggtgccgatgccggtgttgtcgagtacctggagataaagggcattgagcattcgttgctgataaacgcccgggcgatgttgacgaaaggcattgccagtctgcaaccggtacacaccaaacgttatgaaaaacacaaagcgctgatctggaacgcgtgggaggctgcatga

SEQ ID NO: 133923 - DNA, 372 bp, Enterobacter cloacae
atgaagttgggtaatgccgtttcgctgttttttacagcattactggaaggtttcaattatcgcttttgtccggtctgggataaggcgctggatacgcttattgaggaaggaacgctgcttgaggtgcgaaatgggatcgcgctgtttgagcgcgacgcacagctatatgaagttttcgtcggggctggcttcagccacttcgggcatcttattagtttgaataccaaagccatcgacgagagcgtcatgcgccgtccgtcgttccgtgtaatggataagctgcaacgtcatgtaaatgccgaattactccacgtagccaaaggaaaagaacgagagctacaggcgatgattggatcgcttatcgctgagtaa

SEQ ID NO: 133924 - DNA, 282 bp, Enterobacter cloacae
atgaatgacctgcttgtcgagcgagtctccgcttttgttaagtccccgctggacaatcccctcacccgcggtgagcagatggagctggcaaggtggtttctgcatatccatgagcagatggaagtttttaaacagttgccggatctgcccattacagacggccatgttcagcaagtgattaacagccacgaaaaaggctgggcgatgattgtgccgtgcaaaattacctacgagctggctaaggaagtgcaggctaacagagcaaggagtaaggaagagtaa

SEQ ID NO: 133925 - DNA, 690 bp, Enterobacter cloacae
atgtgcgaaaaatcgagaattacattcgccagcgttgatcaggcgaagctgccatttaatttagtgctacaggggaacgcaggaaagcctgccggaaccatcaaaatcgacaaggggcttgtgacgttcgaaggtaactttgatgaatcggcgcaggtttttatcgaatatctggcacgccgttggagccagcagtggagagacctagagaaacgcgccaatgagtttgaccggttcatgggcgcaatggacacagcaaaagaggctctggctgccggcactccgttagatctggagtcgcttttcaaaggagagatggcctctgcgatgttcgccaccatgttcgcaggtgagttcgtccgcagcggcgccagaaattaccttgagctggggtacaacgttcctgaaatgggcgagtttaccgtcaccatccagcgcaaagaaggtaagacgccaggcgaacgtatcgctgaacttgaggccgttgtggatcagcgtaacggcgagtgcgtccgtttgatcaacgaacgtgatgcgctgcgcgaagaacagctgaacaaaggctcgaacacacgcgcggccgcagacatttacttccagttagttgaggaatgccagatcccgccaggcggctctttggttgagtatgttcgcgaattgcaggagaaagcagagaggtgcgcggcatga

SEQ ID NO: 133926 - DNA, 1686 bp, Enterobacter cloacae
atgaatacagccctttccatcattgacgctatcaccccaaacactgatatcgactaccggcaggaaatgaacgtcatccacgaaattgtggccgagtgcgagaaagagatcgccttcatgcatcaggttcacgacttcgtttatggcgacgaacgccacaacatgattaaccgcctgctgcgactcaaccaccggccggatgacgagcgcacacgctttaacagagcctggctggacaaggtcgaccttgaatgggtgaaacagaatatctgggccgagtactggaagaaggtcacggatatgacaaacgttctgctgatcatgccagcttcccgccgcgacgagtggcgtgagcagtttatcgagggcaagcaggagaccatcaggactgacagaaccggctaccagatgaaggttaaggagttcgttggtgtgccggagttcaaagcagaaacggtcatcccaacgatgctcaatctgctgaatgacaggcacaaatatctctctgagcgcgtgtatggcttgtttaaagcgctgagtcctgcccacaagaccaacaagacgaacggctttagcgagcgtctgatcatcgccaactgcatttccgagttctggcgggacagcgtgagcgtgaactaccggaaagaggactacatcgacgacctgcgcgtcatgcttcatttcttcgcgcacaaagagttcatcaccatcaaccgcacaactgagatgctatcagctgcgtaccgggcaaacgactgccagaccggtgactggatgaatgtcgacggaaacctgatgcgcgtgaagatgttcaagaacggcaacgttcactttgaaatacatcctgacgtggcctggaagctgaatgaggtgctggcttacagtatgcctgcagcaatcccggcgccatgccgtactgcacccaaaacacgggcaccaaaagagttcgggttaatccagaagacgatctccgagccggttcgtaccgcgctgcgcgacgggcgattcagcaaagataaaggcgtctggtacttctctgattccaacctccagaagtcgcaggtggaagagcttgagcgcacactgaacttcattggcggcgtgcaggagaaaaagcactggcagttcccgtatgagatcggccatacgctcaatacgattgtggccaccggcttaatacctgatacgaaatcacaccagttctaccctaccccacgtttgatagcggagtacgttgccagagcaatagagctgaagccaggtgagaagctgctggagcctgaagccgggcgcggagatctgctggcctgcatcgacgccaatccggaagacgttacctgcatagaagtcgcacctctcttcgctgatatcctgcttggcaaggggtacacaaatacggtctgctgcgacttcatgaagtggtctgaggacaacgcaggttatcagttcgacaaaatcgtcatgaacccgccctactctcttggccgtcacagagagcatacgctggccgcgctggagcatcttaaagtcggcgggcgactggtggctgtattgccgggtgatgcgccagttctgaactggatgtcgctggataattacgtttatgccaaagggaagtcgtttactgacgagtttgaagacaccggaatcactgtcagcgtatacgttttcaaacgtgtaaaatga

SEQ ID NO: 133927 - DNA, 573 bp, Enterobacter cloacae
atgtgcgaaaaatgcaaaaaaactaatgccaaagttgaaagcgtgattaaaaaagttggtgcggccgaactggttgagatcatgggtcttgtggttggtcacgaagactacgcctcccctatcgaccgccttttcagcgctctcaagttctctagcatgattgatgatcctattgaaattgtgatgctggcgcgtcatttcggcgaagcgtatctggaagagaaagaacgcgccgacaaacttcaggcaactctggaaatggtaagcaagccgaagtgctcaccggattcagtcaaggcagatgaaaccaacgccagcaaagatcgtgaaatcgccgggttgaagtcttctctggcgatgttgctggccgctttcaaactgatgtcttcacagtctgggttcaaaatgcctgagctgaacagcgacgatccgatggccgttcgccagctgctgggggcaatggccgaccagcttgacgacaccaagagtcgtcttgaagacatgatgcgcgagcttacgcatcgccacgacctgaacaaacagccgcacaaaacgcagcacgtacaccactaa

SEQ ID NO: 133928 - DNA, 189 bp, Enterobacter cloacae
atgaaatggagcttccagaaagtcatcgagatgattgttggcttcgccatttttctgcttggtggctggatcatgaatctggtgaaactcgtgaacggtggcgatcttcagtttgatgccggaatgacacttgcgcgtgtcgtgggaattttcgttgttccggtgggtagcattctcggatttttttaa

SEQ ID NO: 133929 - DNA, 495 bp, Enterobacter cloacae
atggcacgtcaaacgcctttcacttctttcaataaacgtccccgttcaattcgcctggttctggccgagctgtttagcggttgtgtttctgcacgccttgcggaactggaagaacgagtgtttgagctggagaagcgcattgatgcgcaagctaccgccatagcaaatctgggcgcgacagtaggcatggagaaggtgcgtgattccgtcgcctctcgtgtgttgcgtgaatcccaggcacacaaggacagttctcatggaaaattttcaacgaaatcgactgaagccaatggcctacggagtaattttagcaaccctggcagcggtagccgtaccagccggtcagagtctgttgataccggacacaactacttccactacaaccctgcagacgacaccactgccagaacgaccccctgtctctctggatgggatgctgctggacacgattccagctcgacctgcaactccggatcttccttctgctgtgactga

SEQ ID NO: 133930 - DNA, 603 bp, Enterobacter cloacae
atgctaaccttctggcacgaatattcagatctcatctccgcatttttagcggctcttttaggtggctgtttcacgatgaaaggagtgacagctcaggtgaaacagcaggcaaaacagcaggcaacagcggccagagagaagcgtataacaacgctattgggtgtcagagaggaaatagactcactgattaagttgtataaggccagaattgaagaggaaatcaaacaatacgaccggaactcaccgttcgataacattttccccattactcaaaactacttcactttctatgaagctaactcggcatctctacctgaagttcatagagaaacactatcaaaaattgtggctttttatacaagcgcaagaagcctaattgattcctatcgcggtaataatgcccttatcgaaaggctggactccacgcaggttgccagtgacattactggcaacaaagagcatcttgcacacctgaaaagatacacaatcctagccacagagtacggccgcggattaatgatgattcatgaagaggtcatgctgcgctataaacaggttatagaagccatcgatggtgaaatctcgcagctacaatgcagttag

SEQ ID NO: 133931 - DNA, 231 bp, Enterobacter cloacae
atggtatacccgacgaacgtcgtagcgctcgttgagagcgattttctgaccaaagtacgcgacatgatgaaagatcgcgataaggctttcagtctctacgaatggtcgctcaagtgccttcactcaggtgagcacaaagagctggtcgagcagctgttaggggaactcatcaatgaggtgtttgccctgaacgtccagcttcatggtcgagaaaataatcaatcgaaataa

SEQ ID NO: 133932 - DNA, 594 bp, Enterobacter cloacae
atgatcgcagccgaaaaaatcaaaaagcgagagcgtgatgcctctcttcgcgacctttggcgcacaccgcagtggttgtttgtcgccatccaacgttacataggcgtaaagttcgatgtggacgtcgcctgcaacaaagataacgctctcctgccgaactttatcggtgttgagcgtgatgcgctcaagtgcagctggggagaacctggcactgtggcgttccttaacccgccctactccaaaattaccccctggatagacgcagccattcgcgagcaggcgcgtggagtgacgacggtcatgctgataccacaatccctcgatacgcagtggtacgagcgtgcggctgaatgcgccaacgaaaccgtcatcttgtctggcggccgcgtggcgttcgttgagccggatgttgaacttgggctggtggaggtgaacatcaaccctggtggcagcatgttgcttatcttccgtggctgctgccaggaagctgggcacaccatcagcaagataccgctggcggtgatgaaaaagctgggtggttatgatcctgccaatgttgtcaggaagaagagaccacgtaaaaaggcagcgtaa

SEQ ID NO: 133933 - DNA, 843 bp, Enterobacter cloacae
atgagcgcagttaccaacactgttaaaaacgatgacctggatgaactgacagcaatgctgcaatctctcgacgaaccagttcagaacgctgcgaaaacgagcggtgtcgacgagatcgacgatcttctctctggtctggacggtgcaatcgcaaaaccagtcgaggcggtggcggatgaggtcatgaatgcctgctctaccggcgatctgagtagcgttctggaagagcttgagattgagcacgaatcggtgaaagttgaggaaccagaacgtgaccttattgcggaggttgtgaacgagacagtgcctgaacttgacgctcgaagtactgagactaccggtacagatccaacccctttaccttcagtggcgtcagagcctaaacctgaagaagagcagccaaaacgccagaaggcaaaatcagagcgtacaccggccaaacctcgcttcacgctggaaggtaaggacgaatcgttctatgcgacagccggtctggaaagtgagagctttactgccgcattcgaaggggcgccagtcaaagcgaaagacaagatcttaaaccttttgaactggtttagtggtgggccggaaatcagcgtctacacggtaatcgcaatgcgccatatccttgacgcgaacacggcgaccagcaatagcattaaaatggcgctaatgagcaacccggagaaaccatatccgctcaacaccgcttcgactcaggctggccagatgatggctgtgtttccagctactggcattgccaccagggaaggtggaaatctaacccttaataaagagtcgccgatcgtcaaaaaattcatagcggagtattccattggatga

SEQ ID NO: 133934 - DNA, 1107 bp, Enterobacter cloacae
gtgaacattgatgtaaatgccattttgaacgatgcagtaaaagatatgccgatagctaacatcatcgtgataggaaagactggtgtaggaaaaagttctctcattaatagtgtatttcgtggagactttgcgagaactggggtaggccgccctgtaacagaaaatataaaagtaattaagaaagaaggcgtcccattacaaatcattgatactcagggactggaagtcgcagattacgataaaaccagattaaacattgaaaattacataaacgaacataacaatagcgaagaatcagagaattacgtccatctcgcttggctatgtattaatgacaccggtcaacgttatgaaaaagctgaactaaacatagccaagtttttgataagtaaaggaataccggttatagtagtactaacaaaaacaaacagcttcaaaaacaatgaatttgcgaaagaagttgagattgcatttaaaaactatagccatgcagtctgtctgactcgtgcgattgaagaaacgatttatgatgaagatgaaccagatgaaatcataggaaaaagaaaggttagaggcatagatgatttaatccaaacatcgtatgaggttattccagaagcacaaaaaaaggcattttccaatgctctttcaattaagaacaaaaaagcattggatataaaaaaagagcaagctagtaaagaggttattgccgcaacagtcctcgcaggtgcggccgcagcaaccccagttccattttcagatgcatttaccttagtgccaattcaagtcacaatgattgcaaaaatcagttatacctttggaatggatgtatctaaagcggcattaacaacaatggtaacgtctttaataggtgctggtggtgcagtttttttaggacgaacaattgtcacagggctattaaagatgatacctggtgtaggaagcctcgttggaggggcgatttctgcaacaacggcaagtgcaatcacaaaagtcctgggtgatacatacgttctggttctgtacaagctcgcaacagagtctaaaaccggagaaattgattttgaaatggcagccaagttactgaaggcaaaagtttcattttaa

SEQ ID NO: 133935 - DNA, 543 bp, Enterobacter cloacae
atgaccacgattgtcggtggcgtcgatattgagtccacagggctggacttcacatctggccacaaaattatcgaaatcgcgataacccgttatgaactggaaacccagaagcacatcgacagccttgagatgcgcttcaacccgcgtcgcagtatcgatccgaaggcgcaggcagtgcatggcatttcactggaagatctggcgacggaaccgctactggctgaccacgcaggcaagattgctgcgtacatgggcgcatgtagcgcgttggtcgcccataacggagaggcttttgaccttccgttcattcgccacgagttcggtagctatggggtgaaattgccggatatccctctggttgacactatgctagatgggctgtgggctaccgaagatgggaagcgtccacgcctagaagagctggcgttctcacttggcttcacttacgaccgtgagaaggcccacagtgccctctacgatactgagctgatgatgcaatgttttttcaaagctcgggaaaaatatggttttttcgatttttaa

SEQ ID NO: 133936 - DNA, 420 bp, Enterobacter cloacae
atgatagacgaacttcccctctcggatgaattagatcgtaaagcgattgaagcactgatccgcattgccgacgaacaatcccgctctttgatgagtgaacgtgaagcacgtctggctatccgcgcagtgtttgagtccgttcaagggcttgttggggaagaggttggcgaagccatcaatgtggcgatgtcgcagttcaatggcggcaccaagcgccctctgtttcctatgcacctcgaactctcaggcggtacggttctgtacgtgtccgtttgcctggagaccaaccaaatccagatcctcaacacatcaacgggcgaatggcgcgagccggtcgtctgcgaaagtggcgaggacgcactgaaaaaggctgctcagtttgtgcgtggcgcactgctgaaaggcgcgaagaagctgtaa

SEQ ID NO: 133937 - DNA, 645 bp, Enterobacter cloacae
atggattaccgaattggaatcactggcgcacagggcagtggaaaaacaaccctggcaaggtacatcgatgcgcattatggcattccgtatgtggatgccggcgttggcaagctgatgagcagtctgggggtgaaggttggcgagcgtttgcccctttacgaacgtcttcaggttcagatggagattgccagacacatcgagatgatcacccgcggcgttgaaggttttgttatcgaccgcacgccagccgatgtcatggcttatacgcttgacctggtcggccagaccaacgaagaccgctgcatcgagctggctctcgacattgagcagttttgccacaaagcggccatttccaacttcaatgctatcgcgggtcttcgcccgggcgttgagctttccagcaaagatctcgcgcgtccccagcgaggatcgcttgaccgtctctatgttgctcgcatcgatgcacttatgtgcggtgagctgacgaaaatcaacacgcttccccaaaccggcgatctgcaggtgttcgttatttctgaaaagtgccgcacggttgaagcgcgagccagatcggtattgcgagtgctggacagagccgctgaaaacatcgagcgccgtataacaggacgagtgaccttccactga

SEQ ID NO: 133938 - DNA, 477 bp, Enterobacter cloacae
atgaagatgattgcagctgtcggccgcaactatgaaatcggcattggcaacgaacttccctggcgttgcccgaccgatctgaaactgttcaaacaactcaccaaaaacgccactgtcgtgatgggacgcaagacgatggaaagtctcaagcgcccgctgccagagcgccataacctcgttttgacgcgctctcgtgggtatatccccaatgggttctaccccgctggcatcgatgatgttttgagactgccagatccggtctgggtgattggtggcgggcagatttactcgctctttatgccacacgtagaagagatctggctgtcgcatattggcgtggatgtgcctggcgcggatgcgttcttcccggcgccaatgatgcgttctttagggttcgtaccagtcgaaacggcttatacccaacgtgcaaatgaggatgagcctggctttttgcagatagtatacagaaggtcgtaa

SEQ ID NO: 133939 - DNA, 396 bp, Enterobacter cloacae; identical to SEQ ID NO: 112330

SEQ ID NO: 133940 - DNA, 1104 bp, Enterobacter cloacae
ttgtctatcctactgaatcgagactttacgaacggtcagtttgccagtggttcgtatgccaaagtggttgaaacggtgctcaacactggcgttcacgcgggtgatcgcaccggaaccggcacaaaaagcgtttcatatgtcccttcctactacatgctgacgggcggctctgttccacttatctccggaaaagccgtcaacctgaagccgttactggttgagctggagtggtatctcaaaggaacgggcaacatccagttcctgaaagacaatggcgtcaaaatctgggatgcctgggctgatgaaaatggcgatttaggcccggtctatggcaaacaatggcgtcggtgggaagatacccgcatcgtgagccatagcgagtatttgagcaaaatcgacacgttccgtgagcgcgggtacaaggtcgaggggtatctgggcgtaagtgaagatcgcgttgtgttgtcccgtgaaatcgaccagctacagcgtatcgttcacacgcttcgcaccaacccgacagatcgtcgcatcctgctgaatgcctggaatgttggcgaactggaagatatgaagctgccgccatgccatttcgtgttttcactgtggagtcgcgagctggactttgagactcgactgacgatggccaccgacattggcatccagcacaaccgccacggccacgaatccatttacacccagatgctgtgtcttctggaaagagatggcggcattactgagaacatgctggacgagctgggcatcccgaaacgcattctgaactcatgtctggtgcagcgcagcgtcgatacctttgttggtatgccgttcaacatcgccggttacggcattctcacccacttcctcgcgaagatcaccggccacatggctggcgcattcgtgcattttggctttgacgttcatctctacgacaaccacatggaaggcgttgaggagctgatgaagcgcgagccgcccaaagagtccgacccggttgtcatttttccgcatgaatgggccgaactggacgacttcaaatgggaaggtgtgcaggtgtgcggctacagccctctcccgtggatcaaggttccagtggcggtgtga

SEQ ID NO: 133941 - DNA, 879 bp, Enterobacter cloacae
atgaaatttacgaaactgaccgatcatctgaaacttgccgcagacaaactcgtgggatttaagccagagccttacgagttgaatcccggttttggcaaggcaacggaaagcatctacctgatggttgaccagttccacacactgtttcagcacccacgccgtgccattccagatccggcactactgcgtctgcgtgccaagctgatccacgaagaagctgttaccgagggcatcacggcagctaaaaacggggacatgacggcgctgctggatggtatggctgacttcctttacgtgggcgtcggcacaatggtggccatcaaaggcggtatctctacaggcatgagctactacacccaagagcagagtgttgatcgcttcatccacaccatcatggttccgggcaacacggtctttgacgatatggctatcccgtttgaagaagcaaaagaagctgcattaatgctgaatgcgctggctgacaaactcgaagcgaagccgattagcgattccgaattggtgcaggagctgcgccgcgtgatgaataaaatctacgttgcctgcatgatgacctaccgcctggctgattttctcggtatcgatattgttgagctggtggcagaaatccatcgttccaacatgaccaagctgtggccggctgacgccgaagagcgtcgtgtggcggtagagaattgcaaatacgacaaggaagatctgggcttccgccacgctgaagggactgacatgatgattggcttcagagtttctgatggcaagatcctcaaatccccaacctacagcgatgtggatctgactcgctttgttgagaaggcgaagtcctcatctctttacgagatgctaaaaaataattgtaagtga

SEQ ID NO: 133942 - DNA, 1143 bp, Enterobacter cloacae
atgacttattctactttccgtttgggcgctaacgacgcaacgaaggaacctatgttcctcggccagcctgtcaacgtagcacgctacgatcagcaaaagtaccgtgacttcgaaaagctgattgagaaacaactctcgttcttctggcgccctgaagaagtcgacattaccactgaccgcatcgacttcaataccaagctgcaagagcacgaacgccatatttttctgagcaacctgcgttaccagacgctgttggattccgttcagggtcgcagtccaaacgcaacactgctgccgctgatctccattcctgagctggagacatgggttgagacctggtcgttctctgagacgattcacagccgcagctatacccacattatccgcggtatggtggatgacccgagcatcgttttcgacggcatcgtcacggacgaagagatcatcagccgggctgtaagcatctcaagcgaatatgacaggctgtacgaaatgacctgcgctcgccagcatcttggcgaagacgaatttgaacggctgtatgtcagcgagtttgatggcaagccctaccctctccagcgccagctgttccgaacactggtgtcggtgaatgcactggaggcgattcgcttctacgtgagctttgcgtgtacgttcgcctttggtgagcggaagctgctggagggcaacacgaagatcatgcgctttatcgcgcgtgacgaggctttgcattgcgaaggtactgaacgcatgatccgctttatgcgtaccggtcgtgaaggtctgatgtggaagatgattgccgcagaagaagagagcttcatctatcagaccatgatggacgtggccgggcaggaaatgcgctgggctgactatctgtttaaagacggctcaatgattggcttgaatgccgacatcctcaaaagctatgtgaaataccgcaccaacctggcaatgcgtcgtcttgggctgcgaccgctgttcccggaaatcaaagacgatccactggtatggatgaacaaatggctgctgtcagacaccctgcagatcgctccgcaggaagctgaacaaagcaactacctcgttggccagattgactccgctgtcgatcgctccggcctgagccagttcgcagacctttaa

SEQ ID NO: 133943 - DNA, 2316 bp, Enterobacter cloacae
atgataagcatcgtaaaacgtaacggttccactgagccgttgtcagaggaaaaatacaaccgcgttgtgatgtggggagtcgaaaacattcgcaacgttagcgcgtctgctgtcgctattggcgccgctgccagcattttcgacggaatgaccacctgccagctgcatgaagcgctggtgaagtccgctgccgatctgatctctccggaaaccccgaactactcgcaggttgccgcgcgactgagcctgttcaagatccgcaaggacgccttcgggcagtatgactaccccaatttctacaatcacatcgtcagcaacgtcagccgtggcgtttacgatgaagaccttctcaagtactactctcaggaagaaattgccgagctgggcgtgtacatcaagcctaagcgcgacgaatacttcggctatgccgccaccgtgcagctggcgagcaagtatctcgttcaaaaccgtgtaactggtgctatctacgaagggccacagcaactctacatgctggtcggcatgtgcctgttccagaattgggaagatggctgcgccggtaagacgcgtctggagatggttaagggcttctacgatgtgaccagtacattcaagctgtctctgccaacgccaattatggccggcgtgcgcacccctactcgccagttctccagctgcgtgctgattgaagctgctgatagtctgaaagggattagcgctgcgtcttccgcaatcatcgactacgtgtcacgtcgcgctggcattggtattggctttgggcgtctgcgtgcgctgggcagtgagatccgcaatggcgaggccacccacactggcgttattccattcctgaaacacttccagacggcggtgaaatcctgctctcagggcggtgttcgcggcggcgctgctacagcgttctatccgatctggcacttggaagttgaaagtctgctggtgctgaaaaacaaccgtggcattgaagagaaccgcgttcgtcatctcgactatggcgtgatgattaaccgtctgatgtatcgccgcctggtgcgcaacgaaaacattacgctgttcagcccacacgatgtgccgggcctgtacgacgcgttctttgttgatcaggacaagttcgaagagctgtacctgaagtacgaagccgacgagagcatccgtaagaaatctatcccggccgtcgacctgttctctacgctgatgcaggagcgtgcctccactggtcgtgtttatattgccaacgtcgaccacatgaacgatcacggcgcattcgttccggaaattgcaccggtacaccagtccaatctctgtatggagatcacgctaccgaccaagccactggcgttcactgacgatccgaacggggaaatcgcgctttgcaccctgtctgcgttcaacctgggcgcgatccgcacgctggactcactgaaagacgtggcgttttacgctgtggcggcactggactctctgctcgactatcaggactacccgatggctgctgcagaaataccggctaaagctcgtcgtagtctgggtattggcgtgaccaactttgcttactatctggcgaagaacggctttaactactctgatactgcgggcaaccagctggtgcatgagaccttcgaagccattcagtactacctgcttgatgcgagctaccgactggccgaagcgaaaggtgcatgtgactggttctcccacaccaaatacgcacagggccagctgccagtcgaccactatcgcaaaacgctggataccaatccggagacctctttcgagctgaaaatgccgtgggaagagctgcgtggccgtatccatgagcatggtcttcgtaactcaactctgaccgctcaaatgccgtgtgagacgtctagccagatcaccaactccaccaatggtattgaaccgccccgcggcccggtgtccgtgaagtcttccaaagacggcatcgtgaagatggtcgttccggacttcgcgcaactgaaagaccagtacgagtacctgtgggatatgccggacaaccgcggctatctgactaaggtggccatcattcagaagttcttcgatcaggccatctctgcgaacaccaactacgacccgactcgcttccctggcgacaaggttccaatgatgaagctgctggaagacctgctgtttgcgtatcagcaaggtgtgaagacgctttattaccacaacacgcgtgatggcgctggtaagcgtgatgacgacgatcaggtgtccgaaccttccgctgcggaggttgttgatccagaagatgagtgcgatggcgcgtgcaaaatctga

SEQ ID NO: 133944 - DNA, 570 bp, Enterobacter cloacae
atgagtaaaaccattcgtgtggtcggcgtcgacccttcaatgagcaactttggcctggcgattggcacgctggatctggaaacggataagctggacattcatggcctgacattggtggaaaccaaagctggcggcaacaagaagacggttcgcgtaaacagcgacgatctgcgccgcgctaatgaaatctggcgtaccgccaagcccataatcgagcaggctcatatggtgttttgcgaattgccggttggtagtcaatcgagtcgctctcagacctcatacggcatctgcattggcgtactggcgtgcgtggataagccactgatacaggtcacgccaaacgagattaagcactatgtcgggaataagctgaccacgtcgaaggaagagatcattcagtgggctacgcagaagcagccaaacgccccgtggttgcgccgtaagcaatctggtaaggaagtgctggtgaataaaaacgagcaccttgcggacgctgtcgcgtcgatttacaccggtatgcaaacagatcaattccgtcaggttcgcgatgttcttgcaggaattttataa

SEQ ID NO: 133945 - DNA, 747 bp, Enterobacter cloacae
atgtcgtttaacttgagccgcacgcagtttttgcaaatgtttgccgtgatgcagtctataaagctgataaaccaccatacggcaaaagcagctgcacctgcacttttgtggaaaaacgaaaatatcaatgacgaccagttcgcggtattaaccagtctgttgtcatcgactccgttaatgccgagtttgtctatgctgccgtcaggaagcactgcgccgatccttattaatccatttacggaaggtggatatctcccacattctgggccggggttcgttgtgattcctgaaaccggaacgctgaacatccaagaaaatgcgctcttcaatgcgatggagacgcacatcagcaccgcattcactaatctgattcgacacgctaacgcacgcgcggatcacgttgcaatgccgggtgctgccttcgccagcttctctgttgactatgaccggcacgcgccaatttcaaagcgggcgaaactctgcttttacgaggagggatgtgaagtagcgattattgaagttcttctcccccatgtattcagcgcgaatgaaacggctgcacaccatctgatcgacatcatgcggcatttcatcggccagagcatgatcgatgcagacattgctgcaggcgttctaaccaacgatagcattcacgttgttagtgacattccgaagccgccaactcgcgagccggaaaagacacttgaacagaaactaatggaatgcccaacctgggctacgtggtaa

SEQ ID NO: 133946 - DNA, 1917 bp, Enterobacter cloacae
atgaaatttctaaagctccaggttgagaacttcatggcgttagccagcgccgaagttgagttagaccaacgcggtctggtgctcattcagggtgttaacagtggcgactcttctgctgccagcaatggtgcgggcaaatcgactttgatgaacagcctgatgtggtgtctgtatggcgaaactgcgcatggcgtcaaaggtgacgacgtgctgtctacaggtcacgagaaaaactgtcgtgtgatggtgactgttgaggatgaaggaaagcgttacgccatcattcgccaccgcaaacacaaagagttcaagaaccggctgatcgtccgtggcgaagacggtgatatgaccaaaggcaaagacacactgacgcaggagttcgttgaacgcctgattggtgcgtccaaagaggtgttcatggcgtctatctacgccagtcaggaagcaatgccagatctgccgggtatgtctgacaagaacctcaaaaccatcgttgaagaagccgctggcgtcgaccggttaacgcgagcctatgccattgctcgcgagcgtgctaatgcagctgccgcacgcatggatgttacaaaatccaaaatggacgcctgtctcacgcttatcgagaccgcgcagtcagagattgaggcggccaaagcgtcctctgatagttgggaacgcgatcgcggcgaacgtctggacaaggcccgtgtcgatttggctggcgcggaggtaacgctgtctgaagtcgtgatggaaattcgctcgctgccggaacagatccgggatacggaaaacgcgattgctggcgaacgcagcaagctggcctccaaagaagagcatgacgccaaactgctgaaggtgcgcggtgcgattacggagatccgctcaagcatccgcacttcagaagcggcacagaacgagtcgatgaaccgtgctcgctcgtttaaaaccaaagcagaagaggtcagcacaaaggtcggagcaccttgtgttacgtgcggaaagccctactgcgaagaagatttgtccaccgtgaaggagagtttcattgaacaagcgcgtaatgagatcggccaggcgcaggcatcagcagcggcagtggctcaacacaaagctcgtcttgagaaagcgctcggcatcgagtctgcactggtctcagccacacccgacgtctcagaaatcatcgccagaatcgaacgcctgaccaatgagctaagtgcgctgcgtcatcgcgaacgtgaagttgtggccgtcgaagcgatggtggcgcgggcgcgtaccgacatgaatcgcattatggcagaggtaaacccatttctggccgttattaagcgtcatgaagacaacctggctgccaataaatctaatcatgcagtacttaaaaatgagttaaagagtattcaggaacaggctctgttgctggagaaagctcgccaggtttactccccagctggtgtgcgttcacacatcctgacctctgttacgcctttcctgaacatcagaactgcggagtatctcaacacgctgtctgacggcaatatcgttgccgaatggtcgacaatggagacaacgaagaaaggcgagtatcgcgacatattcaatatcagcgtgaccaaaacaggctccagcaaatccttccagacgttgtctggtggcgagaagcgtaaggtgcgcattgcgtgctctcttgccttgcaggatctggttgccagtcgtgccagtaagaatattgagttgtttatcggcgatgaaattgacgacgcgctcgacactgccggtctggagcgtctcatggggattctggaagccaaagcgcgtgaacgcggcacagtgatgatcatctcccacaaagagatgaaatcgtggttccgggaaaccatcacagtcgaagtcaaagagggtcgcagctatgtcgtttaa

SEQ ID NO: 133947 - DNA, 162 bp, Enterobacter cloacae
atgttccacaagccctacccacccaacggaaaccctgtggcgttttacctggggagactgagcaaacaaggcgtactgaaacgcaggtctttcccagcccacacggagtttcaactgcgaaaaggccagcatttgaatcaaaaagttagaggcattgtatga

SEQ ID NO: 133948 - DNA, 1086 bp, Enterobacter cloacae
atgacattgccatacggggtgatatcagatccccattatcatcgttgggatgcttttgcgacaacaaacgctgacgggctgaactctcgactggagatccaactggacgccacgaaagaagcagccaaagccatgaaagctgcgggctgtaagtacatgctggtggctggtgatactttccatgttcgtggtgctatatcaccttccgtcctgcatttcgtgactgaaacttacgagtggatcatcaaagagttgggcctcgaagtggtaatgctggccggcaaccacgacctcgaaaccaacgattccgtatacagcgccaatgcagcggcctctctgcgctcaatcggtgtggaaatcgtctgcggcaaacgtcctcactccatcaaaatgggcgacgttaccgtccatctgattagctggcgcaataaccacgcagagcttatcagcgacctcaaaacactgcgttccgggctggatggcgacaaccacgatgtcgttgtgcatacctcaatcaacaaagcgatccccacaatgcctgatgtcggcatcgacgcacaggaactgaaagatatcggcttccgtttgttgctgtccggacactaccacaaccacaaagaagtgctgcctggagtggttagcatcggggcgctgacgcaccagaattggggcgatgttggctcgctggctggcttcatgatcgtcaaccctgacggcacattcacccaccacgaaacctccgcacccaagtttgtcaaccttgaggacgatgtggaagacgaccaaattcgcggtaactacgtgcgcttccgtgccgttgtggagagcgatgaagagggcatcaaaatccagaacgtcctgaaaacaatgggcgcgaagggtgtcgtctgcaacttcatccgcaaggcatcgatgatggaaggcactgccagtactgcggagaccagcaaaatagacagcctgggcgagtccgtcgcggcgtactgcaagatcgttcacgacactgacggcggcttcgacctgagcaagctggacatgctgtgtcaggagatcctgaccgaagcggagagtgcggagacaatgtga

SEQ ID NO: 133949 - DNA, 504 bp, Enterobacter cloacae
gtgaaacgcgtaattattgggacgatggccattgctctgatcggatgcgtgccaaaaccgcctcaagatgaaaagtcagctggcgggtacgttgatatttactccacttcaagcgtagctatcgcccaggacagagccgacaaattgtgtggaagccatgcctattatgtctccaacgacaatgatttaaccaaagtcatgggtagatacgcgccttcattcccaaaaatccgtttcaactgtgatcttgaaatggccgcttatctcggtagcaaagaggcaaaggagatcaagatgaagcgcatagaggaagcctacaaggagatgtacaaggcccaatatgagctgaaagaagtgcgccgtaagaacgctgatccgaagaagctggagtcctacacagaacgcgatccggacggcactattcgcagctacagcttcttggacggtaagtcgtgcgaatccatggtatacccagacggcactggcaaaacaacttgcgattaa

SEQ ID NO: 133950 - DNA, 495 bp, Enterobacter cloacae
atgagtgaattttattcaagagcagcgactgtggcagacatgccatttatcatgggtgagttcgaagacggcgcacgcaagggtcacttctacgaagagatcctcacatcaaaggggggtaaaacctttgagaagcagaccaagctggcaatcaagacgaacgagcagggtcaatactccgggcattatatctacatcctgctgcgccgttctgatgacaaaaaagcagggctaatctggttctgtgccgcactcgatccaaccggtgcgccacgacttgaactccgtgccgtcagtatcgtcaaagaactacgcgggaaaggctatgggtcaatgctggtgtcagacatgatcgattcaaacccgagccagccgatgatggcgaagtgctacgtcaaatcctcgcaaatggccgacatgctaaaacgcagaggttttcaccttttcgacacgtcccccaaaggcacgcagatgctgtttcgcgatccaaagtaa

SEQ ID NO: 133951 - DNA, 645 bp, Enterobacter cloacae
atggatctcaaacgcacgcgctgggttcgccgtcttgaagatggctcctacaccattgaatcgaacactagcctgaacaaacagaagttgctctgcgacctgtgcggcatagcgtcgaagtgcccgattaacgaaacccggctcaaactccacgacgccggtgcgcacttccacctgaacagctgcatacgttacgtgccactgctggcatttcgtaaaccgatcatcggattggacgctccctacttcaacacactccgctctggtgtaacatggcgggaccgggtcgagcctggcaaactcgtttgtctggttgaggctgatactggaaatatcatccgattcgggagagtcgataaggtctactccggcccggtggatgagatgctgcgaaaacacagccggtttaaccatccctgcatgggcggagagaagatcgagaaggttggcgaagtgatccgcaaatcctacggacacttcctgaacgacgacagccttctcacggccatctacattcgccatgtcgatcgggagttcgatacggagtatcacagtgctgaagagttgaatcttgtcgaccctcgcccaagagctggagtaatcgacatcagcgttgcgcgtcagaagccctctgagacgttttaa

SEQ ID NO: 133952 - DNA, 1056 bp, Enterobacter cloacae
atgagcgaaaacggcaataaaaacatagcgatcgttgaagcattctcagaaacagacaaaaagaccggcgaagttgttacgttagttcctaacaccaacaacacagttcagcctgttgctctgatgcgtcttggtctcttcgttccgacgctgaaatcgaccgccaggggcagaaaggggcaaatggtctctatggacgcctctgctgaactcaaacagctgtctctcgccaaagccgaagggtacgaggacataaggatctccggcgttcgtctggatatggataacgacttcaaaacgtgggtaggcatcatccacgcgttcgccaagcacaaggttgttggcgacactgtcacgttaccgttcgtcgagttcgtcaggctctgtggcataccaacggccagatcgtcagcgaagttacgtaagcgcctggacagttctctgactcgtattgccacaaacactatctcattccgcagtaaaggctctgatgagtattacgtgacacaccttgtgcagacagcaaagtacagcacaaagaacgacacggtctcgctgcaggctgatcctaagattttcgaactctatcagttcgacaaaaaggttcttctgcaactccgggcaatcaacgaactctccagaaaagaatccgcgcaggcgctctacaccttcatcgaaagtttgccacctgacccggcaccaatctcgttggctcgcttacgcgccagacttaacttaaccagccgcaccattacccagaatgcgacagtcaggaaggcgatggagcagctgcgggagatcggctatctcgattacaccgaagtgaagcgcggcagctcggtctacttcatcatccactataggcggccgaagttacgcccggcattgccaccagttaaagctgcgccggaagaaccagaagatatcttgcctggtgatgattcggaggacattatcgatgttgttcctgaagaaaaagacggtgagatggtcatgttaagcaaggaagaactggcgattctcgaagagctgcgcaaagctaaaactcgtaaatag

SEQ ID NO: 133953 - DNA, 213 bp, Enterobacter cloacae
atggcggttacactggcaggtctggaaatcgaaaaaacaagcggctactggcgtgccaaagggtttaagcaacccggcgtgctggaacgtctggaacgtgaggacggtgtcattgtccaccaacgtcgcgaatggcgcatgtacgatccggaaacaggtaagctcacgacgaaggccgggacactctggggtctgctgaagaaaatccactga

SEQ ID NO: 133954 - DNA, 336 bp, Enterobacter cloacae
atgaagaaaatagccctggctctggcgctgctctccctctctgtctacgcggacacatacgtctatgagtgtgagatgtcagtggccgaagtgaaaaacgacgtgatccgcaatgttatcaaagcaagctacggcgcgatgattgtggactgcggcgaacagttttatgttgtgcgcgatgatcgcgtcctgtcttccccctatctcaccaaacgtaacggcaaactgtctggcgtgggtgaagataagttcgtttacaacaaatcaggtgatgtctacggcgttcacgcgaagaacgccagctatcttttcgatgactgcaaggaggttggttga

SEQ ID NO: 133955 - DNA, 180 bp, Enterobacter cloacae
atgaaaactgtattagacactttattacttattgtctcgatagcttttgtgctcgattgcatcttcaccggagcaatccgtaaagcgctggcgcctgttaatggcgcgatggttaatgcgctggccgtgttgctggtattcgactcagcatttggcgttatcaaaggagtcgtggcatga

SEQ ID NO: 133956 - DNA, 276 bp, Enterobacter cloacae
atgaagattttggttcgcatttcagccagcaccgactatgacgtttacccgttgttcatggtcaagtgcgatgggctgaacgatgaagaaattcaagcggcaattgagcgcaatctcgttgagtacaccggcatggatgcagattctgtgtatgtcaatgatgacggtgtttgttggcacaacggtagttgctggtacgttgacgacacgatgccggtaagcgatgaagacgcggctcatcttgagcgtatcttaggcatcagcacctttgagtga

SEQ ID NO: 133957 - DNA, 411 bp, Enterobacter cloacae
gtgaagaaactgtatgacgcggccaacgctacgctggatgtagtggataccgaaattgcccagggcttcccggagccagaatgggcgacgcagctgcgtgaggcgattgcggagatgaacgcaccggaaccttcagaagatgaagccgactggcagcgtttcatcagaatgtacgcggaagagattggcccgacgccaaccgctgaacaggccatgttgctcaagtacttcaaggaagctggagagaatctgccggttgatgatacaccgcactggtttcacgccgcctggcgtaagttcgacgtgatctacacccgcggtctgggaaacaaagatatggtcgtctggcatctgatgcacattgataaggctgtcgaccgcacgctggagaagttctttcccccagcctga

SEQ ID NO: 133958 - DNA, 372 bp, Enterobacter cloacae
atgaaaaattacagcgagatgacggactttgagattaactacctggtcgcggaagccaccggccatcgaccgcttatctcacaatatggctggaaaggctcacaggaaggcgattacacagcagtggtcgccatcggcccgaacggagccggaaccttcgactggtgtaacgatccggaagatgcgtgggacattatttgccgacacagaatcggcgtaatccctgccagacagcctggcgagtggagagcggcccacagaaaggtggatagctcaacgccacaacatctgatccagaaccctaaccctttcagagcggcaatgaccgtgttccttttaatgcaggagaaaaagagtgaagaaactgtatga

SEQ ID NO: 133959 - DNA, 831 bp, Enterobacter cloacae
atgaagaaaggtttactggcggtggctttggctgctatttgcacaatgggtctgaccggctgcgatcgcgtggaaccgggatacgttggcattaaggtaaacaaattgggtgaagacaaaggtatcggtgaagttgtcggcgttggccgtcagtggactggtctgaataccgagctgtacaccttccccactttcaaacagatgaaaacctacgatgagccgttcacattccagatgagcgacggtacagccatcggccacaaaattggtgtggcatatctggttaatcgcgacaaagtaactaccgtattccagacctatcgcaaaggtgttgatgacattaccgacactgatctgcgccagaagattgcggattcactgaaccgtctggccagccgcatgactaccgacgcgttcattgacggtggcaaggcgtctctgctcgacaatgcgctgaaagacattcaggcagaaatgtcaccagtaggtattgaggttattagcctgtcatgggtgggcaaaccagactacccggacacggtcatcgaatctatcaatgccaaagtgaccgcgaaccagaaaacgctccagcgccagcaggaagttgagcagcgcaaggcagaagcgaacatgctgcgtgaacaagccgaaggtgaagccgacgctatccgcaaacgtgctcaagcagaagctgatgccattaagttgcgcggtgaagcattacgtcagaacccgaacgtcatggagctggaagccatcaacaaatggaatggtcagttgcctcagtacatgactgaaggggccaatgctccgtttatcgcgttgaagtaa

SEQ ID NO: 133960 - DNA, 201 bp, Enterobacter cloacae
atgattaagggttatctcatggctgtttcagcagtggtatcagtctgctttatttacggtttactggttccatcgcttatatcagctaaaagcgatctggccttctttatcggacttgccatcgctttaatcttcccggttgccttgttaaaagctggccgcaggtatatcaactcactcaataaaactaaggagaagtaa

SEQ ID NO: 133961 - DNA, 1077 bp, Enterobacter cloacae
atggcaaaaggcaaatccgcactggcactggcgctgaaaaagaaaatcggcagcaatgacgagatccagaaggtctcccactggattgactccggtttccctccactgaacaaagccatttccggacgttacgacggtggttttccgtgtgggcgtatcgttgaagtcttcgggccgccaagcgccggtaaaacctttttggcgacggctgcgatggtgtcagcacagaaacaggatggtctggccgtattccttgaccacgaaaacagtttcgacgttggtcttgccgtggcgaacggtctgaacgccgacgaagacgatggtcagtgggtctacaaacagccggataccttcgaagactccgtagagctgatcggcacaatcctcaaactggtgcgcgacgaagagcttatcccggaaatagcccctatctgcatcgtagccgactctctggcgtcgatggttccgaactcgaaggctgagaagttcgacaagatggcagaaggcactgcgaaggacaaagatcaactgaacatgaacgacaacacggcgctggcgcgcgcgacgagtgcgaacttccctactctggcgctttgggcgcgtaagtacaacgcgtgcatcatcttcttgaaccaggtgcgtaccaaaattggcgtgatgtttggcgatccgactacgtctcctggtggcgactctccgaagttctacgcatcggtgcgcatccgtctgggtgcatccgtcatgaaggatggcaaagagaagatcggacaggacgttggcgccgagtgcattaaaaacaaagtcgcgcctccgtttggcaaatgctcatggaaattctacttcgaccctactcgcgggctggacgtcatcgaatctctggttgagtacatgctggaggaaggatacctgcccaagaacgccagcgggcgtgtggaaattggcgacaagaaatacaccaaatcacagatcgtcgagatgtaccgcgagaagccactcccggaaatcatcgcagcactccaggcgatagacgaacggcgagcgaaagagtcgtcaccagcagagacagaagaagcgtaa

SEQ ID NO: 133962 - DNA, 267 bp, Enterobacter cloacae
atgctgaaatccatcattaatggcgaggcaactacgccaaccatgctggccaaagagattgtcttctgccacggcgagcacgctgtggtggcgctgccgaacattctgggcgctgctggcatttctgctactgagcgtgagttcgcgctggtcagcgagcaggtcgtgaagatcatcgctcgcgtcgccaaacacctgaaccacgacgcaatcaagtttgacgaagccgctgcttcgaagagaatcaacgaatcaaaaggagcctaa

SEQ ID NO: 133963 - DNA, 945 bp, Enterobacter cloacae
gtgaattatctctttgtggacggtaacagcctgggctattaccaccagcaatccgacaaattacacaacggcgagatggaagttcaggcggcttttggcttcgtgaagaacgttcgtcgttacgcctcaattctccatgcccgcccaatgatcttgtgggatggattcagcgacaaacgtcgcgacttctacccggagtacaaagcgaatcgcgatgacgacccggatatgaagaagatgaaagaaggctttgccatccagaagccgtacatcttgaaaatgatgaccgcgctgggcgttaaccaactcattgcaaaggacgcagaagcggacgacctggctggaatgctggtctctcgcctggctccgcagccgaccgtcgatcacatctacctgctgactggcgatggcgactggctccagctggttcgcgagaatgtgagctgggtaagcctgcgtgaagatgccaagcacaagcaggtgaacttcgaacagttcgcagagctgacaggtctgccaacaccacgcgcgtttctggaagcgaaagcgttgcagggtgataactcggacaacatcaaaggcgtcggcggcattggtgatggtggcgcgaaagagctgcttcatgaatggggaagcgtggccgcaatggtacacggcattaacgacggctccattgtcatcaacaaaggtcgctataagacggcattcaacaagctggcaaagaacgccttcaacgagaagacgggctgccggatgctcgaagcctttaagcgcaacatgatgctgatgaacctcatcgacacaaaattcccacccagcgaaatcgagtcgattaaaggcgcacgcgacatgaatgccttcgaacagatgtgtttcgagctgaacttccggtcgtttctggaagatctggaagtatttgttctgccgtttgagaggtactgctga

SEQ ID NO: 133964 - DNA, 1029 bp, Enterobacter cloacae
atgtctaagtcattacttgatctgcttaacaagacccgtggcgatattgcttctaaacgtggcaataacgttgatttgacccgtctgaaagacggcaataactatctgcgcatttttccgaacaaggacgacccgaatggtgtgttcttccagactttcggtatgcactacgttaagcatcagaatgaggaaggcaaagatgtaaccaccgcctacatctgcgaacagcacacccacggccacgcttgccagctgtgtgagatggttatggaaggtcgtgctcgctttaagggcaacaaagcgatggaagagcgcattaacagtatgcgtgctacacctcgttatctggtcaacggtgttctgtctgcgcgtgaagactttgcggacgcagagaaatgccaactgattgagctgccgtctacggtcttcgacgatatctgcaaggtgatgtccgaagatattgcggatgatatcggcaacccactgagcaaagaagaaggctatgcgttcctgattaagcgtaccggttccggtcgtgacaccaagtacgacgtatccccgaaacgtaaagtctacaaaggcgacattcctgagaagctctggactacccaacacgatctgatcgcatacgcgaaccaggctgacgaaacccgtctgctgtctacggctcgcactatgggtcgtctgattggtattgcggctccggcagcaacaatgtcctctccggccatttcttccgctgcaaaatcagccgctgcagaactgcctggctttggctctatcactggtcatacggaaggtgcagctgctgtcgctacagcacacactcccgctccagagtccaccagcctggttgatgaagagatcctgcgtgccgctgaagctgagttcaaaccggaaactaaaccggaagaagttaaagctccggaagccgccgcagctgcaaacgcttcagcatctgctgccgctgcatctgcaccagctgacgaaggtctcgatgacctgctggctgaactggacgctctgtaa

SEQ ID NO: 133965 - DNA, 432 bp, Enterobacter cloacae
atgagcaccgatatctacgaaaaaatcatgtccgatctggagttcgaccgcgacaatcttgaggaagtctggcgtcagcaacctcgcctgttgatggagtacggctctaagctggcgcgggcagaacgcgaggtcgcagatgcaaaactctccctcgatgcgattgaggcgaaaatctacgacaatgaacgtaagaacctgagtatgaacggcattaagttcaatgaatccgtactggaggcgaaggtaagaaccaacccgcaatatctcgcaaagcgccagaagctcgacgatgcccggcacattgcagatctgtacaagcacgctgtagccgccttctcccaccgccgcgacatgattgtccaggcgtccaaaatggctatcgtggagattgaacgtttgggcgccgaacgtttccactctccccgttaa

SEQ ID NO: 133966 - DNA, 564 bp, Enterobacter cloacae
atggcgctttataacttcactctgacactctcaggcgtaacgtatgagaccgaaggactggaagacgcgctgtacgaaagcggctgtgacgatgcgctgatttgcgcatatggaaactccgtctatgttgagttcgaccgcgaagctgaatcgctggatgcagctattgcatcagcggtcgacaatatcgaatcagccggaatcggcgctattgttgaatctgtcgactctgcccttgtaggcttgagcgacattgcagaaataacagaaatgtctcgccaggcgattgcgatgctgaaagatggcactcgcggtagcggcgacttcccttgcccagtccaacgcattaaaggccaatctccactctgggattgggctgatgtagccgaatggctactaaagaacggtcgattaaaagaagacagcaacttggtaaataacgctcgtgtgctgagtaaatggaaccttgccttacgtgcaagcgcttcaaaagattttcaagaagttgagtcgatcgcggtagcacttatcgcacgtcgacgtcatcacgccgaatgcgcatga

SEQ ID NO: 133967 - DNA, 444 bp, Enterobacter cloacae
atgaataaagagaacaccatgaacgaggcacagaagattgcacaagcgctggcggctatcccagcggattttcaggataaagcagttgcggccaccatgcggtcgcagttctgggaaatcatcgactgtccggtcacgttagatctggcgctggcgttcgccgggctggatggtgccgacaaagtcagtcgtttgcgtaaatgtgccagagcgctggcgcttaaaacgcaagatccgaaggcgtgccagtatctgctggagatctacgaatcggataacccagaggaacagctggaggcgttcaaagtgttccgcaatcgggtggtgctgaaggtggccaaagagtttatggaagtgaacaagattggcgatgtgagacagtacaggctgaaacgccagaccagagtcacgctatccaacatttttggtaagaaagtcgcataa

SEQ ID NO: 133968 - DNA, 1170 bp, Enterobacter cloacae
atgaaaattgccaaagttatttccgagcaggaaggtcttagccctgagaaagcccaagaaatatgggacgcctttgagaagttcggtggatatgccttcaacaaatcacacagtgttgcttattctttaatcagctatcaatctatgtggttgaaaactcattaccctgctgagttcttcgctgctgcgctcaccattctgggcgaggataagcaccaggggctggttaaggatgcgctgacctatggcattcgcgtattgccaccagacgttaacgtgtcatctaaccgaattgagatccgcacgcaggaagacggcagccaggtactgtatgcgccattctctgctgtgaaaggctgctctgagaacggatgccaggccatcatgagagcgcgtgagaaagttggcggcaaattcgagtcacttgagcaatttgaggaagcggtcgagaagcgtgcatgtaacagccgggtacgcgaatcactgcaaaaagtaggtgcgttcgcatcgattgagcctggcagcctgccagcgacagatccggaacgactgcgcgaccaggcagagttgatgggcaatctggtgatcgacgctgtaaaagcctctcgaccgttcgagatgaaccctaagcgctctgccgaggtgaatgtactgatgactcgcatggcggcagaaatgggtctgggagacgacctgatccgcccaagcattggcattaagccgaaaatcatggtcattttagacaacgcaaacggcaatgatgggcgtaccggctacttcatggagaacggctacgacgactttaaggcgaagttgcttactgcaggcgatctgcgcatgggcgatctctacgtcaccggcgtatgcaaaaaggtgaaggacaaagagaaggactacaccaaagacgagatcggccagttcaccgactttatgcgtgaagagatcaatctggtgcgtccgacctatgtgctgacgtgtggcagccgggcgacgtcactcttcaacaacaaaagcaaaccatccgacctggttggacgcaaagagtttctgccagagctggatgtgaccgttttctacggatttaacccgaacattttgtactttcgcccagaggaaggcgaaaagctggaagcaattctggcagaggtagcggagactattagcaaatga

SEQ ID NO: 133969 - DNA, 696 bp, Enterobacter cloacae
gtggaagaaatttggaaatccattcctgagtttgaaggttattacgaagcatccagtttaggtcgcattcgctctttagatgttatacgaacagcccccaatgggggcgaatgggtgaagaaggggcaaatcctcaaacctcgcgtaatcaatgattttggacatctgggcgtgaaactaagcgtcaacggcgtcaaatgcgaccgcacagttcattatctggtagcaactgcattccacggagaacgaccagaaggcttacttattcgtcatcttgacggaagaccatcaaacaatgcgccctccaatctcgcatatggcactcaagtcgacaacatggctgacgccattgcacacgataccgttgagtttggtgagaggcgctacaacgccaagctaaccaacgaagtcgtcattgctattcgcattaaaaagtcagaaggcgctctgaacaaagacctcgcggccgaatatggtttaactgagctttacattcaccatatcgtcaccgggaagaaatgggcacgagttggtgggccgatcgttgtctcaagagcatccaaaaaactggatgctgaagcaagagctgaggtggtcgccttgcgcaaggctggcgcaacctatgaaaagttgcgagaaaaattcggcatctctaacactcaaatcgcaaatatcttaaaaaaagctagcgtttga

SEQ ID NO: 133970 - DNA, 2364 bp, Enterobacter cloacae
atgaaggctctgatggtcagaactgacttctccctgggagagtcggctctaaaagcagaaaacgcggtgaaaatcgcgagagacgctggctacaccgctgtcatttccgctgacagcatgaacattgccagtgtgatccccctgcagcgtgccgctggcgacgacatggcggttatttgtggtgttaagctgaatgtggtcgacgatccgacatacgagcaccgcgcccgcctggcgaaagagtcaggaggatgtatggaatcattggcgcgtgatcgcagctactgcttcacggcactgataaagaatgaacaaggttatcgcgacgtgtgcgaactgatgaccttagccaacaagcgcgagcaattctactttgtcccgcgtctggcacttgaccagctggcggccgcatatgccaaaggcaacatcatcctgctgacgtccgacattggcagtgtattccagcgccgggacttcgcaaagattatcgggacgctggtgacagctggaggacgcgataacttctacagcgtggtttatccgcaccctaccccattctacgaccagattaacgtccgggcgatgaaagtggcgagcgcactgaaaatagagccagtggcgttctatcccgcttattacgaagcggtcgacgacgctgacattaaagacattgcgcacatggttacgaacaacatcaaaatcgaccagccgcatcgtctgcgtattccccaccagcgagataacgccgttaatggtcgccgccatctccttgaagcgctgaaagccttctccgttcgaatggatgtgccggtaacagctgcaatggcctcaacaacgcaggacaccattattgaagcctgcacatggcgctggcatgaattgccaccagcactgcccaagatggcagacgacgagcctgcaacgctgatgaagctggctgtcgcggggctgcgcaagcgtcttactaccaaagagtttggctacacaccaccggcttctgagcaccgtgtgtatgttgatcgcctgaagtacgaaatggacacactgacccgcctgggcttctgtggttacttcctgatggtgcgcgacctgatgaatcacagccgtgaaactggcattcctgtcgggccaggtcgtggttcctctgccggttctctggtggcgtggtgcataggcataaccaacgtcgatcctatccgtcacggtcttctgtttgagcgtttcatcaaccctgaacgtctcgacttgccggatgcggatctggacttcagccaggcacgtcgtcatgaggtgatcgagtatctgaatgaacgctatggcgaagattacgttgccggtattccgaacttcacctatctgggcgccgcttctgcgctgcgagacactgcacgtatttacggtgtcgatgctgcggatatggcggtatccaaagagttcaagaatctggaagacgatagcctgtctctggaagagctgcgcgagcaactggccagcctggataaatacgccacgaaaaacccggaagcgttcaaagcggcgtgtaagctgcaaagcctgatgcgtggttttggtcgtcacgctgcggggatgatcgtcgctggcgttccactggtagagcgcacgcccgtcgagctgcgtggcaatgctcgctgtattgcattcgataagcgttactgcgaggcgatggggctgattaagctggacgttctcggtctggcaacgctcgatctgctggatagcgcgaaacgctacatcaaagagagtaccggggaagacatcaatctcgatgctattccactggacgatcgtaaggttctggatgggttcgctgcagggtacacgcagggcgtattccagctggagtccggccccatgcgcaagctgcttaaagatctgggtagcggtatcgagccaatgagctttaaaacggttgtcgcgaccaccgcgctcttccgccccggccccatccagtcaggcatgttggatgactacgtttctgtggcaaaaggcttcatgccaccacattccattcacccacgtcttgaggaaacaaccaaagaaactaacggcgttttgctctaccaagagcaaattatgaaaagctctcgtgtactcgctggattctctatggcagaggctgatgctctgcgttccgctatcggtaaaaagaacatggataagatgaaagcgatcggcagcgattttgtagaacgagcgcaagcaggttgggtgacactgtcacttgaaaacggaagcacagtagaagtccacaaaaaggccaagctgatgtgctctgacggcaaacgcagaacctatgacgaagcgattggtgataacgctgatattgttgattttggagtttga

SEQ ID NO: 133971 - DNA, 1236 bp, Enterobacter cloacae
atgaccgctactgcactacagcaagaagaacatttgccggaagccatcgtctgcaagtggtgtggcaaatcctttcattacctgaaatcccatatctctatgggccgttgcgagaatattcctgagtctgcgaagggtctggacgtggacgaagtggtgaagatgtacacctctgcgtttccagatgaaccaacgatctctcgcacggcactggccaaactcaatgagaagcgtgccgaaaagcattcaggcgaaggaaaagtagcggagattagcgcacatccgggctacgcaggaacggtcgaatacaagaccgaactggtggccgcgcacgagctgcttggcgtaacgatcaaagagctgggaacgccacgcggaaagccactacaggtgacagtcaacgtcaacacgccatatccggagttcgtaccggaagcgaagaagaactatgtgtatggcgacttcgacctgattaaagacatcttcatgatgctggaaatcggaataccaggctatctctggggtcatgcaggaaccggtaaatcttctcttcctacgcagctatgcgccctgctgaatcgaccactgatccgcgcccagcatacggcgtctatggaagaagcacacgttacaggccagatcctcgctcgcgatggttccacctacttcgagcctggtttgctggcgctggcgatgaaaaatggctgggtgtacctcgctgatgaatatgacttcgcgttcccgcagattctgggtgtgtaccagccagttcttgaaggagagccgctgatcatcaaagaggcaactccggactggcgccgtatcactccgcataaacgctttgccttcattggcactggcaacactaacggctctggcgacgaaacgggtctctatcaaggtacgaacatccagaacgcggcgaacttctcgcgcttcggcattgtttcgaacgtgaagtacatgagcactaaggctgaagtcaacatgctggctgaggctggcgtcatccgcgaatatgccgagaagatggtgaagttcgcgaaccttgtccgtgaaggttatgaacagcatctgatcagccagccaatcggccctcgcgagctgctgctgtccgcaaaaatcggaatgatgcgcggtgatttctctgccggcatcgaaaagtcgtttatcaataaacttccatccacgtctgcacaggcagcgcgtgaagtggttcagaagatcttcggttaa

SEQ ID NO: 133972 - DNA, 2373 bp, Enterobacter cloacae
atgtccaaagccatgaccagatctgtgctgaaagaggtacaggacttccgcgactgcgtaaaacgtgttgtagcgatgctttcaggcaagcagatacctgttgcagagcgaggcaatgaagcatatgtccgctacaaccggcgcggtgaaccagtgctggtaaacatcccatctataccggacgacgcatcaccaaccctcatgaacgcagtacgtggttttctcgaccatgaggtagcccatatcctctttactgatccgaaagtcgcaatgaagatgcgcgagagaggaaaggctccgtctaccgggctttggaacgcgctggaagacgtttttattgaacgcagaatgggacaggtgttcaacggaacccgtcgcaatttgctggccacacagaacctggtgatcgacaaatacttcaagggcaaagtgtcagaggcggtttcaatctgccacggcaaccagcgtgaattgttcctgaaattcttcctttgccctgtcgtccgtgcctgggatggccaaagccctttcatcgactttatggaagaacactggcacctcatcgataagcctgtagccttgctcaaagagcatggcatcgacgtggccgttcgcaatatgtcgaacacagaagactgcgtgaaggtcgcagctgctatcgcccaaatcatgcaggatatgaaagacaaaccagagggcaaattaccagagcttaaatcgtctgccagtaagccgtcgaagaatgaggacgagtcagaggaaaccccagaagccggtgacgaaccgactcatggtgagtctgcgccaaagcataccaaaggcgaagacgacgacgacaaggaagagcaggaagatgatgcctcagaagaggaagattctggggattctgatttgcctgaatcagtagataaggacttacctatacacgataaagagattagtgatatagaaagtaaatatacagaagcaggcgaagatgagtcggtagacacaccagaatccgatgatgccggcatggactcaggtgattctgatgacgaaggtggcagtgatgatactggcgctccaacgcctggtgatggcattcgcgaagatgccgatgactctgatggttatggctctggcgccgctggtgatggggatggtgatggcgatgacggcgaagactccgatgctggtcgtggggagtccgaagaaggcgaagaagaggatgacaccgacgatcacgtagaaggcgaaggcaaagaaaatgaggatggcgctgaagtgccagaagacagtgagtcaggctttgttcctgcgccggatgaaatgactttggaggacgcactcaaggcgctcgacgagatggaagacggaaccggtgaaatgaccgaagacgcactgtcggccaccatcagtaaggagcttatgagcacctcgctttctgagtatcgcccatacgatcgttcatacgactttatcgggctaattgatgaggctgaagagcatgttaagcgcaccagaaagacatttggcgcaatcccaatgcactcaccggtcgatcgctaccgcatggttccggaaggcagaaaactctttgaactgaaaatcgaaaaacatctgtcagcaggcgtttcttcgactctggccaaagacctggagcgagctatcgccagccgcaaccgagttcagtttatcccaggccagagacgtgggcggatacatggcgcgaatctgtatcgcctggcaatgaacgacgaccgcgtgttccgcaagaaagaagaccacagagcggtgaacgcgtgcgtccagcaggtgatcgacttgtccggctcaatgggtggcaggaagattcaactggcactcgccagcgcctacaccattgcagatgccctagatcgtatcaatgtgcctaacattatcaccggctttaccacgtttggtagccctgattatgaaaccatgtcgaagcgcggatttacacgtttcgaggcgctcatgctgcccattatcaaaaactggaatgagaaagctaactctccagagatccgcgcccgcatgggctgcgtgtgtgagacgttccccctgctcaataacgtcgatggtgagagcgtcgcgcaactggcgactctgtttgcagggcgaatggaggataagaagatcatgctggttatgagcgacggggcgccatgtgctgcaggcgatgggttccatcagcatttacgaaccgtcaccaaagaaattgagacgttgagtgacatcgatctgatggctatcgggattctgaccgacgaaccacggcgtttctacaaaaattacgcgctggtaaacagcgtagaagagttagggccatcagttgtcactgagctatctcgtatcattcttgggtaa

SEQ ID NO: 133973 - DNA, 213 bp, Enterobacter cloacae
atgaaaaaaataacttctaatttgatcgcccttgaggttggacatactgtttcgattgaagatgatggcgcagcagccatactcactgagctgcctacaaaaccgctgttactagacatgaaagacgcaaccgcgtacacctttgaactgaagagcaagcacttcaccctcatcaataccggctgcggttcgatagccgtccgcacagtttaa

SEQ ID NO: 133974 - DNA, 387 bp, Enterobacter cloacae
atggctaccaacgaaacagaagctaaagtaggtcgctacgctgcctacatcgactctctaatcaccatctctccgaaaagccaagcggctatcgcgaaggaggccggctataaaaaccctaacaacctttcactcatcaagagcggtaaaatacctttgcctgtcgaaaaggtacgacctttggccaatgcgttaggtgcagaccctgttcgactcatgcttatggtgctcgaagagcgtcagccagagctgctagagtttttccgtgaagagggtactgccccattgtccaaagacgaaaagctggttctggaagccttccgcaatcgctttgatggcgaacaaggtgcatcaacgcgagttgttgaggctatcaaggcactatga

SEQ ID NO: 133975 - DNA, 1104 bp, Enterobacter cloacae
atgaaaaacacctttgataaagcacgcgcagcagaaaatacctctcgggaagccatcgagtacctcgaacgcgcttccggtttgtcggcagtgtcgaccgccaaattcgacggagacatgtcgttttcttccgccttcatgttattcactcgcttatctttactgataacgaggcgtcgacctgaaatagccgttcattgtgttttgatacatgtaatgccgcatatctctgatgtaaaggtaagtgatataagtagggtcttagtcaaccagctggtgaacccactgatactggaaggtaagatcgtccagggcagacgcgtgttctccctgatgaaacaattcctgagctggtgcgcctttcaggggctgattgatacatcaccgttgaatgatatgtcgctcaacagagttgccggtggcgcaaagccagtaccgcgcgaacgtaagctgaccgacgccgaggtctgggtattctggaacgtctgggattacttcaatgtgtgcgaaggcacaaagtgggcggccaggctctgtcttgttgctgcaagacgacccgatgaagtgctccgggccagaaaggatgagttcaaccttcaacgtgatgtatggaatcaagggacaagaaataagtcggccaggcagcactcactaccgttaagcccactaatgcgccaatgcgtggaagagttattcgaatacggaaaaggtagccagtggcttgttccttcgaataaaaagcgcggagaggatgttccgatgtctaaggtggcaatatctcaggctctgagaagaatattggagcgcccagagttgatggaactggaggcatttacgccacgagatctgcggcgtactgcacgtagttacttcccagccctgggcatcaatcaggaagtggctcgaaagatcatgaaccatagtctcgaaggcatcgaccgtgtttatgatcgccacgattatatggaagagatgcaagacgcattaaatagcttctcggcgtacatcgaatctatcgtagagcaacaggatttagacgagatagaccataaatttaagggtgatcgtcttgccactgagcttatccgtgtacatttctcatag

SEQ ID NO: 133976 - DNA, 411 bp, Enterobacter cloacae
atgaaggtcacatggaacagtgatagttacgcccaatttttacagccgaccttcgatataaagcctgacttaaagatcacgttactcgacgatttcacgtcgcttaaacaaggcatgtgcccagccgtattcggcaaagatggcccgtatacggctccgggtgctatcgtgtcctcccgcgtttatcacgttcatctcttgttcacgaagcaagaacgaaccagcagccgcaacagattcaattgcacaagcgaccgcgcactcgtttacagtcaacatgcacatttccaagatgtgtatagcctattggcaatcttccctaacaacgcacatcagtttgcgaaagatccaaaaattatggccgatatcgctgcatacgccgccgcatttcaagctctcactaatccgtga

SEQ ID NO: 133977 - DNA, 609 bp, Enterobacter cloacae
atgcgtttagaaaattgcctggaagatatgagtgtcattagcaatgcccttgctactgtgacctctaatgcttcgcgcttttcaaatgcaaagcctaaagctaaatccgggcgtgcctttattgagccgcttggctatcgacgcttccgtggcacggtgaagcggtctgcgaaatttgctggattcaaacaacaagcctatgtgagaaccgcaggtattcctgttcaagagaacagcgatgcggcacagttggcggagatcgaaagcaagctcgcagaattgacggcgaaacacgttcgcctggctcatgccatctctggatggaaagcggaaaagattcgcaccagcttcggtgaaagccgttacgaagaactgaagaacgttgacctgaccattcgtggtttggagggattcgttaacaaattgattcgtgactctgagcaacctcacccatacttgaagcgcctgagcgattctgtaactgagtatcgtttggctatctctgatctgctattgattttaaatcagtgttttaacgacgtagacgtcatcgaatcgcagactggcctcatcgatgaggacgccttcgccaacttctcattccattga

SEQ ID NO: 133978 - DNA, 246 bp, Enterobacter cloacae
atgaaggtcgttatctacggacgcgataattgctcatactgcaaacgtgcggtcgagctggcgaagcagctgcacggccacggctttggcgattacgaatacatcgatattgtgtctgccggcatcgacaaagagaagttgagcgacctggttggcaaaccggtggaaaccataccgcaggtgttcgttaatggtgaacctatcggcggctatacagaatttgctgcttttgcgagcactctgtaa

SEQ ID NO: 133979 - DNA, 366 bp, Enterobacter cloacae
atgaccgatatggatatcgaaaacgagattgtggccaaaggcaaaacggccgcgcgtgttaccccggaacgcattgaagctgttatctcaggcgagttttactttaccggcgcggacggatatcgcagctcaccgttgtggctgaagcaggaagagcctgaaccggccccgcaatcactcgaactgctgaccttctgcgttcttgtgctggagaacggctttaccgtaaccggcgagtctgcgtgcgccagcccggagaactttgacccggagatcgggcgtaaaattgcacgtcagaacgcgattgccaaaatctggccgctggaaggctatcttctcaagcagcagctgcacgaggtgaagtga

SEQ ID NO: 133980 - DNA, 204 bp, Enterobacter cloacae
atgaccaaagagtacctgccacaccagaaacgtgtcatggatgaacacgaagaactgtgtggccgcatcaaagaactggaggcgtacattgccggcgacgagtttgctcgcctgctgtatgtcgaccgcatcatcctcattaagcagctggacacgatgaaggcgtatgacctgattcttcgtgctcggatcgctcgtttttaa

SEQ ID NO: 133981 - DNA, 774 bp, Enterobacter cloacae
atgggaaacaaacgtaaacaggcgcgtcgcgcagctcgtcaggctctgaagtcaaaaccacgcatccacggctacgaaattgacacaatcatcgttgacgagctggccgccgcccctgctctgccaccaaaacctaaacgcgacaactctcccatcgaagcgcgtaacgaggcccaggcccactatcttatctctctcgataccaaacctctgacgttcgccactggtgaagccggttgcggcaagacctacctggctgctgccgtcgcagcgcagcgtctgctggataaagaagtcgggaagatcatcgtgacgcgtccggtattgcaagcagaagaagatctgggcttccttccgggcgacatgagcgagaagttcgctccgttcttccggcccgtctatgacgtgctacagaagcgtttgggtggctcgttccttgaatattgcttaaagccagaggtggccaaagtagagattgccccctttgcttacatgcgtgggcgcacgttcgagaacgctgtagtcattcttgatgaggcgcaaaacgttacggcgtcacaaatgaaaatgttcctgacccgtatgggtgagaacgtaaccgtcattgtgaacggggatgtgacgcaatgcgacctgccaggcaatgttaagtctggtctggaagatgcactggagcgttttaaaccttcctcccatgttggccttattgagtttgcgaccgaagactgcgtgcgttctgagctatgcaaagtcgcactggaagcctatcagtaa

SEQ ID NO: 133982 - DNA, 555 bp, Enterobacter cloacae
atgaaaaaacgcaacctcaatattctcgcctctctggtaatcgcgctcactctaacgggatgtaacgagtcggagatcgacaaaatcaccttaataggtagagataaaagcgatcttgcacagaactataaagcccagttccaagagcaaacacccaatattgaagccttcgcacttcaagataaaaatgcaccgaaggagcaggaaccgcatacgcatggcaatctcattgatggaaaggttgaatcgtctttaacgacaaatgtcggcaagtatacgttcatgcagatcggtgaaatgttgacaaaggagtacggaaaaccggtagcaacgaaagacagaattttcgaccaagaagctatctctggtatggactgtattgagacaaagacctgtggtgcgggcaagtattatgaagtctatcgagggaaggatcggttaataatggtgattaacggtgctggccttgtgaacgaaaaagagggcgtaacgttgcttacctttaccgataaacaattaaaaacggctcgtctggaagaagataaacgccaatag

SEQ ID NO: 133983 - DNA, 267 bp, Enterobacter cloacae; identical to SEQ ID NO: 11114

SEQ ID NO: 133984 - DNA, 645 bp, Enterobacter cloacae
atggagatcctcggtgagtctgcaccaggcaaaagtaccggtgaggcaatggcgctgatggaaaaccttgcgtcaaaactgccgtccggcatcggctacgactggacggggatgtcttatcaggaacgactttccgggaatcaggctccggcgctgtacgccatttcacttattgtggtgttcctgtgtctggcggctctctatgaaagctggtcaattccattctcggtcatgctggttgtgcctctgggggtgatcggtgcgcttctggctgcatcaatgcgagggctgaacaatgacgtttacttccaggttggtctgcttacaacaattggtttatcagccaagaacgccatactgatcgttgagttcgccaaagatcttatggataaagaaggcaaagggattatcgaagccacgcttgaagcctcgcgtatgcgtctgcgtcctatcctgatgacttccctggcattcatccttggtgttatgcctctggtcatcagcagcggtgcaggtagtggtgcacaaaatgcggtcgggacgggcgtgatgggcgggatgctctcagccacactgttggccatattctttgttcctgttttctttgtggttgtccggagacgatttacaaagcacaaggattaa

SEQ ID NO: 133985 - DNA, 846 bp, Enterobacter cloacae
atggcaaacgactggcttgagctgcgtcagcatgcagaaacaggtattgagacaattaaggcgcatttcgaaggacatgcctttgatccccactggcatgatagctatctggtcggaataaccctttccggtacgcagcagttccactgtcgccgtgaacgccaccgtagccagccgggcgatgcttttttacttgagcccggggagatccatgacggtgatgcgccggtagagggcggctttacttatctgaccttttatctggatgaacactggctcacccatacgcttcaaggcctgtatgactctactcccgggagttacactctccactttgcccaaacgctgacgcgagagcctcagttggtgcgcgctatcggtgatacatttgcctcgttgcataacgatgagatgaagatcgtccaacagagcacaatggataacctgctctctcagataactacccactgccactggcgtaagaaactcccgtcgcaattacaaagctccgctgtagcgcatcgtgcccgcgactatctctatgcgcatatcggcgagaacgtggggctatcagaccttgcccgcgagacgggtacggatcgctttaccctcacccgctgttttaaacgcgaatttcacctggcaccgcacgcctggcttatccagctgcgactggcaaaggcccgacagatgctggcgtgtggggaactgcctgttgatgttgcgacggcagtgggttttgccgatcaaagccatcttggtcgctggttccagcgtgcataccgtatttctccggcacactaccgccggttgtgcacaaaccttccagacgtttccagaaaataa

SEQ ID NO: 133986 - DNA, 744 bp, Enterobacter cloacae; identical to SEQ ID NO: 120747

SEQ ID NO: 133987 - DNA, 159 bp, Enterobacter cloacae
atgagtgaagaaaaacagaagatgattgcaggtgaatattaccgccctggcgatgacacgctgagggctgaccgtttacgcgcgcgtcatcttgttcaccgctataaccataccgcacccgatgagaaggaaggccgaacgtcgcgccttattagctga

SEQ ID NO: 133988 - DNA, 1176 bp, Enterobacter cloacae
gtgttagccaaagggcgcgagaagtcattactgcgccgtcatccctgggtcttttccggcgcggttgcccgcatggaaggtaaagccagcctcggtgaaaccatcgatattgttgaccatcaggggaaatggttagcacgcggcgcatactcgccagcatctcagatccgcgcgcgcgtctggacgttcgataaagacgaaaccatcgatatcgacttctttgtccgtcgtctgcaacaggcgcagcagtggcgcgagtggctggcaaagcgtgacgggctggacagctatcgtctgattgccggagagtccgacgggctgccgggcgtgaccattgaccgcttcggcaatttcctggtgttgcagctgctgagcgccggggcggaataccagcgtgccgcgctgattagcgccttgcaaaccctgttcccggaatgtgccatttacgaccgcagcgacgtggcggtacgtaaaaaagagggcatggagctgacgcaaggcccggtcaccggcgaactgccgcctgccctgctgcctatcgaagaacatggcatgaagctgctggtggatatccagggcggccataagaccggttattacctcgaccagcgtgacagccgtctggcaacgcgccagtacgttgccgataaacgcgtgctgaactgcttctcttataccggcggctttgcggtctctgccctgatgggcggctgtgctcaggtagtgagcgtcgacacctcacaggaagcgctggacgtggcgaagcagaacgttgagctgaataagctggatctgagcaaagcggagtttgtgcgcgacgacgtattcaaactgctgcgtaaataccgcgaccagggcgagaaatttgacgtcatcgtgatggacccgccgaagtttgtggaaaacaaaagccagctgatgggcgcctgccgtggctataaagacatcaacatgctggcgatccagctgctgaacccgggcggcgtgctgctgacgttctcctgctctggcctgatgacgacagatttattccaaaaaatcatcgccgatgccgcaatagatgcgggtcgtgatgtacaatttatagagcagttccgtcaggccgccgatcacccggtgatcgctacctacccggaagggctgtatctgaaagggtttgcctgtcgcgtcatgtaa

SEQ ID NO: 133989 - DNA, 285 bp, Enterobacter cloacae
atggacgaactcaaaaacttcagcgcaacggactggttatttttcgcaactatggtgatcgcatggttttacctggtagccaaagcgtatagctggttaataggagtcctgcttcgccgcggttggagattgtggaatcgcaaggacgagcaaaccctggctatggaatcgttttatgaggcgttcaggctggcagatatcgagcctggtcagagagtggttattactaccgaaagcggtatgacgatccacattcttcggccaaaaggtaatcccaatgcctaa

SEQ ID NO: 133990 - DNA, 288 bp, Enterobacter cloacae
atgagcaacgccatagacgcgcacctgaccgatgaggtgatcaatacagcattcgaaaacacgaatttcggccgtactgatttccgaaccatcctggctgaaacggtaatgaaacgtgctgccgggtatcactctggctggactgcaacaactatctgcatggggcttggcttgctgagctcgaagaaccagagtgcaactaagctcggcctgacgttcgctttccatcactactacaagccatgcgtgagagacgcgctgatgcctgtccaggagtccgcccaatga

SEQ ID NO: 133991 - DNA, 579 bp, Enterobacter cloacae
atgaaattcgtagtttgcgctcatcatactcgcttagagcaagctcaacgtcttgcagcgttgctggatgctcatctgcttattgatgacggtaaccacggcgctaactggaatcatcgccgtgcgcttgaatgggctgcctgccaaccctgccgggtagtggtgtgtgaggacgatgcgcttcctgttgctagttttactgaattgatggatgagtggcttgctcgttttcccgaggcgctagtgagcttttatctcggtaccggccgcccgccacagtatcaaatgcatatagccgaacggctgatagttgctgataagactcgcacagacttcatcactttgccgcgactgatacacggggtttgctatagcgtacctcctcagcatattgaacgagtcctttctcgatgggacagcagtaagccagccgactatgcagtcggggatgcctatggcggcgcggtggtttatccgtgttactcgctggtggaccatgcagatggtgaacctgtagagcgtcactctgactcagcgccacgaacagaacgccgccgggcgtggaggttgcatgtctaa

SEQ ID NO: 133992 - DNA, 666 bp, Enterobacter cloacae
atgaaattgaaactgctagattttttgtttttaatgttgttactggggcttatgtatatacagcatgaatacattgctataggattattctacgtctattctttgtgtcatgtttatcctgatagagaaaaaatttttatcattattaaaaattcattagttattaatttttacagagttattattctttttatatcttatattctttcgcttaaatatctaagcgtacatatggggattgaagaggagtatttaaaattttcaccaacaatacttgcgattccaatctcattgtttattgttgttgtattaattttctttgtttcaatggtttatagtgcgctgaggatatttgcagggcaatttttgatacttgtgccgggtggtgtggaaaagctaaataatacgcgctttataaagtggggcgatttttctattcatattgtgaatgtgttaatattaccctatttttttatggcatattccattgattatattgagcgaatgtctttgctagctgatgcagcatttgtttctgattgtggtgaaatatcaagtggcaaaatgtatttaagaaaggataatgaggagtgctatgtatttacgctaagcaaggactttttaactgagtctcctaatatcattaaaagcctctcaggcgaataa

SEQ ID NO: 133993 - DNA, 162 bp, Enterobacter cloacae
atgtggagtaatatttactcagaaagacattcacaacagattatatattacttcgaagaaaagaataaaatatgtttcctggaagcattgagtctatccctgactattccgttcctgcggcgtttcccatttcagcaaccgctcaactgccgtattcactga

SEQ ID NO: 133994 - DNA, 198 bp, Enterobacter cloacae
atggcccagtgggctgaagacaaacatatggaacagtttttccgcgaagctaagctggatgtggcaatgttggatgggcaaaagaaggcactggtaatggagcgtttgcaactggcccgccagcacttatcagtgaatacggcagttgagcggttgctgaaatgggaaacgccgcaggaacggaatagtcagggatag

SEQ ID NO: 133995 - DNA, 129 bp, Enterobacter cloacae
atgaaacagctgatgctctccggcgccctgcagctgctgattaagctgctggcgctgtggttacaggccagaagtcagggggtggatgaaggcaataaagctgcgctgtccctgatatggagcacctga

SEQ ID NO: 133996 - DNA, 318 bp, Enterobacter cloacae
atgtacacctcgctgctggtgattatgttctcctgcgtaccgttgctgaacatcgacctcgatacaaacaaatatgacaccacgcgctcaagacagtgcggcatgtcggtgccgcaacccgccgatactggctatcagcctattataaactcgctgggcggcaaaaacgccgccgttcctgtctggtggtacttcattcatatgatcagcaaaggcatcaccagcgcaacggttgccaccctgccctgccagcctgacctgcatcagatccgctttgaagtgcagcacacccggattaagaatcccacgctagtttag

SEQ ID NO: 133997 - DNA, 411 bp, Enterobacter cloacae
gtgctgcgctcgctggtctgcgaacgtaatatgcaggtatcgcaggatggacgtgtttaccacggctacggcggcaatgtcgatggcaccttcgctaatgccgccacccggctggcatccagcgccgaaaatatcctcggcagcatagcggcgttcccagcattcgacagcgtgcgtcaggcgctatcgatggtgcaggctctactgcaaatggcgctggtgatctgtattccgctgataacgctctgttcggcgtgggatgtgaaagtagtgatgacgctgacgtttgtgcagttcgcgttgttcttcctcaccttctggtgggaactggcgcggtggctcgatagctggctgctggatgcgctctacaacagcgatacccatagtagcaggaatctggccgggatctag

SEQ ID NO: 133998 - DNA, 129 bp, Enterobacter cloacae
gtgattatcaatctggtgatggggtcgatgtttctggtgctgccgacattctggctgggagcgctggcgggcggggttaaggtggctcaggatagtggggggaaggcgggggggatcattgggaggtga

SEQ ID NO: 133999 - DNA, 2313 bp, Enterobacter cloacae
atggctattggatttagaattgcagcaagaacactaagacatctaggctcagaactcataacatccgatgatattgctttaaatgaattgataaaaaactcttttgatgctcattctcctagggtaaaaataagaatagaatcgccttttgactataaaacaatagataatgcacatcaatacaaagatataagctcattccttgatgatattttctcatcaactctatctgatacaaaaaaagaatatataaaaggaaaattagaagttttaggcaatattaaagaaattatagcatcgctaccaagataccaaaaaataatcgttgaagatactggcgatgggatgagtaaagatcaactagaaaatgctttccttgtcgttggtacaccaactaaatggctacagaaaaataaaaaaaacggttcatcagagaaaatacttggcgacaaaggtattggccgcttatcaatgatgagattgggaaataaatcaatagtaaaatcaacgactagcgattgtgattactggcataaaataaaattcgattggaatctatttgaagaccccagtaaatatttagatgaaattgatatttctgttgtaaaaggcaaagagaaacctaatcgaaaggagaaagggacccaaataataatatttgatcttaacaaaaaatgggaaaaaaaagatgcagaggattttgcgcatagctacttaagaagattgcaggatccattcaattttgatgatttcccttatccaataaatctttattataacgatatcgaaatacaaatttctggtttatatgattggttcattgaatcggctaatttccaagcaaaattcaaatttacaccagacgtaagcgatagcaatgatattgtactaaaaagggaaataaaatggcataatatggaaacattcgaacctagagaatggaaagcatcagagctaacaactcaattaggttatccattagatgagttaaaacgattaggtgcgttttctggaaactgtctctggtttaatagaggaaaagctgcaatcaagaatctagacattgatcatgatgcaatgagaactgaactaagtttatggccaggtggatttgcgatatacagagatggattccgtatagggctgacaggaagtttagaagatgactggttagaaatggataaaacatctctcaagtctaaaggctatgcattaaatagataccagacagttggtacagttaacataacatcttcaaataataaggaacttgtagactcttcaaatagagagcgattaatatcttgcccagcatataaactacttcaaaaaatcatgcaggttgctataattcaagatcttcgttctaatatacatgctcttaaaattttagaagataaaattgatattgcagaagacacgacacttaataccttagaagcatcgaaaagttctctcaagaaaactttagaaaatgtaattcaattaaagaaaaaagtacctaaagaacattctcagcaatttaaaagcatcgaagattcgttaaaaagtcatatagaagatgttagaaactttgagagtaaactgtcagaactatcggaaaaaaacattgaaatattagaattagcgggcatcggcttggttgttgaaaaggttattcatgagttaaacagactgacatctagcacccaggattatctctctgaattacaaaaaaaaggaatatctgatgacatatcttcaacaataaatatattgaaagagcagatgaatgtcacaaacaaaaggattaggacggtggatgtacttagtccctctggacgtcaaagaaaaggtgtatttaacttagtcggattgataaacagcattctggaggcgaatgctagcaaactaatccggcataagattacaactaaattattagtagatggcgatataaataataaaaaatttaatgttaacatggtccaagggttagtagcccaaatattggagaatttaataaacaattcggtatactggttaggacaagggcttctgtcaggtaacacaacccccttaataacaattgaaatagatacaatatcaaaaacattgtcttattatgataatggcccaggtatcgaaccccgttatagacatgacattttaaaaccttatttcacgacaagaaaaaacggtaaaggattgggtttatacatagctcaagaactagctgagtatcataaagcaaacttctttttagaaaacaaaccgaatatagaagatggaagattgcgctgtttcattttagaattaccaagagatgcttaa

SEQ ID NO: 134000 - DNA, 468 bp, Enterobacter cloacae
atggataattatacaaataaaatcaatgttgctatttttgatgatgaaataaaacctttcggctacactgaattagatgaaaaaataaaatcagttttaaatgacgttagttctgaaatcttctcaataatatggggaatcgcgcaggataagttaaatttcccgccattgaacacattaaatagaagaactgttcagcaatttacatctcgcgatgaattagtgacagaggttatctttgatgatgttttcttaaactcagcccctgaatatatcactgatataataaaagcacaaaaaggccagagagaattaactaatacgtcattaaactatgtgaaagctgcattctctgacactgataaatataatatcgaagagcattatcagcgtccagcatcccccaaagagctagcacaatatgatttaatcgtcatggatatgatgatgaatgatcagttgagttag

SEQ ID NO: 134001 - DNA, 216 bp, Enterobacter cloacae; identical to SEQ ID NO: 10294

SEQ ID NO: 134002 - DNA, 939 bp, Enterobacter cloacae
atgcaaagtacttcagagattaatcgtagagttcatgctcatttctccggacatgagacctttcccctacgccaaatgtggttaaaaaaggttgtagatcagtcaactacagatggtctattacctaaatcggtctttactaataaagatgctatagcaacttttggtgtaggtaaaaacatggtgagctcaatccgccattgggctctggcttgtgggatcattgaagatgcaacaacaaaagaatttgttttaacaaagctagcctcatcgatcctgagcgataacggatttgacccttatgctgaacatccatcaacagcatggttaatccattggcatcttgccggtaaatgtttacgttcaaccacttggtattggctcttcaatcatgtgacgatgcctgcttttacgcgtaaggatttagagggtgtattagctaattatgctcaagagattgttcctgaacaccgtctttctcctgcaacattagagcgggatttggaagtatgtctccgtagctatgccccacgctcttcgggtggttcccctgaagattatgctgagcccttactcggtgaaataggtcttttacaggaaatacacaaagggcagtatgcttttcgccgtgggccaaaagcatcgttacacaaagggatattcgcttttgcattaatagacttttggcaacagaaggctgatggcttgagtgccttagcttttgaaaatattatttataccgagggttctcctggaagagtatttaaactcgatgaagaatcggttgcgcaatatttgatcgaattgtctgagtttacagagggcgtgttggcttggactgactcggcagggttaaggcaaatacacaaaaaagtgttgacagaaacagagcaagagaattttaaagaaaaaatgattaggtgggcatatgacgaataa

SEQ ID NO: 134003 - DNA, 2925 bp, Enterobacter cloacae
  misc_feature (2847)..(2874): n is a, c, g, or t
atgacgaataatatatcacaaaaactactatctgatgtggtaagcatatccccacaatatcaaagatcaattcggatcgattcggatatggggctatctgatgccttaaatggctacttttgccataataccgcatcatctgttatcgaaaatatatgtaatcatatattgagtacaaatcagcgtggttttaccttaacgggaccatttggcggagggaaatcttcccttgccgttgtcctgggaagtgctgtgcattcaaatgaattagtaagaaataaggctcgcagcgtattaaataccgagtcaattaatggttttgaacaggcgtttccggtaaaaaatggttggaatattcttcctctggttgggaggcgtgggagtgttgttttagatctttatgcagcactaaataaatctttaggaaggaaaagcagtaaaaaaatttctccttctgaactaatagatgaattacttcatcttgcatcacaacaagtcgatgatggcgttatcatcttaattgatgaaatgggcaagtatctcgaagcggcagcgctaaatatcggtgatgatgtattctttttccaagagttggcagaagcagctgctcgttccgagggacggttagtcattattggaatactacatcagtcattttctcaatatgctatgagattgggaataaatacaatagatgattggtctaaggtacagggccgatatattgacctgccatttattgcagctagtgatgaaattgttgaattacttagtaaggcaatacaaactgagatatatccaacatggatatctgatgcagcaaatattataacagaagttgttagacataaaagaacaaatattagtgagcaattctctgcttcattagaaaaatgttggccactgcatccggttatggcaacgttgctgggaccaatttcgaaaaggcagtttgggcagaatgaacgaagcatctttggctttatctcttcagtagaaccatctggtttttcgcattatctgaaaactactaattttgataattattcaaactatgggccgagtaattattgggactacttgcgagtaaatcttgaaccaagcattttagcatcctcggatggacaccgctgggcacaagccgttgatgcagttgaaagaacagaatccaaaacttccaatgtgtttttggtaaatctgattaaatcgattgccattatcgacctgtttagaaatggttctggcttagtagcaaatgctaaatctcttggtacattattcccagaaaaaaataacgatgaattaactaaagcattagatgaattagcttcgtataaggttattttattcaaaagttatttggatacatggtctgtatttgaaggtagtgactttgatattgatagtgccatttctcaagaaatggcaaagtttcctggtattaactatcaaaaattatcaaaacttatggggttacatcctgttgttgcaaagagacactatcataaaacaggtactatgagatggatggatgttattctttgcgattttgaacaagttgaaaaatacgctaataactattctccgttaagaggtgaattcggttgttttatccttgcgataccaaatcgtggtgttggagaaaatcaggcaagagaaaaagcaaaagagttttctcgcttctctcctttccctatcattattggaataccagaaaactctaacagcattaattcgttagctgaaaagcttgtagttcttgaaaacattaagaattatacttcattagaaggtgaccgtattgctcgtcgagaagttcatgctttattgtctgcaacaagtgcagatcttgaatatcaacttcagtctgctttgttgcaaacctattggtatgatggattaaatgataaaccacttgaagttaaaaaaattgcgatactagcttctgattttgcagataggctgtattactcttcacctcgtatttatagtgaactggttaatagagataatctgtctagcagcagtgttaaggctcgacgtttattactacatgcaatgattcagcatgagaaagaagatttcgttggattctctggataccctgcagagagagggctttatgatacgctcatacaccaaactggcttacaccgtaaaaataaagatggagagttatcgtttctttctccggaaaaaggctcagctagtaatttgaatggtttgtgggatgcaacacaagctttattcaccgatgttgatagcaaaatttcgatagataaaatttatgagttttggtcattacctcctttcggcattaaacaagggttattaccagtcattttaattgcatttgtattagctcataaatctacggttgcaatatataaagatggcatgtttatgccatatcttgaagatgtagatatggacgagtgtttacaagcaccagctcggttctcattgcgatgggttgctctcgataagaacaagaacgagattttagaaggtatatcaagcctattgagtgaagtatgtgaaaataggactagcatcgaccctcttgatgcagcaagaggcttggttggcatggtttataacttacctgattggactagaaaaacacagaaaattagctctgttgcaaaatctgttcgcgatatgcttttgaaagctaatgatccacacaaggtactttttgttgatttggtcaccttactcaaggtttcggatggaaaaagttatatagaagttttaaggccaataattaaagaattattgtatgcctatgaaaaacagttatcaaaagtaaaagagaaacttttcttggccttagatgttaacccnnnnnnnnnnnnnnnnnnnnnnnnnnnnatgatatccagtctctcaagattagggctagtgctgtatctggtattttag

SEQ ID NO: 134004 - DNA, 711 bp, Enterobacter cloacae
gtgtatgaattcctcgggcgacttgagggctacttaggcaagccaattattcgtctaaatccgcgtcgagattttagattctggctgaagcaatacaaccattttctacctagtcctcagactcgatggtgtaccagacagctaaaattattgccatttgaagagtggattaggccttggctagcagccggggatgacgtgacatcatatgttgcaatacgagcggatgaagattatcgggagggatatacctcaaaatcttctaacctccatgtaaaattacctttccgtgaggtgggtatagataaaccaggggttattgatattttggaatcatcaggactcggttatccaaaatattatgaatggcgttcgcgaagtggatgtactttttgctttttccagcaaaaaatagaatgggtgaggttgaaggaaaggcatccagaagcatttgaagcagctaaggctcttgaaaaagactctcttgagcatggttcaccttttacatggtctaaaggtgaatccttagcacaattagagcaaccagatagaatgcaacaaataaaaaaggaatatgaagttcgcagggagagaatgaagagaagtattcccgtcaacgtgctaagacctgtgagtaagactccagaggatattgatgatatatatggagaggatgaaggggggagtgcttgtcttatttgtcataagtag

SEQ ID NO: 134005 - DNA, 306 bp, Enterobacter cloacae
atgagtacaacagcaggactgatttcatttaaagcgagagaaggaaaaggcgctgaagtagcagagcgcatagccgctgctttgcctcatgttaatgcagaagagggcaccactcactggctggtgatccgctcagaaacgagtcctgaaacggttttccttgtagatctgttcagtagtacagactcaagggaactccatatgtccggtgaagcagctaaacaaatattcgctaccgtacccgctctgctggcagaagagccacacattcatcctgcggttttgattgcggcaaaaggtatttaa

SEQ ID NO: 134006 - DNA, 987 bp, Enterobacter cloacae
atgaaaaagatagtcattattgcttccccgggatgccttgcttcaggctataccgggctggctgatatgttctctcttgccggaagagccatatcagctgctcgcaaggagccgtcaccctttaatatcatgacagcaagtccggacgggcggcctgtgaccgacggaagcgggcggttactgaccgccgatgcggcactggcagatatcaaatcatgcgatgcggttctgatccccgggtttgtacccgatgcatcaaacacaccgccacagctcggtaagctgggcagcatagcgtcatggatacggcaacagtacgtgcatggcgcgctggcttgtggctcgtgcagcggagtgtttatgctgggcgaggcggggctgctcaacggcagaaaatgtacgacaacctggtggctgtacgatgagctcaagcgccgttatccccgggcaaacgccatctggggcaatgctttgactgaggataaccgtatagttacggctggcgggccgctttcatggattgatgtggccttacacgttgtgcgtcagcttgaggggacggaggctgcgcgcattgcagcagaatttgctgtagtggatacaacgcctcccgcaagggctgtttatatgcccaccgcgcacctcagccggccggacagtattctgcccggtgcagaattttttataaggcaggaagcatcaacgctgcttaccacaagagagctgtgccggcgccttgccatttcggagcgaacctttcacaggcgtataaaggcggaaacaggcgagtcaccgaaacagtttatcgacaggatcaggtgtgaaatggcaaggctggcacttgaaacatccgctaaaaccataaagcagatcgcagctgatgcaggttacgcggatgagggcagtttcaggagggtcttcagccggatgaccggtatgaatccggcattataccgccgttgggtgaaagaccgtacccgggaataa

SEQ ID NO: 134007 - DNA, 996 bp, Enterobacter cloacae
atgaaccagacaatgactgctctcgtactcgaaaatttcggtgatgataaatttgcccgtaaagaactcccggtgccacaaccacaggctggtcaggttctggtgcgtgttcatgccagcggtgtaaacccgattgattataaaattcgtcttggagaggctccgtacgccatgcctcagctccctgctgtgcagggtactgatatggcaggggaagtggttgctgtcggtgaaggcgtaacccagttccgtgttggagatgaagtctacggcctgaccggtggcgttcgcggccttcagggttcactggctgagttcattgctgcagatgcagacctgcttgccatcaaaccacgtaacctttccatgcgtgaagccgcagctctgccgttaacgttcctcacggcatggtctggccttgttgataatgccaatgtacaggctggtcaacatgtgctggtacagggtggcgccggtggcgtaggtaacatggttgtccagctggcaaatgcactcggtgcaaaagttgctgcaaccggatgtacggcaaatcaggagctgattacaacgctgggcgcattcccgctggattacacaaaggtttccacgcaggacatcattgagcaatgcaccgatggtgaaggctttgatatcgtttacgatacggttggtggccctgtcctcgacgcctcactttccatgacgcgctattacggccatatcaccagctgtgctgcatttggtgaccataacctggctacgtcatcgctgcgttgtgcaaccctgtcgggtgtctttattctgctgccaatgctcacaggtgaacgtcgtgctcatcacggtgaagttctgaaaaccgccacccgtctggttgaagaaggcaaaattcgtccggtcgttgatgctcgtcatttctcactagaccaggccattgatgcccaccacgcagttcaggatggttcagcttccatcaaggttgtgattgatgtcatttaa

SEQ ID NO: 134008 - DNA, 1020 bp, Enterobacter cloacae
atgtcatttaacggcctgatggcgagaacctggcgctttaactgcaccggagaagccgacgtccttgaactcgaaaacctgcctgttgccttaccggcagcaggtgaggtgctgattcagatgaaagctatcggtcttaaccgggcagacaccatgttcagacggggtacttatatcgagaaggccgtatttccctctcgccttggttacgaaggtgctggcgtggtgctggctacgggcgaaggtgttaagcagttctctcctggagataatgtttcagtgttgccttctgacagcctggcgcgttttggcacttgcgcagataagctgctgatccctgaaagctatctggtgcataaacctgacagtctgagctgggaagaagcctcatcagtatggatgcaataccttaccgcctggggtgggatcgtgcatgccggggaattgacaaagggtgcgtccgtactggtcactgctgcatcaagcagtgttggcctggctgcggttcagattgcagaagctgccggggccagagtgattgccagcaccctgacggtggagaaaaaggaacgtctgcttgccttaggtgtgaaagatgtcattgccagtgaagatgaacctgacctctatcaggcgattgtttcgcggttggggggtgagcatcttgatatcgtgtttgatgctgttggtggacctcagattgaacatatcgcacaggccatgtccgcaaaaggacgtatggtcatgcatggtgcgctgagtcctgatgtaacgccttttcctctgcgactggcattacgcaagagtctcactatgcggggcttcctctttttggaagtgttgaatgatccagccattcgggaaaaagcaaagcgttttatcctgagctgcatgggggccggttttctgaagccacagatagataaatgctttaaatttgaagagctgcgggaagcacaccagtatctcgaatcaaatcaacaaatcggaaagatcattgtcagggttgatcctgtctga

SEQ ID NO: 134009 - DNA, 900 bp, Enterobacter cloacae
atgcaaaacaagctggagatgctgcgtattttttgcatggctgccgaatcacgaaattttaaggaagcggcgatgctactggggatatcaccccaggcagtaacccgggcagtaaaggaacttgaagagcagcgaggagaaattttattttaccggagtacccgacaaataaagataactgcagatggagaacgtcttgcaaaacaggcgcgccaggcggttgactctcttgatttgctgttagcaaaaggcgttaaggataaaactgatgaaatggggggaacggtgagattaactgtgtcttcggtattaggccgaaaactggttgttcctgcactggctgaatttgcgcgtcagtacccggatatcgtggtggactgtgtgctgaccgactcgcacagcgatgttatcgatgaacgtatcgatataggtatccgttttggatttttgcctgacaaccggtatgtggcgcgcgaactggcaaagattcatttttaccctgtcggtacacctgagctgattgataaagttggaatgcctgccagcatcgctgagctggattcctatcctctgacggcattgtttgatcataagactggtcgctattggccctggacatttaccgaaagccgcagcttcatcccgtcgaaacctcgctttattgccgatgatcttgaggctgagttccaggctattctggccggtgttggatttgggcatatgccgggatttttagttctgccgtggcttaaaagtggcaagcttattcagatactcaccgaggagacgtcacccgtctggcggttgtacctttaccgccctcagcgtgggccaacgccattgaggatcagagcgctgtttgactatcttgtagacgtgctgggtgaactggaaacctga

SEQ ID NO: 134010 - DNA, 741 bp, Enterobacter cloacae
atgaataatatcgataaaaaggttgtcgtcattacaggtgcgagcagtggactgggtgaagctacagccctgaacctggcaaaaaaaggcgctattctggtgttgtctgctcgccgcaaggagcgtctcgaccagctggctgcccggattattgctgatggtggccaggctattgctgttgaagctgatgtgacgcgtaaagcagatgtccagaatattatcgacaaagccattgaagctttttgccgtgttgacgtgatggtgaataacgcgggtctgatgtcgatagctccactcagtcttgccaaaaccgacgagtgggatcgcatgattgatatcaacatcaaaggcgttctttatggtattgcggcagcccttcctgtttttgaaaagcagcaatccggtcatttcattaatctggcgtcggttgcaggtatcaaggtattcagccctggcggcacggtgtatagcggaaccaaattcgcggtgaaggctatctctgagggtctgcgtcatgaagtgggtgcgcatattcgcacgaccactatctgtcccggagccatcgacagtgagctgaagctggggagttctgaccaggatagttcaaacttcgtcatcgacttctataaacaagctattcctgccgattcggtagcaagagcgattgcctatgccatcgagcaacctgccgatgttgatatcaacgaaattgttttgcgcccaactagtcaggaattctaa

SEQ ID NO: 134011 - DNA, 210 bp, Enterobacter cloacae
atgttttcagctaaacgtattgtgttaatttctgttctggcttttatgagtgcaaatgcctttgctaaaacggtcagcgtgactgattcgacgcttgaaggtgcagaggcaaaagtggctcaacaggcagtcagtgaaaatgcatcctataaaatcgtcagtgccttgtataaaaaccgcgtatacatgacagcagaactcagcaattaa

SEQ ID NO: 134012 - DNA, 279 bp, Enterobacter cloacae
atgaaacgtgtcgggataaaggctcaggtcggataccggagcccgcgggcacgtaaaggcgaggccagtattgtgtcgcccaacaggctccagcgacagttcaatccggatgctccggatgagcgttgggtaaccgacataacctatatcaggacccacgaaggctggctgtatcttgctgtggttgttgatctgttctcacgcaaaattatcggctggcccatgcaatcccggatgacaaaggacattgtcctgaacgcactgctgatggctgtatag

SEQ ID NO: 134013 - DNA, 270 bp, Enterobacter cloacae
ttgccgatagcccatggggtcgactttgagaccgcggtcgcactcagaaggatgggcacctttaccggcaccaccctggtgtacctcttctcctccgaagtgaaagccctgctcttctatatgccggttctgcgccattacatgctgttcttcactttctggaacactggtgttcgaatcggtgaatcccggacactgaccccggaatcatttgatctcgacgggttaagaccctttgtgaaaattccgggctcagggcatccggcctga

SEQ ID NO: 134014 - DNA, 381 bp, Enterobacter cloacae
atgaagtgtaatactgcaattttgtttgtggcgctcacactggcaatgcctggtgcggtgaatgccgcagccacagtggcggttcttaaccagatggccgcgcaaaagcaaaaggaacgtgaagaccagctcgaagccgtggaacgtgatgctttggctcagcctgatgcatggaaagcgtatctacaggtgtctgacgcagtgcctgctgatgctcccatcatgctgcaaaaccgctaccgcagcctcgccatttcactggcactgaaggctgcaatggcctgttccccagacgccctcaagctcctcgggcgtaacgacgtaattgagtttcgcgtactccgaacatcgttagtctcagcctgcagaacagctaaataa

SEQ ID NO: 134015 - DNA, 486 bp, Enterobacter cloacae
atggctgaagaatctcagaccgagcagtcccgcgcttacttttaccgcaactttaaatacacactcgaacatcttacccgggattatgaggctgaactgctgcgttattctgatgattcctgggaactcccacagcgagctgcacgcctcagcgctgctgttaaacgctataaaacctaccgaatgctgaattttatttttgagatagctgacagcatcgatctggacttaacgccgcttattgtaaagcgtctttgtatgcgtcttttcggccgctcgggtagtcaggacataattgtcgccacttttggccagaaaggtcgccagcaccgcagccgcgacaatacgcctgccatcctggatgaaatagcttcccgctaccgtcttgccgcacaatcctgccaggcctccaccctcagtgacattgaaagtgtgaaaaagcactatcagacaggcatccgcgcagtacggaacagggaaaaatga

SEQ ID NO: 134016 - DNA, 288 bp, Enterobacter cloacae
atggcggcacaaagaacatcgcgggagggggtgtccgaccgcaaaacaaaggatgtgaacgtaagcaaaaaaaggaagctggccgaccggttgtacggagcatttctgctcttatgcatggtagccgtggtaagcctttttttctacggacaaagccataacagcatgtggagcatcgttgcatttggtacaggcggtattttgtggtgtatcgcacctgagtattacaacagacctgacatcgacagcaaaaaggcgtcggaaggagaagacgacggtatggcctga

SEQ ID NO: 134017 - DNA, 387 bp, Enterobacter cloacae
atgaaacgtaataccgcaatcctgtttatggcgctctcactggcattaccaggtgtggtgaatgccagtgcagcagcggtgatttttaaccagacagccgctactgccaaaaaagagatggaggattcaatacagcttgaatctgtggaacgtgaagcaatgacccagtcggatgcctggaaagcatatcagcaggtgttatcagccgtaccccagaacgcccccaccgttctggaaaattgttaccgcagtctggccgtgtcactggtgcttaaggccgccatgaattgttctcccgaagcgctaaaacttgttgagcggaacgatgtgattgagtttcgtgtactccggtcatcgctgatatcagcctgcataaccgctaaataa

SEQ ID NO: 134018 - DNA, 186 bp, Enterobacter cloacae
atgatcggattcagtaacgattcatcgctggctgaacttagcatgatggccgaaggaaaaatgctgagtaattccacatacagaatggagctgaacgctgatgtaccggtgagcgtcagtctcaccgaggaggctcgtcagcgtcgtctcgaactgatccgggaagcagcggagggccgaaaatga

SEQ ID NO: 134019 - DNA, 417 bp, Enterobacter cloacae
atgagtgaacaacaggacaagccatatgacggtgactccgtccgcgatggcgtaacgatggtgggatggttgacctcccgaagcatgaaattagcaacccttgtgcttgtctcccagatgattatgacggggataacatggctttacatgaaatccactgagccggagatcgtcgtcttcgatatgaaggggacagtcgacctgttcatgcagcagtccgcccagttgcagctcgatgaagacaaggccagggtgctgacaacgcgtttcaattccgcgctgtcagacagtctcggtgaatggcaggcctcacataacgccatcattctggtgaaaccggcggtgatgagcgaccagcgggatatcacgaatgagatccgtgccgacattgcgcgccgcactcaggggggccagtga

SEQ ID NO: 134020 - DNA, 393 bp, Enterobacter cloacae
atgagcgcaaccacattaggagagttgtttccacacctgcggcaggccattactccgcatcgccgctatgctaaacaaccccgtaaagcctcagttgttacatcccgaatggggacggcagagcggctcaaaacgttgtatccggagctggattcctggcatccggtgctggtcactaaagcctggcttcactggtgcgatcagcatcagcaggaagcccgggagccgtcgaaacgagatgaacgtttcccggattacatcattcacctcttactggagaatatgcgggccgaggacagcgcgaaacgtaaaaagggtcagacgctgtcactttccgaacgtctcgacaggttatttgcgggggaagggcaggagagcaccgaatgtcactaa

SEQ ID NO: 134021 - DNA, 279 bp, Enterobacter cloacae
atgtcactaagacacgatgcagtggtgccgggaatgcctcaccgcatgactggctacaatgctgaaaccaaaggctgcgacgaagatgtgaatcgcctctgtcagctgtaccctgaaattgcatcatggcaaccggagctgattgccggtgcctggcgtcagtggtgcgtggagaaccagcttcagccgatagcgccggaaaaacgtgatgaggcgtttcccttctacctcgtcaggcttatccgcaacagaatggaggagatgaacgcatggcgctaa

SEQ ID NO: 134022 - DNA, 546 bp, Enterobacter cloacae
atggcgctaatcagctgcttcaccggtccggaggggctacagggggtacttacctgtttgcgcgacactgaaggcctgaccggtattcttgtcgtggttgggttgctcactggctggcttgttgttcagtacctggcaggtgcccggcgtgagcgccgggcgtgggagagtcgaccgggaatgcccgttccgccggcccactttggcagtgcctggcatgccgatgtggttcacgcctctgccaaccgggagtattaccagattatgctggccgaactggaaaaagccgtgactgacgcgggctatgagctgacgcgtgatggatcacagcgcgtgacgttgccagaggcagaccggcagaaaatcagccgcagggttttccgggctcgtcagctggatatgacgccgagagtgactgagcagatgatgaaagacagtgaagacgcagcggtgaacgatggctatgccggcaggtggctcactgtgcttattcgcggaagtgaaagcgctgggtggtacatcacaaagccacaaacgacccattaa

SEQ ID NO: 134023 - DNA, 324 bp, Enterobacter cloacae
atgactcaccctgatcctgtcaggccggtgacggttacccgtgaccgcaacggcttctggacgcacccacgctattttacccccaccagtgatgaggccgggcagtcagaattcggcgactggatgcgtctgcacaacctgacctgtgccacccgctggatggaaaatgatgcgcctccgcaggtgatcgccgcctgggaaaatggcgtagccgacatcagcgactggcagccctcggcgccagcgggtgaaggctggttcattggttccattcatgacactgatgacggtccggtttgtgtctggctgcgggaggtgaaatga

SEQ ID NO: 134024 - DNA, 624 bp, Enterobacter cloacae
atgaaaaacgcttatctccgggcgctgacgttcagcgtcatggttgctttcgcaccaatggtcgtggcgagcgcccagactgatatctccgtcactgaccatagctggatcaaaggtcagcaggacgtactggcggctatgaaggacgatctgcaaagccagtctgccggttcatacgtgttaccgcaggcgcaacaggatcttattacccgactacagggaaatatagcggctcagaccaccacgatgggggaaaaagacaccttcccggcgatttactttgtaagcctcggcatacctcgcgaaggcctgctgccgatgctgaaggaggcccgccgttacaacataccgccaacgctgcgtggcctcgtcaataacgacatgcgccagactgcggcagctatgtttgagctgagtaaggaggacagggacgccggcgtgcaaatcgatccgacgctgttcactcagtacaacatcaccacggtacctgcccttgtggtgacctgtcctggccaccatgacgttatccggggaagcttgcccctgaaacaggcccttgagaaagtggctgaaagcggcgagtgcgcggcaacggcacgccatctcctggaggccgcccaatga

SEQ ID NO: 134025 - DNA, 489 bp, Enterobacter cloacae
atgacaaaaatacttttcaccctcatccgtgatgcagggcggttttccctgtacgcccttgtcctcggcccggccctggtgctgtatgtcctggtgatgttagcggcgtatgatggctcactgtcccgtcagttcctgacgacctttcatgacctgactgacggcgtacctgccggcaatgtgatggcgtgtgttaatgaacacgagatggtcagtcgcttttcaccgccagagcccggagagaagttaaagcccgctcctgcgttagagaaagcccctcctgaagtgttgtgtcagcgtggctacgtggacagcgattcatgggcgcgttctgtggatgcaacgttgagaaacttctgggggatggcggtaatgtttggtgccggattgtggtttgtttcccgtcgtctctctcttgctgcccaaaagcgtatttcaccagacacacattcggttctggtacggaagaacagggagacacaggaatga

SEQ ID NO: 134026 - DNA, 606 bp, Enterobacter cloacae
gtgaacattaaaaccgggttcactttgctgctgttgtccctgcctctgctgacacatgccggggtacgcgaagaactgatggcgcttgaggcagcaaagtccgccccaccttctgctgctgcggccatcaccgcttctcctgttccggcaccgtccagcctgatggcattgccggatggacgaagggcaaacatgaaagattatgccgtggtgctctttatgcaggctcactgtgaattcagcgcaaagttcgatccgctgctgaagggctgggctgatgagcatgcaattaaggtctatccgtacaccctggacggtggcggcgatgtctcctttccgacgccgatggtaccgcgcaagagcgatcttagatcgcccattgcagacgagattgtgaccttcttcggaaacggtctgccgattgcgacaccgacggcttttgtggtcaacgtcaacaccctgaaagcgtatccgctgacccagggcgtgatggatattcccgcacttgaaagccgtatggccagcctgattcaggcggatatggataacgtcgatccgaaagcgctgccgcccatgcttgcaagtacgcaggtcacccctcagtaa

SEQ ID NO: 134027 - DNA, 264 bp, Enterobacter cloacae
atgactacaaattcgtatgcgctctcgcgtaccgaacgcgtgtggctgttattcagcgtaacgctgctcgtgtccgctgcattctatggcgggctggcctgtcgggtggtcagcgtcatgaaccgccctgagctgacgacctgcctgctggactttccggtacttcttctcatctcgctgagtatcggttttttttccatcgccgccgggctttacgtatgccgtcagagcctggtacggaaacgcagggaggaaattgcatga

SEQ ID NO: 134028 - DNA, 243 bp, Enterobacter cloacae
atggcagcagcacgtcagtgttctgatcaagtaattgtcacttccaaaaataaaactggtacgacaaaattaacttcaatccttaaagacgaagccactattgtgcgagtaggtgattcctcacaggaaacacatcagcttaaaggtttcccttatgttgagtctacctcacttgataatgataaacccgggtcagcatggcgcagttgcatgaaggtgaaagggtttacggttggtggttga

SEQ ID NO: 134029 - DNA, 366 bp, Enterobacter cloacae
atgaaaattccccagcagatggcaaccgactccttcattcaggtagacaggatttccccctaccggagccaacccggactcccctggcagaagactctgcctgtgaatgccattcttgaagatttttcgctcacgctgcgtcagcacgagcgtgtaggcctgctgggatgttcgggctgcggaaaatcgacattactgaaagttatcctggccctcgaccctgtgggtttccggtgtggcgccattgacgggcatcacgatgatccccggcgttccggtgagtcccagcgcctccgccagattgctgtttttctcaaggagtgcggaatggtcgcccggagccagggtggtgagccccgcttttga

SEQ ID NO: 134030 - DNA, 810 bp, Enterobacter cloacae
atgaacaacaatcttccttatccaataccagtacttgatgttgaaagcgtctacatttctacgggccattctgccctggtcagcgatgtcagctttcggctccaacaaggcgaacgggtctgtatcatcggctcatcgggatcaggtaagtctctaacggcaaaagccattatagggacattgtctgccgggctgtcattacaaggaagcattcgtatcaacggtgcggatgtcgttggccttcatcccacccggcgccctcagcatgcgctggtatctgccatctttcaggactcttccaccgcgctgaaccctctgatgccggtgggacgacagcttgctctggcgttgaaaacaggtgatagcgcgatgctgggctctttgctggatgcactacagctcagcgatatccctcaattgctctctcgctaccccgcagatctttccggtgggcagcgtcagcgaatttgcatcgcgctggcgttgctggggaataatcgcctgctgattgccgatgaaccgacgacggcactggatgtgattagccagcagcaggttctgcagatattaggtcagggttccatgttgagtgttccgcctgcgttgctcttcatcacgcatgatattgccgttgccacacagctttgccagcgaggtatcgtgatggaaaaaggcaggattgtggagtcaggcacaatggcccacctcctgaacgcggctgagcatccttacacccgtaaactggtacaagccgtgcgagccgctgaaaagacgttgataacacataccggtgaggcgctcgccggatga

SEQ ID NO: 134031 - DNA, 753 bp, Enterobacter cloacae
atgattaacctgatcctgactggctccaagagcatgacggttgggaataaaacctggcagtatgaccctgccacctactttgtgatgtcggttgatttgcccgccgtgggtaaggtctgtgcagatgagaaaaccggcgcgccgtatcttgctgtgagcctgacgccgaagccggaaattattgctgaactgctggatgacatgccggctgttaacaagatgcatctttaccatgcgggattttctgtggctccggttacgtctgaattgctggatgcatggctgaggatgctgcgattaatcaacaagcctgaggagatatctgctctggcaccggcctatgagcgtgaaattttattccgggtgttgcaggggccgcttggctggatgctgcgtaatatcgccacgccggaatcgcatctttcccggatttatagggtaattaactggttgaagctcaactacatgcaggccgtgcgggtggaagaattggcagcgatggccgcgctgagcgtttcggcatttcatcgtcattttcaggctataacggcgctcagccccatgcagtatcagaaacgggtgcggctcatgcaggcacggctgagattagccactaccggtgatagcattactgccatagcgcattctgttggttatcaaagtcatactcagttcagtcgcgaatatgcgcgccattttggtctttctccctcatcagatttgaaaaatattttgttaaccaagaacgcataa

SEQ ID NO: 134032 - DNA, 744 bp, Enterobacter cloacae
atgaaacatgtcttgattaccggcggaagccgcggcatcggagccagtacggcgattgaatgtgcacatcgcggctacggcgtcattctcacctggaatagccagccggaagcggccagccaggtcgttaagcggattaaaaacgaggggggacgcgcgttagcattgcggctggatttagaggatgtcggcagtttcagtacttttcgttcacaactggctatgacaatggagacacactggggcgccaggggactgaacgggctggtaaacaatgcaggatatggtttgtataaccccattgaaaccgtgactgaagcgcagtttgacagcttaatgaatgtgcatctgaagggccccttctttctaactcagacgctgcttccacttcttcagcgggatgccgctattgttaatctcaccagtgccaccacccgcgtggcgaccgctggtgtggcaccttacgccacttttaagggtggcctcgaagtgctgacacgttatatggccaaagagtttggtgaacgggggattagggtaaacgccgtatcgccaggcccgatccgtactgaactgggagggggcctaagtgatgagtttgaagcattgctcgccggacaaacggcacttggacgaattggtgaacctgatgaagttgcccgtgttatcgccggattactgacagccgatggcggctggattaatgcacagacgatcgaagtcgcgggcggttataacatctga

SEQ ID NO: 134033 - DNA, 402 bp, Enterobacter cloacae
atgctggaccatatctttattaccgtaagcgataccgagcgctcaattaccttctatgaacgcgtgcttcctcttctcggcatcatcaaccgccacgattatgacggcagcgatggcccgtcaggccatcccgatcttaagggatttggagccagtggccgcgtatttttctggctcaggccaggaatgccatgtccgcaggccgttcatgtggggttcgcggcggattctgaaacgatggttaaccaggcttatgcagaagcaatcgcggcgggagcaacagaaattcatccgccaggagcacaacttcattatgacccgcgctattacgccgcccaggtcagagatccggatggatacagcctggagtttgtttataaaagctggcagcacgggcgctga

SEQ ID NO: 134034 - DNA, 996 bp, Enterobacter cloacae
atgaaaaaactcatgatttacggtgcgacaggctataccggcagtatgatcgtacgacatgcgctggaatccagcctgcagataattattgccgggcgcgatcgggaaaaactggcagcgatgtcgtctgttctggatgtccctttccgggctttcaggctggataatcctgacaccattgatggtggcttagcggatattgacgctgtcttaaattgtgccggtccgtttttgcataccgcacggccgttaatggaggcagcaatccgccagaaggtacactaccttgatgtggctgccgaactggacagttaccagcttgcagaaatcctcgatgaagccgcttcttcagcgggcgttatgctgcttcctggctgtggcgggagcgtagcaatgctgggatgcctcgcagctcacgcggccacgcgggtcaaaaatccggccagtatctcactggcgctgcatatcaccggcacgatgtctcgcggctctgcggtaagcgcagctgagaatttatcaacccagtgcctgattcgccgtaacggccagctgatgcagagcgagtcaggtgagctgcggggcttcgattttggcaacggtctgcaggcctgttttcctgtgacgcttcctgatgtaatcaccgtctggaaagcgactggcatttctgatatcaaaactttcgtacatatttccggtgagggttttccgcagggcaatttggctgaactgcccgatggcccgacagctcaggaacgtgaggccagtcgttataaggccgttgcggaagtgctaaatgcagatggcgagaccctacatatgctactggatgcggttaatggatatagcttcactgcgctggcggctgccgaagccgggcgcagagtgctggcgggagaatatcgtccgggattccagacaccggcggcgctattcggcaaacactttgccgaaaccatcgccgatacccggattacgacatctgaagctctgcgctga

SEQ ID NO: 134035 - DNA, 741 bp, Enterobacter cloacae
atgactgcgaaaacatcggataaccgtacggcactgattacgggagccaataaaggcattggactggcgatcgcaaaaggactggcacggcagggatttcgtgtctggatcacagcgcgcgatcggcgacgcggcgaagaggctgttcagcaactaaaggcagaaggactcactgtccagctactgataatggatgtaactgacgacgcaagtgtacagcaggcagcggcaattttatcggcagtcactgacaggctggacgtactgatcaataacgcaggcgtgttgcttgatgcctcagctacgccgagccagacacgtttatcagacatgaaaaacacgtttgaggttaatttcttcggtccggtacgggtaacccaggcgtttcttcccctgcttcaaacagcagaaaatgccagtgttatcatgttgggaagcggtctgggatctcttgctctgattactgatgaggcatcaatttactcaaccgtaaacctgctcagctatagtgcctcaaaagtggcgctcaatgcggccacggtgtgttttgccaaagagttagccgaacagggcattaagatcaatgtcgtcgagccgggtaacgtcaaaaccgatctcaatggcaataccggtgcgcttacaccggaacagggggcgatgccggttatcaggctagcactggcggaaagacatggcccgacaggaaaattctttggcccggaaggccgacgaccctggtaa

SEQ ID NO: 134036 - DNA, 483 bp, Enterobacter cloacae
atgtatccgcaaaatgaaaaagatctggtctctgttctgcaggctgagcgcgacattacccgtctcatcaactcttacccttatctgctcgacagtggaaaatttagtgaagttgcaggacttttacgccatgccacgctggaggtgcccggtcatcagattacgggcaggaatgagattgagagatttctgtcgtcgggcattcagctgcaccaggacggcacgcctcgcacctggcacgccgtctccaatattctggttgagggaaaccccttcagcggtgaagcttcagcgaccagttattttaccgttcatcaggaactgcccggcttccccctgcaaccgatttgcactggtcattacaaagaccgctttgcactcatcggcgatgaatggcagttcgtacaccgtgccgttgtgcctcatctgataggggatatccggtttcatgtcagcggtgcaaatgcagaggcaaatctatga

SEQ ID NO: 134037 - DNA, 747 bp, Enterobacter cloacae
atgaaccagccactcaaaggcaaatttgccgtagttactggcggaagcagtggtattggcctggctatagccagacgcctgatcgatgacggtgcggacgtggtgattactggaagaaccgcagtaaaactgaatcgggcagttatgacgctgggagaaaaagcgaatggagttgtgactgatgtcagcagtagagcaagtcttgatgaactttaccagcagatcaaaacagcaactggtcatatcgatatcctggtggcaaatgcagggggcggtattcatgcgcctctcggtcaaataactgaacagcagattgatgaacagttcgcgaccaacgttaaaggcgtggttctgactgttcagcaggcgctgcctttgcttggacaaggctccagcgtggtcatcatcggttcaacatcctcctttgatcccggaccggcaatgagtatttacggtgcaaccaaagccgcagtgcgcaacatggtcaggagctgggtggcagaactccatggttcaggcattcgcctcaacatcgttagtccggggccgacgaacacgccttctctacgggctgcttttggcgataaggctgaagagggacttgccttccttaccgcgaaaagcccgctgggccgtatcggcgagccggaagaaattgctgccgctgtggcattcctggccagtgatgattcaggctatgtgaacggcatcgagttattcgctgacggtggcgcatcgcaaacctaa

SEQ ID NO: 134038 - DNA, 603 bp, Enterobacter cloacae
atgagtgagacagaaaataacgtcaggacacgcaggcgtgcatttgaccgggaagcagggattgagacagctcaggcactgtttcatcagagaggatatgacgctgttggtatttctgaactgacaaaagcattaaatattaatccgccaagcctttacgccgcctatggcagtaaagcaggcctgtttggccggtgccttgcgcgatacgttgatgaaggcaacctgccggcggataagatcctcatcgccggacgctctctggccgaagccattgaagaattatttatcacggccgcgcgtctgtacgtgaaatctccgctgcagcggggatgcctcgtcgcagaaggtatgcgtgctgacgatgaacaggcgcgagaactggcaaaccagtatgcaagaccaggaatactgtttattgaagattacatccgccagtcagaaccggaaagagcgaaagaactgagcgatttcgtcgtcaccacactgcgcggattttcggctgcggcggtcaccggcttatcacgtccccgcctgttaaaagtggcccgcatgaacgggcaagcttttgctgcgttactcagtctaaaccctgacacataa

SEQ ID NO: 134039 - DNA, 396 bp, Enterobacter cloacae
atgtctgccatcgaccatcttgagatttcagtgaaaaatgcgccgttatcgctgcgcttctatcagcaggcacttgagccgttaggcttcaggctggttattacccaggagccagccaaaacacgaaccggcggttctcgttacgggcttgggccgcagggctacccccggttatggctgcatgacaatgaggaaaccggtgcatcgttgcatctggctttttctactgataagcgcagcattgtggatcagttctggaaacaggctcttctggcgggcgggaaagataacggagcaccgggaattcgtaagcattatcattcacaatactatgcagcgtacgtttttgatcctgacggtaataatctggaagtcgtctgccagcaggtaagttaa

SEQ ID NO: 134040 - DNA, 423 bp, Enterobacter cloacae
ttgagaaacgacactcgattatcacgcgttctgcatgtgctggttcacctggcctgtgatggaggcaactatacctcacaacaactggctgaaatgctcgataccaatccggcgctggtcaggcgttcaatggctggtctgcgtgaggccgggtatgtccgttccgagaaagggcataatggcggctggtcgctaagctgcgatccgaccctggttacgctgttagatatttataaggccgtcgggatcacccatctttatcacctgggtattaatcgtgatgatcctcattgcctgattgaaaatactgttaatgacgagttagaagatgcgttgaaacaggctgaaaccctgctaatgttacggttaaatgagattacgctcagtcatctttgccgtaaattcaaagaaaacaatcagtaa

SEQ ID NO: 134041 - DNA, 396 bp, Enterobacter cloacae
gtgcaacacgttattgatcaatccgcccttcaggcactgtggtactgcttcgttctaagcctcgcggccgctagcatcgcctacaccattacccaaacggaactcttcctcccggttcgtaaaatcgccagtaaagtcggccatatgacgggttatcttttccactgtttttattgcatgagtcactggatcgtgtttgctggcgtgctgatttatcagcctgtccttatcagtagcgggcacctttatattgaccttattactagttcgttctttaccgtcacattaaccacctttattaatggcatcatgttccgagcctttattaatgcgatggcgaaaatgatgaaagaaaaagaactaaaagtcatgatggaaaaagaaaacgctaaataa

SEQ ID NO: 134042 - DNA, 1182 bp, Enterobacter cloacae
atgcatctttcgaaagagcaggcgaatgtctctgccagcgatttaagcctgtggatggccattatcatgctggcggtcggcagctttatcttcattaataccgagtttttaccaataggcttactgagtgatatcgtggggtattacggaattagttccggtcaggctggtctgatggtcaccgtgccaggtgtggccgcggcgattgcggcgccagtgttgacacgttattgcggtgcccataaccgacgttacattctgctggccatgacagttctgcttgtgatttcaaatctggcaatggccttctcaacaagtttccatctgtccctgttcgcccgattgttacttgggatcggcgtcggggggttctggtcattcgctgttccgtttggggtcaatattgttaaagatcaccacaaaagcagagcgacaactattatcacagcgggcgtggcggctggtaccgtcgccggggttcctatcggaacgttcctgggcgtccatttcggctggcagaatgcgtttctggttaacggtctgctgtcggtagtcgttttagtgctgcaatttatttttctgccatctctgaaagaggaatcctctctaacatttgccgatatggcgagggttgttctggagaaatctgtcaccaaacgcctgctgtctacgatgttctttgcggctgcgcatttcggctcttttacttacttcgaattaatcttggccaaagaagctaacctaagtcagagtttactgcctggcatgtttttgctttacggatgtacggggtttattggaacgtttatctcggaatatctggttaaaaagctaactgcacgcaatacatttcgcctgagcacagtccttctgtttacggctatcttgctgatgccactgtctgctgcgggctacccgacggtgatagccctgacgatgctgtggggactagcgtacgggctgatgcctgtaagtatcaatatctggttgtatgaagcgaataaaaaggactatgtcacttctacggcaagtaacgtttgcgtatatcagattgcagtggccgcaggatcgtttgcaggagggattgcctttaaccactatggtatcactgccactcttctgaccagtgtggccatcggcgtgttatgcctgatgatttcgttcctgaaaaccacacactaa

SEQ ID NO: 134043 - DNA, 897 bp, Enterobacter cloacae
atgcctattgaatactacaatcataatgattttatgagaaggatctctaatacaaaagaactctcattagttttcggatcagctttaactggtttgaaagatgatataggaattcttcaaccgccggcaattgttgacttcatccaagagaggatgaatgcagaaggttattctgccgatttcgatagacatatggagttaaataatgatgtgaacccataccaagcagcttttgaatttgtagcaaaattctatggggtagatggaataaactccataattactgacatagtcaagcttaacgaagatccaaaaacaggaagacagaaaataccttcgaatgtaaaatcattagttcattcaataaaaaatgggaagctcaatgtaaagtatataataactaccaatttcgatacaattatagaagaagcattagctgaagagggcattctgtgtaatagccttggtgttgtatcagattctaacatcaatgataatgccaacaaattaataacaatagtgcatatacatggtgtttggaatcacggtgatacaatgcatacaaggaatcagttagaaaacaaaagaggaaaaatagaagaatcattgcgaaacataattgaatcggggccgctgtgtgtgatggcatacggtgcctgggaggatagtttcacgagaagcttgacaaatatattaaaaaataacttcagtacttactctctcatatggtgcttttatgccgagaatgctggaatcatagatagagatagcaagcacattataaatatgttagaggatgcaataagtcgtgaacgagtgcagttttataaaggaattgattgccggtcaatttttagcgatataaatgccgaggtaaacacatcaaaaaagcattaa

SEQ ID NO: 134044 - DNA, 2067 bp, Enterobacter cloacae
gtgtacttaaacactgcaagtgagttgaaaccatattacataagcactaatgatgactacgcagcagtcagaaaaatagagcaaattgagtcactcaacattctaaaaagagaacactttgttttcattgaagctgggctaggttctggactctatgggtttgtttactcattagcaatgaaatacaagtttgagaaaaactattttaaattgaatttctctgaagttttagtaaaaaatcagatcgatgattgctttgtggcttataccggtgtaaacccacagctattaatctttgagatgaatagagccattgacacaccatatattttaattattgataatattcgagcggatatagagcaagaagcattaaattatttaatacaattagttaaaactgctaccataagaaatgaacaagtatattttatcttttcttccactataacttttacccagtttcagaatctaactgttaagttaagagatctgacttttgatgaaacctctttaattctaaagaaaaaatttaactcgtcaaaattagatacacgttctattattgatcttcacaatcttagtgaaggcatcatagttaaattagatcacattattaattgccttaattatagttcgccagatgaaatcttatctgagaaaggcttatttgatgatatatatcaatctgatgacattcctaggaacataattactcaaatcgattacatcagtgagcaaccagacaaacaactaacctttatgatgcttaaaattctttccatattgaaaaatggagagtctcttacgaatttgaaaagagataaactcggtaaagatttaaccttaaaaaatagccgagaaattattcagctaggattggcatcggttatagaaattgacacggcaacaacgttaataaagttaaatccgattgttaaagattatgttttatcgttacttacagaagaagacatttatacaatttcaaatgcttatcttaaactagtggtaaatgagacaaaagaaggaattcatttaggaataacaaacagaaaaataattgataagggatacaatactgaggaggataatgcagttgttttatttaaaaactctattaatcaatccaaatataaacttgaatctaatctaacaaccgatgatgaaaaagaacgagcgaaaataaaaacatcaaaactcctatatctttcattagcttatgtatactctttggataattccagtcgatataaagaggctatttatgcagcaacaagtttattaagtacaacagaaagcattgggaatccttttgcgtataaactttactatcacttagggtcttgtcaaagaatgcttaattttaaagatgaggcattatttaacctaagaaaagcgcgagaattatgcccactaaatgaaaagcatatattagaaaaaatatatatagaagagttatttatccttgaagagacagatatcaaagaagctatctctatagcaaaaagaactaaaagaggatttaaagcgaactctcttggccatataaattcagaatatatttcttctgctgaactaaataaaggtcaacggatcgttaaactagaatcacttgaaagaaaatgccgtcgtttaggctatcacacaacagctaacaatattttgtttacactaaactctattaaagaggatgctgataaaattagtgttttaaataaagtaatggatacagatagtaataattttaattattgcaaggcaatgatcttcaagcatgagattttaattagcaataaagagtacgacaaggttactgatagagacctcaatgaactgataaatattttcaattacatgtttaaacaaggattcaactctttgttaaatcgatgccatgacttaatatggcaaatagctgattacaagaggcttaataagattatcatagtcatttattttaagtcagctatatcatggcaactaaataataatatgaaaatgatcgagaaatataacgcactgtttgaggatattgatattgataaatatattgatgtgaaatga

SEQ ID NO: 134045 - DNA, 372 bp, Enterobacter cloacae
atgaagaatcaaatttataaccgtcatggcatatatgaaataatcagaaatcactatataaaaaactttccttatacggttcagtttgaagctcttaatgcaataaatgagcatattagtcttattattgatgatgcatcaatacaaaagaatgaagataacaaatacatatttataaataataacactaataaagaaactgatgacccatttgaaagtacagaaagaaatcttgctgcttacctgtcaagatcaagtggtatcgaggcactgttccaagatgtgaatgcattacaaaaatggttgctccaatctggttttatcagtggtggtatagcgactgaaaaaatgctgattacaaataaattgtaa

SEQ ID NO: 134046 - DNA, 468 bp, Enterobacter cloacae
atgacggcatctctgggtgatgtgtttggtggtttagcatttcttctctcaatatatgcgacaataaaaaccatcaagttcaatgaaagacaaaaggcattaattgaagcgcaagaaaaattaacaaaccttcagcttactaaagaggcaaatgaactggaaagctctaaaaaagctgatgtaagcgcaaacatagtcaacattggaaataacaaatataaacttaaagtatttaataaaggtaaaagtccagcgaaaaacgtaagaatcgaattccctgacaataactcaccagtttcaatgagtgacgttgaaagtaaattcccttttgaatctcttgttgcatatcaatcagttgacctcattgcatcaggggagttaggtagagcaagtaagtttaccgtaaggctaatatgggatgacgactttcaagatgggaatgaaagcgtcgttcatgtaacgtattga

SEQ ID NO: 134047 - DNA, 147 bp, Enterobacter cloacae
atgaaccgtctgatagaggagaatggcgaaaatattcattctcacgtaaatgagatacaaaaagatctagagaaagaattaataaaaaatctttctgataaattaaaaaaagccttcaaaggtaataagaatataaggattaaataa

SEQ ID NO: 134048 - DNA, 1398 bp, Enterobacter cloacae
atggctatacatgacgccgggatgtttaccgtgaaagaaatcaatcgcctcaaaatacttcaggatgtcattgaacgtaacctgcgtcctggccaagctgccgagatgctcggcatcacgccacgtcattgcagccgtctgctgaaacgttatcgtcagtccgggccgcttggtatgaataaccagagtcgcggtcgcactggcaaccgcctgttgcctgcgtcactaactgacgaggcactgggtatcatacgagaacgctaccgcgattttggccccacgctggcacgggaaaaactagaggaagttcacggtctgatcttgggcaaggaaaccatccggcgtctcatgataaaagccgggctctggattccccgtagacaacgcgcaccgaaaattcatcagccccgttaccggcggccatgtactggcgagctgatacaaattgatggctgtgaccatcactggtttgaaaaccggggtcggccatgtacggcactggtctatgtcgacgatgccaccagtcgtctgatgcacctgctgtttgtgaaatctgagtccacttttacctattttgaagcgacgcgcggctatatcgagaaatacggtaaacccatgatcctttacagcgataaagccagcgtattcagagtcaataataagcacgccaccacgggtcctggtgaaacccaatttgtccgagccatgcgctgcctcaatattaccccactatgcgcggagaccagtcaggcaaaggggcgcgttgaacgtgcccacctgacacttcaggaccggctagttaaggaactcaggctaaaaggaatcagtacgatagatgcagcaaatgcgtttgctgaagaatacatggccgattacaaccagcgatttgccaaagccccacgacatggctttaatgcgcaccggccactggcattaaccgatgatcttgatgcggaatttacctggcgtgagccccggcgggtttcaaaaaaccttactgtacagtacgataaggtgctttatctgattgaggacagcgaatacagccgacgggctatcgggaagtatatcgatgtctggcactatcctgacgggcataaggaactgcgcctgaatgatgtgctgctcccctattccacctatgatcggttgtcggaagttgaccccgtcgcgattgttgataataaaagactgggtcatgtgctggacgttgcccgccagttccagaaaaaaagggataataatcgatcccagtcgataccttcaggagatgagccttcccgcagacggcatgctccgagcatcaacaaacctcagcgatcgctgaacgaagaagacctgcttgaagccatgatacagcttcagggtagctcggaggccatttttggtaaaaggtga

SEQ ID NO: 134049 - DNA, 213 bp, Enterobacter cloacae
atggaaatcaaggcgcaacagtttgtcacatcaacgggacgacaggtgcttaccgacaacggccagcaaggtatgggtggcgtggcgggtatcggctcaacaactgaagagtgtcagggacgcgtagctgaagcgatttttgcgaactgcgcggaactggataacgaccagcttaacgagatcatcgattggattaggctctatcagcgctga

SEQ ID NO: 134050 - DNA, 129 bp, Enterobacter cloacae
atgacagtgaagaaccaggaacttatcgcggcaggattcaccagtaaggatatcgagagaatcaatcgtcaccatgcgacggggggactccatcttttcctggttctccctgtctggccatcagcgtaa

SEQ ID NO: 134051 - DNA, 945 bp, Enterobacter cloacae
atgcctcaaagaatcaatgattacaaacctgtactttcactactatcaacagcaaggcttgcaagcgttccagctatctttaacgtacacaccgatttggaaaagtatggatttagtctgtggatccagaacgcagctgcctcactctatccacttgtgcagcaacttgaactggtgctcaggaattcggttgataaaacagctcgtacaagatttggtgaacggtggtgggatatcatctcgtatgataccacgaaagaaaatcacgataagttcatcaattgcatcagagatgctgaacggagcttattaaaaaaatggaaagccaaagaggtcgctcgccttggtttaagccatccatcgcaaataacaacgactccaccagttttttcacatgatgatattattgcagcgaccacattttccacatgggagaatgtttttcttgaggcgcttcatacagacgataactctaaaaaaaatgatttcctttggcctaactctcttccaaaagcccttagaaggctaagtgaaattgataacaaacccgccgaggcacgtcgtaagctactgaatctactaaaagaaataagagactaccgcaatagactttttcatcatgactgtatctggataaaaattaaaactgtagataaacagactgcaattgaatcaattcgtgaaaaaatcaatctaatcgaaaagatcataacagcgatcagtcccgtaactaaccgcgctttgactgcgtggggtatgtatgaaaatgcccgcaggatctgctccacagcagaactatccatttacacaaatcttaactatcaggtaccaaatatagctacgccagggctgcttggtcaattaatgcttcagacaaatggtggaaaagaaacggtgcctatgatgctgcaaaatgaggcctgtgttttctataaattaaggtga

SEQ ID NO: 134052 - DNA, 1173 bp, Enterobacter cloacae
atgccttttgttgtgtatatcttcaccctgagcgcatttgccctgggcctggcagagtttgtacccattggactcagcgatgtcatggcttcgagcctaaatgtcaccgttgaacaggtcggcgcgactgtcactgcctatgcattgggtgcaacattctctgcaccaatcctgaccgcactaacagccagttggtcaagaaaaaatgtcatgctggtgacggccctggtatttaccctggggagcttcgtggctgcttttgcttccacactctccgcaatggttattgcacgctttgtggctggcatcgggcatggattattcctggctgtagctgcaagcaccgcagcgaagctagcgggacgcggtaaagaaggacgtgccgtagcagttgtcttcggtgggtttactctggcaatggctattggtgtaccactgagtacctggcttggcggtgtcatggcatggagacccgtccttgctgttataagcgtatttggtgcaatcggcttcgctggtttgctgtttggaatgaaagatccggtccgcgcattacatggcgaacacagcgcctctgcaatgaaaagtatcgcagcattgctgaacccaacattactcagtgcagcactcgttaccgtactgtcttatgccgggtcgttcacggcctacacgtatattgcaccgatgctgacacaactgacaggcgtcgctgcggcgagtgtgggcattttcatgctcgtatacggtgtgtttgctgctatcggtaacattctgggtggcaaaatcacagattcgctcggcgtgaaccgggctaacattcttatcgtcggtggcatcattattattgctcttgggatgtgggtcttctcaggttcggtggtcatgatggggattcttgtggcactcctcggtatgtttactttcggcgctgtacctgccttacaggcaagattgatcagcgttgcatccgagaaagctcctcatgctgcaggtgttgcatctggactgaatattgctgggtttaactcggggatagctcttggttccgtaaccggtgcttttacaatcagtagtatggggatcgtatataccggccttacaggtgctgttctgtctcttttgggacttctgctgctgctttcacaaattgccaagagtaaagcacaccattaa

SEQ ID NO: 134053 - DNA, 705 bp, Enterobacter cloacae
atgttaactcgtgattacattctgagtggagaattccaccgggcacatgaattaacactccctggtcatatgatctgggatcatgaaaaaatcacagagtctatgctgacaacattgaaggagcgcccttctggcgctccagtctggatttttgcttatggttcattgatgtggaatccattacttgcagtggaggagatgcgtaaagcaactctttctggctggcagcgccgtttttgtatccgtctcatctccggcagggctgtcccggaaaaacctggccgcatgttatctctggataaaaacggagatgccgtggggattgcattcagactgtctgacagcggacttgagaaagagcttttgctggtctggatccgcgaaatgataacgggcttgtatcagccctgctggctgcgggtggttctggattccggggagcaagtcgatgccattacatttgtcagcgacagacatcactcactgtacatcagtaacagctcggtagaagatgtttctccggccattctccaggctcatggaaccatcggcagtaatgcagattatgtctatcagcttgagcaaaccctcgattcctggaatatcctggacagctatgtttctgatgtgtctaaatctctacgcgccattactcagagctgggatggttcttaccagaataggggacatccgggagaaatttga

SEQ ID NO: 134054 - DNA, 876 bp, Enterobacter cloacae
atgagccatttgacgcacttgagaacatttctggaagtctatcgtgttcgctccatctctcaggctgcggttaatttagggatcacgcaaccaacggcatccttacacattcaggctatcgagatgtttgtcggtaaacctctttttattcgccagccaagaggggttgcatcaacagttgcagctgatgagctggctcgttctgtcgcgccgcatcttgatagccttgagatgaaactggccgcctatcggctagggcaaactgagggcggcacggttcatattgtcggtccatctgattttatacataaccgactggcttcttctctggcagctctgataccggatggtttcaattttcggttacatactggtaataagcagttgatttatagtttactggattcaggcgccattgaccttgcggttacggcatcaatgccagatgagcatcagtacgcgttcgctcatttattgactgaacgaatgatgcttgtatttgcgccagcgctagccagagcagtaggcaaaccgacgaaagaatcattaagccagactccgctgatagcctacgatgaagatttacccctggtcagaagcatctggttgtcgttttttcaggtatcaccggatattaaagcagcatttactatccccgatttgcgcattattaaaaacatggtaatcgaaggccatggctggagcgttctgcccgattatcactgtcaggatgccttgtctgacggcaggttgcttgccgccaatgctgttacagatgctcctactaataacctgtatcttgtctggaataagagggggctgaagagtcaggcagttggttatattcgcgattatattcttactctctttcggtga

SEQ ID NO: 134055 - DNA, 1146 bp, Enterobacter cloacae
atgctaaatgtactgaataataatgcgggtggtgtgctgacgcccgctttcatgctgacaattaacagtaaggatattaccggcaatatcagtgaccggctcattaacctgacgctgaccgacaaccgcggatttgaggctgaccagcttgatatagagctggatgattcagacgggctggtcgagcttccgttgcgcggcgcggttctcagcctgtatctgggctggaaaggctttgctctcgtgggtaaggggagctttaccgttgacgaagtggagcacaggggcgcgcccgacaccgtgaccatccgcgcacgcagtgcagattttcgcggcacgctcaattcacgccgggaagagtcatggcatgacaccacaattgcctccattattgaggcgatcgcggcacgtaataaactgaccgccagcgttttgccggagctggcaaaaatcaaaattcctcacattgaccagtcgcaggaatcagacgccaaatttttgacacgccttgcagaactcaacggcggtgaggtgtcggttaaggccgggaaattgctgtttatcaaggccgggcgcggagtgaccgccagcggaaaagcgatcccgcaggtaacgatttcgcgcgaagatggcgacaggcatcaattctcaatagccgaccgtggggcatacacgggtgttacagcgaaatggctgcacaccaaagacccgaaaccgcaggctcagaaggtgaagctcaagcgcaaggagaaggaaaagaaaaccaaagccacagctcaccctaaagcgaaaacacccgtaaaagaaccggaagcgcgtgagggcgaatacatggccggtgaggccgataatgtgtttgcactgacaacggtttttgccagcaaagcgcaggctatgcgcgcagcccaggcaaagtgggataagttacagcggggtgttgcagagttttccatcagtcttgcaacgggtcgggcagacctctacccagagacaccggtcagggtgacagggttcaagcgcgtcatagatgagcaggtgtgggtaattacgaaggtgacgcactcactcagcaataacggctactcaacggggctggagcttgaagttaagttgtctgatgttgagtatgaagaagttgaaaaataa

SEQ ID NO: 134056 - DNA, 480 bp, Enterobacter cloacae
atgatgcttgcattaggtatgtttgtttttatgcgccagacgctgccctatcagaccctacagagggatgctgaataccgatggccgtcaaatagtcgcgttggtaaacgtgacgcctttcagttcctcggtgtgggtgaggaaaaaatcacccttgccggggtgctttatcctgaggtgacgggtgggcgaatgacgatgaccaccatcaggctgatggctgaggaggggcgcgcgtggccgctgctggatggcaccggcatgatttatggcatgtacgtcatcaacaacgtgagcgacaccggcagtgtttttttctctgacggaacggcgcggaaaattgattttactctgacgcttacccgcgtagacccttcacttgctgcactttacggggatattggcaagcaggccgaaacccttatcggcaaggcgggtgatatggcgaagaaattacccggtatggtggggatgggttaa

SEQ ID NO: 134057 - DNA, 2553 bp, Enterobacter cloacae
atgagtgacaacgttaagttacaggtattactcaaggctgtagaccaggcgacgcgccctttcaaagcagtgcaggccgccagcaaaactcttgcgggtgatatccgtggctcgcaggatgaactcaaggcactgaatgcacagtccaggcgtattgagggttttcgcgccatcagcgggcaactggctgtcaccggcacggcgctgaaaaaggccaaagacgatacggcggcgctggcactccagatgcgcaacacggcaaacccgacagcggcacaggtcagggcgtttgaaaatgccaggcgcagcgcggccgcactccaggagaaatacaacagcctgcgccagtccgttcaccgtcagcgtaccgagctgcaacagtcaggtattgatacgcggaatctggccgatgccgggcgcactctgcgtgccagcatcagtgaaactaccgcaagcattgaccgccagcgcgcggcattagcccgcgtcagtaagcaacaggaaaggctcaacgcggtaagccagcgttacgagcgcggcaaagccgctgcggcgagcgtgcgaaatgtcagcgccgcagcactcggcgcgggaacggctgcggtgtatgccggtagccggttaattgccccggaaattcagacgcagaaaaacggcgcactgattgccgcccgtcagggagaggacaacacaaaatcaacacagtacacggaagtgatccagcgtatcagtgcttccggcgtgagtgatgacctcgaaaaaatcaccgaggcagtgtcggctgtgcgcagtaccctcggtacgctggggaatgtgggtgaggcagagttagaccgtatcagccgcaaggcgctggatatgcaaaccgcattcggtacggacacgaccgagagtatccagattgccgccatcatgatgaaaaacgggcttgcggcgagcagtgatgaagcaatggatttgattgtttccgggatgcagcgggtatctgccgaaatgcgcggtgaaatgccggagattcttcacgaatattcgacccacttccgaaacctcgggttcagtggggctgaggccatgtctctgctggtcgacatgtcaaaacagggtaaatttgccctcgacaagaccggggatgcgattaaggaattcagcattcgcggctctgacatgtcaaaaaacagcgttgcggcatatgaagagattgggttaaacgcaaaaaaaatgtcccgcgacatcgccagtggcggagagaaagcccgtatggccatgcagaaaaccgcaaagggattgctggccatcaaagacccggcacagcgggcaaacgcggctatttcactgtttggcacgccgattgaagatttatccattgaccagatccccgcgtttctcggtgcgcttgccggggtcaaaaatcagttcggggatgtcagcggagcagcggacaatatggggaaaaccctgcgggataatttatccggtgacgttgcccgtctgagcggtcagtttgaggggctgcgtttttcggtcttcacccaaatggatgcgcaactgcgtaccctgacacaaaccgcgacaaactggctcggcaaactgaatgcctgggtgaatgcaaaccctgcccttgcctcaaatctggtcataattaccggcgcaattgcagggctggccgcagtgctgggtggtctgggtctggttgtctggcctgttatgacgggcatcaatgcgctgatagccggggcggggttcctcagtgtcggtttcagtatggcgggtagcgcgatagttgcagccatcagtgcaataagctggccgattgtggccgtagttgctgctgttgtggccggtgcactgctcatccgtaaatactgggagccgataagtgcctttttcggtggcgtggttgaaggtctgaaagctgcctttgcacctgtcgcagagctttttgctccacttaagccggtatttgactggctcggcgtaaagctccaggagttatggcaatggttcagtaacctgattgccccggtgaagtcgacgcaggacacgctaaacagttgccgtgatgccggtgtgttattcggtcaggcgctggccgatgccctgacccttcccctgacggcctttaacaagctgcgtagcgggattgactgggtgctggaaaagctcggcgtcatcaataaagaatcgggaacgcttgataagacggcggcgaaagcaaacgcggcggctcagtctggtggttatgtcccggcgaccagtacgtatggaggctaccagccttaccctgcaccggcgggtaatgctccggggtggcaggcgtatcagcccgccgctggtcagcccgccagcgtcaccggcgggtatcagagctacaagccggtgacggcaccggcgggacggtcttatgttgaccagagcaaaaatgactatcacatcacggtgcagggcggcgctggctcggggacaaaccttgaccgccagttgcaggatgcgctcgaaaaatatgagcgtgacaagcgtgcccgtaatcgttccagcatgatgcatgacgaataa

SEQ ID NO: 134058 - DNA, 276 bp, Enterobacter cloacae
atgcaaaaagaaaacgtagttaccctggaaaatccggtcaaacgcggtgagcagatgattgaccaaatcaccctgattaaacccagtgccggaaccctgcgcggggtgagtctggctgcggttgccagttcggatgtcgatgcactgattaaggttctgccgcgcatgactgccccgatgctgaccgagcaggaagtggcggctctggaattgccggacattctggcgctggccggtcaggtggttggttttttctcgccgaactcggcacgctag

SEQ ID NO: 134059 - DNA, 1191 bp, Enterobacter cloacae
atgagcgattttcatcatggcgtgcaggtcgttgaagtcaacgacggcacgcgcgttatttccacagtttcaactgccattgtcggcatggtctgcacggccagcgatgctgatgcgacgatgttccccctcaacgaaccggtattaatcaccagcgtgcaaagcgctatcgccaaagccgggaaaaaaggcacgctttctgcggccttacaggccattgctgaccagtcaaagcccgtcaccgttgtggtgcgcgttgaagaaggcaccgacgaagatgaagagacggcactcgcgcagacggtctctaatatcatcggcaccactgacgaaaacggcaaatacaccggcctcaaagccctgcttactgccgaagccgtcacgggcgttaagccacgcattctcggtgtgccggggctggactcgctcgaagtggcaacagctcttgcaccggtctgccagaaattgcgcgcctttggttacgtcggcgcgtggggctgtaagaccctctctgatgccatcaaatatcgtgacaatttcagtcagcgcgagctgatggtcatctggcctgattttctggcatgggacacggtcgccaacgatacggcaacggcctatgccaccgcgcgtgctctgggtctgcgtgccaaaatcgaccaggagcagggctggcacaaaacgctgtccaatgtcggggtcaatggcgtcaccggtatcagtaaatccgtgttctgggatttgcaggaacccggcaccgatgctgacctgcttaacgaggcgggtgtaaccacgctgattcgccgcgatggtttccgattctggggcaaccgcacctgctcggatgacccgctgttcctgtttgaaaactacacccgcaccgcacaggttatcgctgacacgatggcggaagcgcacatgtgggcggtggataaacccatcacggcaacacttatccgcgacatcgttgacggcattaacgccaaattccgcgagctgaaaaccaacggctatatcgtggatgcaacctgctggtttgatgaagaggccaacgatgaagcaaccctcaaggccgggaagttgtatatcgactatgactatacgccggttccgccactcgaaaacctgaccctgcgccagcgcattactgataaatatctggcgaacctcatcagctcggtcaacagcaattaa

SEQ ID NO: 134060 - DNA, 405 bp, Enterobacter cloacae
atgaattattatttttcgaaagcagaactgggtttctattgcgacgaggtgaatgaatccatcccggctgatgcagtagaaatcagtgaagaattatatttttctctgctggatggacaatccacgggaaaagtgatcgccgcaaatgaggcgggcaaaccgattttaaccgcccaaccggaacccactgtcgaggagttagttgcgctggcggaagaaacgaaaacagtgctgatgaaggaagctaacgccagaatactccctttgcaggatgctttcgatttggggctggataccgatgaagaaaaacagcttttgcttgcctggaaaaaataccgcgtgttgttaagccgggttgatacagaaacagcccccgacattgaatggcctgaactgcctgtttaa

SEQ ID NO: 134061 - DNA, 2187 bp, Enterobacter cloacae
atggcagtgaaatataaaacggtgatcaccaaagccggtgcaattaagctggccgcagcgaccgtcccgaacgggaaaaaagtaaacttcacggcaatggccgtgggtgacggtggcggtgtgctgccgacccctaatgcaaaccagacgaaactcatcaatgaggtctggcgtcatgacctgaacaaaatcaaccaggacaataaacacaaaaattatgttgtggctgagctggtcatccccccggaaaccggcggtttctggttgcgcgaaatggggctttatgatgacaccggcacgctgattgcagtcggtaatatggccgatagctacaagcctgcactggcggaaggttccgggcgtgcccagactgtgcgcatggttatcatggtcagcgatattgcatcagtcgagctgacgattgacaccacaacggtgatggccacacaggattatgtcgacgacaggctcgcggagcacgaacaatcacgccgccatcctgacgcctcgctcaccgcaaaaggtttcactcagttaagcagtgcgaccgacagcacgtctgaggcgctcgccgctacgccgaaagcggttaaggcggcgtatgaccttgctaatgctaaatacacggctcaggacgccagcacggcgcgaaagggtatcgtccagctcagtagcgcgaccgacagcacgtctgagacgctcgcagcaacgccgaaagcggttaagacggtgtatgaccttgctaatgctaaatacacagctcaggacgctaccacagcgcagaaaggcattattcagctcagtagcgcaaccgacagcacgtctgaggtgctcgcagcgacaccgaaagcggtgaaggtagcaaacgataatgcgaaagcggccaatgacaatgcgaatacccgtttaccgattgcaggcggctggctgacaggcggttttggaattaaaaccacgattggcaacgtgtcattcggggtgggtaattccgatgtttatattgctaacggtacgtctaataagtttctgcaactgaagcacacaggcgagctgaagtatgacgacaaggctatttaccatgagggatataagcccacggctgacgatgtgggggcgctgccagtaaagggtactgccgaagcggccaggaaacttgccaccgcgcggaaaattgccggagtggcttttgatggtacatccgatatcaccctgaaaacctcgaatctggatgatgcgggtacagcggccacaaaagatgtgacaacctccaatatcgataccactggtgggcgagtattgaaggtgggggattttggtctgggtgccatctctgccgtatatgtttcagatgcaaacaacgtcaactataacggctttttcagtatgagcgcggagggcattcatggcccggtcgctaataatgtgaatgagtttattcatatccagtacaaccaaaacactggccggcaaattggctggcgtgcagggcgtcctgatgagccgattcgccacaggactaaaatcaatggaggctggcaatccgactggataaaaatttacgattcaaataacccgccagcggctgatgaagtcgatgccgtttcagcgtcaaagggtggcactttccagaaagaggttatgttctcggaaggcgtaaaaatcaggaacagcacggggatttatcagggcgaggatagcgtaggtttttccagtaataacctgatgctgaaatcatggaacgggatcgggttctattgcaccctcaccgggagtgaaggtgtctccgtctttgtcgatacccgtggcggacatgtggaagcgaaaggccagattaagccgggtgattttaccaatttcgacaaccggttttataccaaaacgctggctaacagcactttccagaaggccaacaccgcatccaaaggttcgcgaggatggtttaaagattctaatacgggaatgatttttcagtggggaattgagagcgttagcggggcaaccacgcggacattcagcttccctgtttcgtttccgaccggttgcgcctcgctgacggtatcaaacaaccttgagcgaacggccggagaaaactcaatgacaggttacataaaatcggcatcacaatattccctgtcaaatactgccgcaacagatcgccagttatgctggtttgcagttggttattag

SEQ ID NO: 134062 - DNA, 531 bp, Enterobacter cloacae
atgagtgattcccgactgttgcccgtgggttcgtcacagcttgaagttgcggcggcgcgcgcctgtgcggagatagaaaacacccccattccattacgcaggctctggaacgcagacacctgcccggcaaatctgctgccgtggctggcgtgggcattttctgttgaccggtgggatgagaactggccggagacgacaaagcgtgaagtgatccgcgcggcgtggtttatccatgcgcataagggaacgattggcgcagtgcgtcgagtggtggagcctctcgggtatctgattaacgtcactgagtggtgggaaaccaatgacccacccggcacgtttcgtctcgatattggtgtgctggaaaccggcatcaccgaggaaatgtattacgaaatggagcggcttattgcggatgcaaagcccgccagccgccatcttatcggcctcaatattattcaggacattccgggatatctctataccggtgctctgacctatgacggcgacatcatcacggtttaccccggataa

SEQ ID NO: 134063 - DNA, 909 bp, Enterobacter cloacae
atgcctgttattgacctgagccagctccccgccccggatgtggtcgaggagcttgattttgaaaccatccttgccgaacgcaaggcaacgatgatttcgctgtttcccgaagagcagcaggaggccgttgcgcgcacgctggcactggaatcggagccgttaaccaagtacctggaagaaaacgcttatcgtgaagttatctggcgtcagagggttaatgaggctgcacgttcagtcatgctggcttatgccgccggtaatgaccttgacctgctgggcgcaaactgcggtgttgagcgtcttgtcattacgcctgctgatgattccacgttaccgcccacgcctgccgttatggagtcagacactgattttcgtctgcgcattcagcaggctcccgaggggctgagcgtggccgggtcaacgggggcttatcagtttcatggccgcagcgccgacggacgtgtcgcagatatttccgttatcagcccgcagcctgcctgtgtaacggtttccgttctctcacgggaaaataacggtgtggcctctgatgagttgctcgctatcgtccgaactgcgctgaacgatgaggatgtgaggccggtttccgaccgcgtgaccgtccagtctgcaaatattgtcgactataaaatcaccgcatcactttacctttaccctggccccgaaagtgagccggtgctcagtgctgcaaaagcgaaactccagacctatatcacggcacagcaccggctcgggcgtgatatccgcaagtctgccatttatgccgcgctccatgtcgagggcgtccagcgcgtcgagctggcatcccctgcggcggatatcgtgctggatgacacccaggcgtcatggtgcagcgagtacggcgtgactatcgggggtaatgatgagtga

SEQ ID NO: 134064 - DNA, 348 bp, Enterobacter cloacae
atgacagcccgttatatcggcatgagccgaaccgatggccggtcgctcaccgatgaagagcatatcagccagagcctgagtgacatcctgcgaacgcctgtcggttcccgcgtgatgcgccgggaatatggctcgctcctgcctgacatgattgaccagccacaaaccccggcgcttgagctgcaaatcatggtcgcctgttacatggccgtgcagaagtgggagccgcgcatcaccctgacctcagtgaccacggaacgccagttcaacgggaagatgattgtcaatctgaccgggaaacgtaccgacaccgggggatctctttcattaaccctgccagtgagctga

SEQ ID NO: 134065 - DNA, 642 bp, Enterobacter cloacae
atgaatacactctcaacgcttcaggatatcgctcgcgcgatccgaaatcttatccgcaccggcattgtgactgaggtcaatctcagggatggattgtgtcgagtccagaccggcggaatcaaaaccacctggcttaactggatgacatcccgcgccgggcgctcgcgtgtctggtgggcaccttctgtcggtgagcaggtgcttgtgctcgccattggcggcgaactcgacaccgcgtttgtgttaccggccatcttctctgatgactttccagcaccttccagctcagccgatgcgcttcgtattgatttccctgacggggcggtcattgagtatgaacctgaaaccggtgcgctgactgtttccgggattaaaaccgctgacgtgaccgcatcaggatccatcactgcgaccgtgccgctggtactggttaaagctgaaacccgcatcacgctggacacgcccgaggtggtgtgtaccaacaagctgaccacgggcacgctggaagtgaagaaaggcgggaagatgaccgggaacatcgaacacaccggcgggaaatttacttccaacggcgtgcaggtggatgaccacgaccacggcaacgtcgaacgcggcggaagctggacggaggggacaaaatga

SEQ ID NO: 134066 - DNA, 450 bp, Enterobacter cloacae
atgagtgacttcacgccctttgaggacaggctgaccgcgctgatagctgccctttcccctgctggccgtcgtcgcctgaccactgagattgcgaaaacggtgcgccagcagcaacagcagcgtatcaagtcccagaccgccccggacgggacaccgtacacgccccgaaaacgccagccggtcaggggtaagaaaaaccgtgtaaagcgggaaatgttcgccaaactgcgcaccaaccgttacatgaaagtttcgggtgatgacagtgccgcagcggtggaatttaccgggaaagtgcagcgtattgtccgggttcaccagtcagggcttaaggataagcccacacgcaacagtgctgctgtgttgtacccgacccgcgaattactgggcttttctgatactgaccagcagctcgttgagcgcattattatcgaccatctggccggttaa

SEQ ID NO: 134067 - DNA, 468 bp, Enterobacter cloacae
atgctgaaaccagccagtctgcgcaacgcgctctatgatgccgtgccggtgctgcgaacaaacccggacatgctgcgtctgttcgtggataacggcaaaatagcggcaacgcttgccgcctcgctgtcattcgaaaaacagtacacgctcaatgtggtagtcacggatttcacgggggattttgatttgttgcttgtcccggtcatggcatggttacgcgagcaacagcccgacatcatgaccactgacgaagggcagaaaaaagggttcaccttttacgctgatatcaacaatgacagcagtttcgatatcagcatcagtctgttgctgacggagaggacgcttgtcaggactgtaggggatgcactccatgtggataatattcctgaaccggagccgccggaaccggtcacgcgaccgatggagctgtatatcaacggtgaactggtgagtaagtggaatgagtga

SEQ ID NO: 134068 - DNA, 417 bp, Enterobacter cloacae
gtgtccagaatcattgtgatcctccttgttgcggcactggcggggctgctctggctgcgtcatgaaaacggtaatctgcgctcatcgtttgataaagcaaaccgtgttgccagtgagcaaaagacgacaattgggatgctgaaaaatcagctcagtgtcgccgccatccgggcagataaaaacgagcgggcgcaggtagcgttgcgccagaaactgaatgccgccgaagcgcgagaagcgcagcgggaaaaaacgattgtgaggctactcaatgaaaatgaagactttcgccgctggtataacgctgttttgcctgagcctgtgcgcgggctgcaccggcgagccgcctgcgcagacgccagtgattgtttacaacggttgcccgaaagtcagtctctgcccgatgccgggcagtga

SEQ ID NO: 134069 - DNA, 429 bp, Enterobacter cloacae
atgaaaaagtttttatcttctctgatgctgaatatcgtgattgcgatcctgttagtgctgagcttaaaaaatcctgacggtgtggccgtgaattttgtagcgctgtgggcgtgttttggttgtctggtgcttatcgtggcaagcctgctggccgttgccagttttgaggactggctggcgagcgttaatgactccagccgtgagcctaagctcaatgaattattcagggcgcttatcggcaaaactgtccctttgtggaagcggtcatggtcactgattctcgtcgtcggtacggtgataagtcttgtctgtgcaggttacatttttattccgcttgtttattccctgtgcgtcatggtcttccagttaacccgcagcatgtaccgtcatcgcattaaggaggcgggattgtgtccagaatcattgtga

SEQ ID NO: 134070 - DNA, 513 bp, Enterobacter cloacae
atgtcttcaatcgttaaacgttgcagtgtggtcgcagtgctggcgctggcggcgctgatgcctgattttcgtctgcttaacacctcgcccgaggggctggcgctgattgctgacctcgaaggatgtcgcctgacgccttaccagtgcagtgcgggagtgtggacgtcaggcatcggccacactgccggggtagtaccaaaaggggaaatcaccgagcgtcaggcggcggcaaatctcgtcgcggatgtgcttaacgtcgagaaacgtctcgcggtctgtgtgccggtggaaatgccgcagcatatttacgatgcgctggtcagcttctcattcaatgtgggaaccggcgcggcctgccggtcgacgatggtctcgtatatcaagcggcatcagtggtggcaggtgtgtgaccagttccctcgctgggtttatgtaaacggggttatcagcaaagggctggaaaatcgtcgcgcgcgtgagcgtgcttattgtctgaaaggagtttctcaatga

SEQ ID NO: 134071 - DNA, 237 bp, Enterobacter cloacae
gtgggactgaatatcgaaaaaattacgtcttttattgcctactggctgagcgcggctctggccgcatttggggcgatgacaccgcaggatttcgccgcttacttcggtgtatttggtgtcgtccttactgtggccgtgaactggtactaccgccgcaaaagttatgcgctgctggaaatgcagttcaggcagcacggcgtgactgaggagagcatgagcaatgtcttcaatcgttaa

SEQ ID NO: 134072 - DNA, 204 bp, Enterobacter cloacae
atgaatacccgcgcacagcagggcgacacccttgacgctatttgcgcccgttattacgggcgtactgagggggtatttgaggcggtgctcgccgctaatccgggtctggctgaactgggtgttgtgctgccgcatggcacgctcgtcgaattgcctgacgtccagaccgcatctgttacggagaccgtcaatctgtgggactga

SEQ ID NO: 134073 - DNA, 501 bp, Enterobacter cloacae
atgacgacacttgttattaataacccgccgcagaagcgcgatccgctggttataccgcctgtacctgatgatgagcaggtcattaaaaacaccccctttttcccggacgttgacccgaagcgtgtgcgggaagaaatgcgccttgagcagaccgtttcccctgtgcgcctgcgccgggcgattaaggccgctatcgccgaaacaaacgctgagctgagcgaatggcgggagtatcaacaggacacgggctatgcgcggctggaagacgtaccgaccgataagctcgatggcgaaagtgtgcgggtcttccactacttaaacgccgtgtgtgcaatgacgactgcaacactttacgagcgttacaggggggtggacgccagcgccaaaggcgacaagaaagccgacagcatcgacagcactatcgatgaaatgtggcgggatatgcgctggtcagtcgcgcgtattcaggacaaagcccgctgtattgtcggccaaatctga

SEQ ID NO: 134074 - DNA, 762 bp, Enterobacter cloacae
atgacgagtcccgcacgccgtcacatgatgcgggtctcggcctctgaaaccgcgcggcgggctgctgctccgctgcgcaatgcaactgcctacgagcagatgctggttaagctggccgcagactcccgcacgctaaaacaaatcagctccatcgagcgcaaggctgacaaaaaacgcgagctgctcccgttctatgccccgtgggtcagcggcgtgctgacgcaggggaaaggcactcaggatgacattgtgatgacggtcatgctgtggcgtcttgatgctgacgacatcgcaggggcgctggatgttgcccgctacgcaataccccacgggctgaccatgccagccagcaaacgcagcacggcctgtctgctggcagaagaggtggcgctctcagtccagcgcctgcgtgatgccgggcaatccgttgagctggcgcacctgcttgacaccatcagtctgactgagcaggcggatatgccggatgtcgtgcgcgcgaagctgcacaaaatgaccggctatgtgctgcgcgatgctgaccagttgagtgaagcactgacgcaactgcaacgcgcgatgcagttagaccgggtggtcggggtgaaaaaggatattgaacgccttgagcgtgcgcttaagccgaaacccgatcccgcagcggtgaaaaccacgcgaaatgtctcagcgaaaaaggcaacggctaaaaacacaaattcaccggcgaagcgagggcgaggacgcccgaagaaggtcgccggataa

SEQ ID NO: 134075 - DNA, 1074 bp, Enterobacter cloacae
atgcgtaaagaaactcgttttaatttcaacaaatacctgagccgcgttgctgagctgaacggtatcgacccggatgacgtggcgaagaagttcagcgtcgagccatctgtcacccagaccctgatgaacaccgtgcaggcgtcctccgcgtttctgaactctatcaacatggttcccgtggatgagctgaagggtgaaaaagtgggcgtgggtgtgaatggcacggttgccagcaccgccgacaccgccggtgatgacgagcgtaagaccgccgatttcaccgcgctggagtccaacaaatatgaatgtgcgcaggtcaactttgacttccacatccgttacaaacagcttgacctctgggcgcgctaccaggacttccagacccgcatccgtgacgccattgttcagcgtcaggcgctggatttaatcatggcgggctttaacggtgttgagcgtgcggcgacctccaaccgtaagcaaaacccgaaattgcaggatgttgcagtgggctggctgcaaaagtaccgcaatgaagcgccagcacgcgtgatggataaagtgaccgccgaagatggtgcagtggtttccgatgtgatccgcgtgggtgagaacggtgattacaccaaccttgacgcgctggtgatggatgcgaccaccctgattgatgaaatttatcaggatgacccgcaactggtggtgattaccgggcgtcaactactggcggataagtatttccctatcgtcaacaaaacgcaggaaaacagcgaagcgctggcggctgacatcatcatcagtcagaagcgtatcggcaacctgccagccgttcgtgtgccgtacttcccggcggatgcaatgatggtgacacgcctcgacaacctctccatttacttcatggatgagagccaccgccgcgccatcattgaagagccgaagaaagaccgtatcgaaaactacgagtcgatgaatatcgattatgtggttgaggtctacgcggccggttgcgtgattgaaaatatcaagctgggtaagtttgaaaaacctgccgaagcaaaagccccggaaggcggagagtaa

SEQ ID NO: 134076 - DNA, 855 bp, Enterobacter cloacae
atggcaaaaaaagtttctaaatggtttcgcattggcgtcgaaggtgacacctgcgatggccgtgtcatcagcggcgaggatattcaggatatggccgacacgtttgacccgcgtgtctacggttgccgcatcaatctggaacacctgcgaagtgtcatccccgacagcgtactcaagcgttacggcgatgtggtcgagctgaaagccgaaatcatcagcgatgactctgcactgaacggcaaaaaagcgctgtttggcaaaatcgccccgctcgacgagctggtgagcatggtgcgtgccggtcagaaagtttacacctctatggaaatccgcccgaactttgccaacaccggcaaaagttatctcgtggggctggcggttactgatgacccggcaagcctcggcacggaatacctggaattttgcagccgcgccacacagaacccgctcgccggtaaaaaagaccagccgggcgatctcttctcggtggcctcactggctgagctggagtttgaagatattcccgacaccatgctcaacagcctgaccgacaaggttaaggccattttcagccgcaaacaggccagcgatgacgcacgttttgccgatgtgcacgaagccgtgaccaccgttgccgggcaggtgcagacctctctttctgatacggaaaagcgtctgggtgagatggaaaccgcctttgcgaatctcaagcagaatgtcaccgccacggcggaacaaaacacccaggcattcaccgccctgaaagcctccctcgacagcaccggcaatccttcacagccacgccgccagttctctaccggtggcactggcgaagagttccagacgaactgctga

SEQ ID NO: 134077 - DNA, 1770 bp, Enterobacter cloacae
atgaccatttcaactgacctttcattgttaaatgacccgcgacgacaggcgcgcctgttgtactggcaggggttcgccgtgccgcaaatctgcgaaatgttgcagctcaagcgcccgaccgtgcaaagctggaaacagcgggatggatgggaggacacagcgccgattaaccgcgtggaatcgacgttagaggcgcgacttatccagctctatgcaaagccagacctgacgccgcatgacttcaaagtcgctgattttctgtcgcgccagatggagcggctcgcgcgcgtgaaccgctacggccagaccggaaacgaggtggatttaaaccccagcattgccagtcgcaacaaaggggatcgcaaaaagccgaaacggaatttcttcagtgacgaagcgattgaaaagctcgaagagattttcttcgaccagtcgtttgaatatcagctcaactggcataaggcaggcatcgcgcaccgtatccgccacatcctcaaatcgcgccagattggcgcaacgttttactttgcccgcgaggcactcctgcgcgccctcaaaaccggacaaaaccagatatttttgtcagcgagtaaaacgcaggcttacgtgttccgaaaatacatcatcgcctttgcacgtctggtcgacgtcgacctgtcaggcgacccgattgtcatcggcaataacggcgcggagctgattttcctcgggacgaattccaacaccgcgcagagtcacaacggcgacctgtatgttgatgaaattttctggatccccaacttccagaagctgcgcaaagtggcctcgggtatggcctcacaatcacacctgcgcacaacctatttttcgaccccgtccacgctggcgcatggcgcgtatccgttctggtcaggcgagctgtttaaccgtggccgcagtagccgcgacgaacgtgtcgacatcgatatcagtcacaaggcgcttgccggtggcgtactttgcccggacggccagtggcggcagattgtcaccattgaggatgcactcgccggtggctgcaccctgtttaacctcgaccagctcaaacaggaaaacagcgcggatgacttccgtaacctgtttatgtgcgagtttgtcgacgataaggcgtctgtattcccgttcgaggagctgcaacgctgcatggtcgatgcgatggaagaatgggaggactttgaacaatttgccgaccgtccgtttgactggcgcccggtctggattggctatgacccgtcacacaccggtgacagcgcaggctgtgcggtactggctccgccactggttgccggtggtaagttccgcatccttgagcgtcatcagtggaaaggcatggactttgccgcgcaggccgaagccatccggtcgctgacagaaaaatactgtgtcgactatatcggcatcgatgcgaccggtatcggccagggtgtttaccagctcgtgcgctcattcttcccggccgcgcgcgccatccgctacacgccggaaatgaaaaccgcaatggtgctcaaggcgaaagacaccattcgccgtgggtgcctggaatatgacgccggggcgaccgatatcacgcagtcatttatggctatccgcaaaaccatgaccagcagcggccgcagcgccacctatgaagccagccgcagtgaagaggccagccacgcggatatcgcctgggcaactatgcacgccctgttaaacgagccgctttccgccggtagcggaatgcactccacctcaattctggatattaactaa

SEQ ID NO: 134078 - DNA, 1023 bp, Enterobacter cloacae
atgaaaaaacgccaaaagaaaacccgcaccatgaccgccagcgcgccgcaaaaaatggaggcgttcacctttggtgaaccctccgccgttctggatcgccgcgatattctggactatgtcgaatgtgtgcataatggcaggtggtacgagccgccggtcaacttctccgggctggcgaaaagtctgcgctctgccgtccaccacagctccccgatttacgtgaagcgcaatattattgtgagcacctatattccgcacccgctgttgtcccgtcaggatttcagccgtctggtgctggattacctggtatttgccaacgcctatctcgaaaagcgcctcagtgtgaccaataaaatcatgaagctggaaacctccccggccaaatacacgcgccggggtgtggaggatggggtgtactggtatgtgccgagttttaccaccccgcacgaatttgcgcccgacacggtgtatcacctgctggagcctgatattaatcaggagctttacgggatgccggaatacctgagcgcgctcaattccgcctggctgaatgaatccgccacgctgtttcgtcgcaagtattaccagaatggcgcgcacgcggggtacatcatgtacgtgaccgatgcggcgcaaagcagcaccgatgtagagtcgctgcgctccgcaatgcgtgactcgaaaggacttgggaattttaaaaacctgtttttctatgccccgaacgggaaaccggatggcatcaagattgtgccgctgagtgaagtcgccacgaaggatgattttttcaacatcaaaaaggtgagcgccgccgaccttcttgacgcgcaccgcgtgccgtttcaactgatgggcggcaagcctgaaaatatcgcatcactgggggatgtcgagaaggtggcaaaggtgtttgtacgcaacgagctttcaccattgcaggagcgtttcaaagaaataaacgactggttaggaatggaagtgatccgctttaaggattacgacatcgaatcaggctcagagtaa

SEQ ID NO: 134079 - DNA, 231 bp, Enterobacter cloacae
atgcgagtaaacatcaccatagataaagagcaaaaaactgctcagcagattgttgatgcttttcagagggaattagaccgacgaataaaaatttttttcccattaacccgagtgagtgtaaaaaaaggctcaatgaccggggtcgatattatggggttcgatagcgaatctgaccgggaacggctcggcggcattcttcaggaagtctgggaggatgagagctggcgataa

SEQ ID NO: 134080 - DNA, 183 bp, Enterobacter cloacae
atgattggcgagtgtttcagccaaacgcagcataaatgggcatgtgtgcaattcattgccgaggtatctctgatagcaaattgcaaatcatcagatcttaaacttgccctctccatcattgctgaccttgcgagcagagaaaacgacaaagctgataatgaacttttctatgaggttcaataa

SEQ ID NO: 134081 - DNA, 2391 bp, Enterobacter cloacae
atgcctaactctgcggaagataaatactatccgtggcgtgctgcaagaaaagcggttaacccctacctgaacccggcggaagttgcgccggtttctgcgctttcaaacctgattactctctacgctgcggacaatgagcaggaacaactgcgccgcgaggacatgagtaatcaggtttgggaacgctttttctataacgaatcacgcgatccagttcagcgtgacatggcgcaggagcaactcgtaagccgcgcaaaaatgtcacgggaacaacaactcttcaacccagaccaggtaattattgccaacgttcttgccgaacctgcacacatcagcaagcccctgtttgaacgaattaaatattttcaaagtctggacaaaccgaaggcttattcccgctatttgcgtgaaaccatcaggccttgtcttgagcggctggagcgtgtgcgagtcagccaggtatcggcatctttccgtttcatggcaagccatgacgggcttgatggtctgcttatgcttcctgaaatgaatcaggagcaagtaaagcgactttctaccctggtcgctgctcacatgagttcgtgtcttgatacggcctgcggcgatctgtttgttgatgatgacgtaaagccagaagaaatccgcaagtcttgggaaagggttgcggcagaggccatgcgccttgatgttataccaccggctttcgaacaacttcgccgtaagaagcgccgccgtaagccagtgccttacgagcttattccgggttcactggctcgaatgctttgcgcggactggtggtatcgcaagctgtggcaaatgcgctgcgaatggcgcgaggaacagttgcgcgctgtttgtctggttaacaagaaagcttcaccgtatgtcagctatgaagccgtgatccacaagcgcgagcaacgccgtaaatcacttgaattcttccgctcgcatgagctggtcaacgctgacggcgatacgctggacatggaagaggtggttaacgccagcagcagcaatcctgcacatcgccgtaacgaaatgatggcctgtgttaaggggctggagcttattgcagaaatgcgcggagagtgcgcggtgttctataccataacctgcccttcacgcttccatgcaactctcaataacggcagacccaatccgaagtggactagcgaaaccgttcgccagagtagcaattatctggtggagacgttcgcagcattccgcaaagcgatgcacaaagccgggatgcgctggtatggcgtccgcgttgctgagcctcaccatgatggtactgtccactggcatctcctgtgcttcatgcgtaagaaagaacgccgcgccatcactgcaatgttgcgtaaatttgctatccgagaagaccgtgaggaactgggttctaataccgggccacggttcaagtctgagcttataaacccgcgtaaaggtacgcctacaagctatatcgcaaaatacatcagtaagaatattgacgggcgcggacttgctggggaaatcagcaaagaaacagggaaatcgctgcgtgataacgctgaaaatgttaacgcatgggcatcgcttcaccgtgtccagcaattccgatttttcggtataccgggtcgccaggcatatcgcgaattgcgtttgttggctggtcaggcatcaagaaatcagagcgacagcaaagcaggcgcagcggtactggataatccacgccttgatgccgttcttgctgcggccgatgctggttgcttcgctacctacatcatgaaacagggtggcgttttggtgccacgcaaacaccaccttgtcaggactgcatatgagcttaacgacgagccgagcgcctatggcgatcatggtgtgcgtatttatggcatctggtcaccaatagcagaggggcgaatttgcactcacgcggttaagtggaaaatggttcgtaaagccgttgaccttcaggaggcgacagccgacaagggcgcttgcgccccttggactcgtggcaataactgtcccccagtggaaatagtgaacaactcagaggctggtagtgttgtcatgccgcctgatattacacacatggatcatagggagttgcaggaatacctgcacagcatgggcaaaaaagaattaagggagttaaatacccggttacgcctggtaaaaccgaagcgcagaaagggttataaacaggaaatatcaactcatcagcgcttacagcttgaggccgaactacgttccagaggctttgaaagcagtgattcagaaattgacctgcttctacgtggtggcagcattccgtcaggtgctgggctgcgcattttctaccgaaaccagcgtttgcgggaagatgataaatggcgtcagtgttacgacaccacatcttaa

SEQ ID NO: 134082 - DNA, 282 bp, Enterobacter cloacae
atgagcattcacatcgaaatcggtgataactgggttattaccagcgacaaatttcaattcattttgaatgaaaagaaagttgttaaatcagggaaaaatgctggcgagctatgcctctgtacaatcggctattacccaaaaatcaatcagcttatttctggcctgattcatcaccatattcagcattctgccattatttctcttgaagcgatggccgctgaaattgagcgcgtagggatgctctgtagcaaggctctcaatgaggctgatgctgatgcctaa

SEQ ID NO: 134083 - DNA, 228 bp, Enterobacter cloacae
atgcagaaagaatcaccaaaaatgtttaacgctgaaagcgatcccctcatggccgtgattgatatagccaagaaagaagagcgtaaagcgcgcgccgctgcggtttcaattcgccttgaagctctggccgttcatatcgcaaacaagcgtatgtcctgctttgaagtggctgaacttctgcgcggtgaggctgcgcgttatgaaaacgagtcaatggagttgcactga

SEQ ID NO: 134084 - DNA, 231 bp, Enterobacter cloacae
atgaagactcttcaaattgcaatcccttctggcccagacttcctctcatatgaagagttcgcagagcagtacggatgcagcctcaacacagtaaaagacatgattaaacgtggcgagttgcttactgtccctcgtgttcgcgagagcagcatgggcagaatcaatatgatagctttccgagcgcgtctgctggctcaggcgattaattcgcgttatgccgtgtttcagtaa

SEQ ID NO: 134085 - DNA, 918 bp, Enterobacter cloacae
atgctatccgttcaattggatgattgcaacgtccgattgttaatttatggggtctttatggacgatgaaagcggtgttgctcaagaaattttcgaaagaattcttatttcttatggtgttaggacaagggcagcatattcagaaataacaaaaatacctttgcctactatcagcaactggatgaagagagggaagattccgggtgactatctgattcaatgctcattcgacactggcgctgatattaaatggcttcttgagggtgttgaacttgcaaatgtaagtttggctcctggcaaatatcccatgaatgggaaaaagctgatggaggcgatggagaactctggcggtaaagagattttacagcgcatcttgcaggcttatggtttcactttgcagaaagaactcggcgatcatctgggaattccatcaggaactatgagtgcatgggttcgccgtgagcattttcctggtgatgtcgtaattgtctgtgcgcttgataccggtgcgtcattgtattggttagctacaggtaacggcagtatacaagaacaacgaactgaagagccgacatcattgcctgtgggtttgaagcagttgccaaaatacagcgttcacaccgggcaaatggtggaatctggattgtggttctgtgattcttcaatgattgatacaaacgtaataaagcctgtgcttgtagagaaaaatggcaatggctggcttgtagatcttgatgtgaaaaatttcgctaatggccgctggcttatcgatgttgatggcacctgcgatgtatacgatatcgcgcgtttacctggtaataagctggcagtaaaaaatgattcatctcagtttgaatgccttgttaatgaaattatctgcgtaggcatggtctttctaaccttaagcaaaagtatttaa

SEQ ID NO: 134086 - DNA, 276 bp, Enterobacter cloacae; identical to SEQ ID NO: 14803

SEQ ID NO: 134087 - DNA, 2163 bp, Enterobacter cloacae
atgctaagccccctgcttcgtcgctatacgtggaacagtaactggctgtataacgtcaggatctttatcgccctctgcggcaccgtcgctctgccgtggtggctaaatgacgtgaagctcaccatccccctcacgcttggggtggtggccggtgcgctggcggatctcgacgaccgcctggccggtcgtttgcgtaatctggtcatcacgctggtctgcttctttattgcttccgcctccgttgagctgcttttcccctggccctggctgtttgccttagggctgacggtgtctaccagcggcttcattttgctcggcggcctcgggcaacgctacgccactatcgcgtttggcgccctgctgattgccatttacaccatgctgggcgtctctctttacgatcagtggtatcagcagccggtcctgctgctgttgggcgctatctggtataacctgctgaccttaaccggacatcttatttttccggttcgtgccttacaggacaacattgcccgcagttacgaacagctggcccactatctggagctgaaatcccggctgtttgatccggatattgaagaggacagccaggcgcccctgtacgatctggcgctggcaaatggccagctggtcgccacgctaaatcagaccaaagcgtctctgctcacccgtctgcgcggcgatcgcggtcagcgcggtacccggcgcacactgcactactactttgtcgcccaggatattcacgagcgcgccagctcctcgcatgtgcagtacgctgacctgcgcgagaaattccgctacagcgacgtgatgttccgtttccagcgcctgctgtcaatgcagtctcaggcctgccagcaacttgcgcgctcaatactgctgcgcacgccctatcagcacgatcctcgctttgaacgcgcattcagtcatctggatgcggccctcgatcgcgttcaggccagtgggacatcgccggaacagttcaaagccctgggattcttgctcaacaacctgagagccatcgatgctcagctcgccaccattgagtctgaacaggcgatggcaatgccgggcaatgacgccgacaaccagcttgccgacgacagtctcaacggtttcagcgatatgtggctgcgcctgagccgtcattttacgccggaatccgccctctttcgccatgcggtaaggatgtcgctggttctgtgcgtcggctatgcatttatccagataacagggttgcaccacggttactggatcctgctgaccagcctgtttgtctgccagccgaactataacgctacccgccatcggctcgcgctgcgtattgtcgggacattagtcggggtcgccatcgggctgccggtgctctactttgtgccatccgtagaagggcaactgatcctgatcgtgattaccggtgtactgtttttcgccttccgcaatgtgcagtacgcccacgccacgatgttcatcacgctgctggtgctgctctgcttcaatctgctgggtgaaggctttgaagtggccctcccccgcgtgatcgacacgctaatcggctgcgccattgcctgggcggcggtgagctttatctggccggactggcgttttcgtaacttaccgcgcgtgtccgacagagcaatgaacgccaactgccgctatctggatgctattcttgagcaataccatcagggtcgcgataaccgtctggcctatcggattgcccgtcgcgatgcgcataacacggacgcagagctggcttccgttgtctcgaatatgtcaactgagccgcgcgccacggcagaaatccgggagacagccttccgcctgctgtgtctgaaccacacgttcaccagctatatctctacccttggcgcccaccgtgagaaactgacaaatccgggcatcctggcgctgctggacgacgccgtttgctacgttgatgatgcgcttcatcatcaacctgcggatgagccacgggttcaccaggcactggatgaactggtgcaacgtatcgcacaccttgatcctggcaccgacaacaaagctccgctggtcctacagcaaattggcctgcttatcgctttgctgccggaaatttgtcggctgcgacagaagatcgctacctggcggaatgatggccctgcgactcaggcagcgcattaa

SEQ ID NO: 134088 - DNA, 216 bp, Enterobacter cloacae; identical to SEQ ID NO: 10294

SEQ ID NO: 134089 - DNA, 1458 bp, Enterobacter cloacae
atgctttcgaaagtccttggattggtcagggaagttttgatggcaaagttttttggtacaggagatgtcaacggggcttatcgtattgcgcagacgggaacccttgtaccaatcaattttatgaccagtgacagccttaattcagcattcatcccattatataaaaaatatctcaccgagaatgaatttcgtgcatcgactttcaagctctgtatgtttatttttttcgctctgatatctgtatttatattcattgttctgtattttttatcagactattgggtcggtatcatggctcccggaattggcgggaatgcgcgtgagatgtcgactgagttacttaagataatggctatctgttgtcctttctatcttttttcagcgttaataaattatttgtcgatggcacatggagattataaacccatatctatgcgggcctccattcaaaatgtcggcatgctgttgggtgtggttgctgcatattattataataattatctattacttgcatggggttttacaggtagctatataatttttagtatctgggcgcttatccgtgcaagaaagggcactattctagccctccctggtcgttttgatgcgaccgaagtcaaattggtaatgaagagtttttggataacgcttcggcccttgcttatactacctctaatattgcaaggtaatattactctggaaagagcactagcatcattaatcagtattgatgtagtgtccggactcgattatgcccggtttattactgacactgttgtttttattttgtctgtgccgatagcatttgctggattatctgaatggtcatcgcagaagccagaagttgttcgagataagataaggtttatttataattggctggcactgcttgttataaacatgtcttttttcatttttttctatgcaaaagacatcgttattctactgtttatgcgtggtgcatttgatcagcactccgtaacggtaacaactgatattattcaaggaatgtgcataggcctttgggctcaggtgataggttatatattcattaaggcattgagcgcacatctcaataataagaaagtattagttgtgatgatggttgcattgctgagcaatgcggttgtcaacctggcgacgtataaaatgtggggtgcatttgggttagggctagggaattcgatatacagtttaatgatgtttatccttagcgcgtgttacttaaggattgcaaaagatctttttcctgtgataattaaaatttctttgggattaattctttatacatctattatcttgactcttgggcattacattattcaacctgataatgttattttccgacttttaattaatggcgcaatatttgtgatgtttagtctgttatgggcaatgttattcccattgtaccgaaatggtattaaagggattttcctaaaaaaaggactgagatag

SEQ ID NO: 134090 - DNA, 357 bp, Enterobacter cloacae
atgaacaaaaaaaaagatataaaagacatcgtcgtcttatccacggcagactgggacaacccattctggacaaataaacagcatgttgccttagagctggcaaaccgtgggcaccgtgttctttacatagagtctctgggactgcgccgacctagtgtaaataagaaagacctttcgcgtatcttccgccgggttcttaaagcgattaaagcacctcgaaaagtgcgcgacaatgtctgggtatggtcaccaatttccatcccatttaataactacgcttttgtgcgtaagcttaataaactcagcgggggtgtgggcaacgcgaaaatagtctttaaagtcacacaaggacgctaa

SEQ ID NO: 134091 - DNA, 384 bp, Enterobacter cloacae
atgttcaacgtgtcgcccatcttcctgcaggaatacagcaacagcacctacagcaatttcagcgaagcgagccgcgcctttctcaccatgaccatgcgcccgtggctggcgaacttcgagcaacaaatcaaatctgctttgctggtggcctctccggttccgggaacccgctatcaggtggagtttgactctgctgaccttctccgtgccacacctaccgagcgttacgccacttatgagcgaggcattaagaacgggatcatgaacccgaacgaagcccgtgagcgcgaggggatgccgccgcgtgaaggtggtgacgaattcagccaggcatggaagcaggaagtgaagatcagcaaagacggcaaggaaggtgacgcatga

SEQ ID NO: 134092 - DNA, 357 bp, Enterobacter cloacae; identical to SEQ ID NO: 120278

SEQ ID NO: 134093 - DNA, 561 bp, Enterobacter cloacae
atgaaaacaatcgattttgaaatccgtacctccgaagtgagcgccagcaacaaaaagctggtgggctatgccgtgcgctggaacagcctgtcagaagttatctgggatgagttccgcgagcagtttgcgccgggagcgtttaaagacagcctggcatccggtagcgatgtgcgtgcgctgtacgagcataactatacccagctgctgggccgcaccaaatccggcacgctggtgctgtccgaagacgataccgggctgcgcttcgagctgaccccgccgaatacccagcttggcaacgatgtgctggagctggtggagcgcggggatatctcaggcatgagcttcggtttccttgcgctgaaagaggcgtgggatattgctcagtctccatatctgcgcaccgtgaccgccgctgaactacgggaaattaccgtaacatcaatgcccgcctacccggaatctggcgtggaaatcgctcaccgttcgcttttctcccaacatcctgaactgcgccgcgctggcgataaccgtcgccgctgggctgaattagcggggctttga

SEQ ID NO: 134094 - DNA, 357 bp, Enterobacter cloacae; identical to SEQ ID NO: 120281

SEQ ID NO: 134095 - DNA, 216 bp, Enterobacter cloacae
atgcctgataaaaagttagtggttatcggtgatggttctgagatggataagatcaaacagctggcgacggataatatcacgctactcggctatcaggatgatgctgccatggtagactatatgaagcgtgccaaagcttacgtatttgccgcagaagaagattttggtatctcacctgtagaagcacaagcaagcggtacgccggtcattacgtaa

SEQ ID NO: 134096 - DNA, 996 bp, Enterobacter cloacae
atgaaaattagcgtatttaaagatcaaaagaaagaattcatttgccgtggggccttaattgcatcggatttattttggcttaatgtttctttggggctttcctttttaaccgtcatgttttttattggcgatttaaatacctttatgccaattcgccagattgatgtgagggtgttatcacactttattctgactgtaatgtgtgtgttttggtttggcgtccgcttacgtcattatgcacaaaagaaacccttctggtctgaacttaaagaaacactgcgtactattgtcattttttcgatcttcgatcttgcattagtggcattttctaaatggcacttttctcgctatatttgggcctactgttggctatatgccatcattatggttccgttatcgcgtgaaattacaaaaatcattcttaacaaatttggctactggaaaaagcgcaccgttattttaggttccggacgaaatgcgcgtgaagcctattatgctttacaaagccatgaggtgtctggtttcaaaattgatgcgttttgtgattttgatgcgacagccgatattatggaagagtgtccgatcgttaaagatgaagagacattgcttactcattataattcgttttcaactcagttcgtagtcgcgtgcgattttgacgaaaaagataaatttgaaaactggttacgattccttgcgaaacataagtgccgtaacgttataattattccatctctgagaggattccctttatacggcactagtatgtcatttatatttagccacgaagtattacttcttcaggttcacaataatctgtctaaactgacctcgcgcttcattaagcgtactttcgatatcgtctgcaccttaggcattcttcttgtttcatcgccactgctggtttacctgtggtataaagtttcccgtgatggtgggccagctatctatgctcatacgagaattgggcgccgtggtgagaaatcagatcattaa

SEQ ID NO: 134097 - DNA, 156 bp, Enterobacter cloacae
atgattaacgcccgcagcagtacggtaatcccaaatacgaatcttatgcaggagatacttggcaagccagcctttaagacctttgttcaggccagattcacgcaaatactggtgctggaaatcccaagcataacgaataggcgaatggacatatga

SEQ ID NO: 134098 - DNA, 303 bp, Enterobacter cloacae
atgaaggagttacgtttttatggtgcaagcgatgacctatttgagtgtgagggtgccattcgagaggaaatcggctgttacagtcatccgggcatttatcacctgaaatcagctgaaggcgaaatgcaagtcatcgccacttacaccgatagcggctgttggtctatcggcgtctgtcagattgatgaagatgtcccgatcccaaagtgggaaacatcgttcagcacgcacgagaaaggctatagcgtcgtccttaccattcaggttccagatgacactgttctggtgcaggaagacgaatga

SEQ ID NO: 134099 - DNA, 171 bp, Enterobacter cloacae
atggtggcggtgacgctggtgcttggggcgggtgatttcgccctgacgctgggcgggtttacggtgggcgggattggcacggcgaccttcggcgcgatcctgctcaacgccctgctgagccgccggaaaagggatgtaccgcaaggaaaagccatcaccccctccacctga

SEQ ID NO: 134100 - DNA, 570 bp, Enterobacter cloacae
gtgcgacaactggcaacaatactcttatctctggcggtgcttgtcaccgctggctgcggctggcacctgcgcaacaccacggcagtgccagctcagatgaaaacgatgatcttcgactcatccgatccgaacggaccgctgagccgggccgttcgtaaccagctgcgtttgaacggcgttgaaattattgagaaaggaacacttcgccaggacgtgccatcgttccgtcttctgggaatgagtctgagtaaagacacggcttctattttccaggatggtcgtacggcagagtaccagatggtaatgtcggttaacgcaacagtattgctgccgggtaaggacatttatccgatcaataccaaagtttatcgttccttctttgataacccacaaacagcgctagccaaaagcgctgagcagcaaataattatcaatgaaatgtatgataaggcagcagaacagctgattcgtaaattgccaagtattatggcaacttccagacaaggtgctgacatcattgagaaaccagatgttaaatcaaatctggattcaactttcatgggtaactga

SEQ ID NO: 134101 - DNA, 621 bp, Enterobacter cloacae
gtggtgcatcctgtctttattgcgttagtctgtctggaaaggatcacaaacaagaagttctgtatggaaattattttaatgcgtcatggaaagcctgcatttaagggatctgcaaaggtaacgagccgtgaaatggccaactggattgctgaatatgatctttctgatacaggagaagatatcccgcctgagtccagtaaatcattagcattcagcgcatcgcgaatcataagtagtcctcttcccagagccctttcttcgctgagggcattagggtgcgagccggacgtcattgatgaggtttacagggaagctggcctgccggtatttcacatgcccggtttaaggttatctccaaccgtgtgggcagctatttttcgcgtcatgtggctatgcggcctgtcccgtaatgtagagcgcatgggaaaagctaagcagcgtgctgctcaggctgcgaatcgcctcgtcgggttggcaaaagcatccgacggccctgtgctttttatgggacatggggtgatgaatcggctaattgcaagagaactgaggtcgttgggttttaaagaatctcgttgtcagggtaatggttactggaacgcgagtatctacaggctccagtaa

SEQ ID NO: 134102 - DNA, 3132 bp, Enterobacter cloacae
atgaaaattctgagcctgcgtctgaaaaatctgaattcgctaaagggtgagtggaaaattgatttcaccgcggagccgttcgccagcaacgggctgtttgccatcaccggcgcaaccggcgcgggtaaaaccacgctgctggatgccatctgcctggcgctttaccacgaaacgccgcgtcttaataaggtctctcaggcgcaaaacgacctgatgacgcgcgataccgccgaatgcctggcggaagtagaatttgaggtcaaaggcgttgcttatcgcgctttctggagccagaaccgcgcccgcaaccagccggacgggaacttacaggcaccgcgcgttgagctggcccgctgcgaagacggcaaaattctggccgacaaagtcacggataagctggaacaaaccgccgcgcttaccgggctggactatggtcgctttacccgctcgatgttgctctctcaggggcagtttgccgccttcctgaatgctaaaccgagcgatcgcgcagagctgttggaagaactgaccggcacggaaatttacggccagatttccgccatggtttttgaaaaacacaaagcggcacgtaacgcgctggagatgtgcgaagcgcaggccgcaggggttgtgctgctgagcgaggaacagcagcagcacttgcagcaaagtttgcaggcacttactgacgaagaaaaagtcctgctggcacagcagcaaagccaacagaaagattttcagtggcttacgcgtaacgacgaactgatacgtgagcagcagcgtgcagccgcttcgcagcagcaggcgcaacaggctctgacggacgccgcgccccaactggcgaagctcaagctggcgcagcccgccgcccagctacgtccgctatgggagtatcagcaggagcagaccacccgcctggcgcagacaacagagcgaattgttgaagtaaatactcgcttactcgacagagcggtgcagcgctcgcgtattcgcaacggtgcgctgcgcaaccgtgaacagttgcagacagagcacaaggtactgacgcagtggctgaccgaacacgatcgtttccgtcagtgggggcaggaaattgccggctggcgggcgcattttacgcaactgggtcgcgataaaaatcagcttgttgcccagtcagcgcgcatggctgagcttcgtcagaagctggctgagatgcctgaaagtaggttgacgctgacggctgaggatctcgcgacggcaatggagcaacaggcacagtcgcgggcgctccgccagcgtctgacagcgcttcacgctcgctatcagccgctgcaaaaacgactgcgccagaatgcggaaagcgtgcagaaagcgcaggctgagcaggctaagttcaatgaaacgctgatcctgcggcgtcagcagttcaaagagaaaaatcagcactatgccgacctgaaagcgctctgtgagcgtgaggcgacaatcaaggatcttgagaactatcgtgcacagctcgaagcgggtaagccttgcccgctctgcggttcacgcgaacacccggcagttgtgcagtatcaggcgcttgaactgactgacaatcagcgccgccgcgacgcgctggagaaagaggttgccgcgctaaaagaggaaggattgctggtgctcgggcaggtgaatgcgctgacccaacagatccagcgcgagacagaggaagcacaggctctctctgaggaagagcaagcactcactaaagagtggctggaggtctgcgcctccctgaacatagcgctgaatattcaggatgatatagccccctggatgagcgaacaggaacagtatgaacgccagctgtatcagctcagccagcgtctgacgctgcaaaaccagctcaatgaacaggaaggtcaggcgcgccagtaccagcagcagctgacggcgacgcgtcaggcgctggcggcctcgttacaatcgctgtcgcttagcgtacccgatgaaggggctgaaagcgcctggctgagcgcgcgcgaaagcgaatataccctgtggcaggaaaaacaggcccagcacggtacgattcaggaaggtattaacgccctgatgcccattctggagacgctgccggttaccaatgatgcagaagccgacgcggttatccctgagaactggcgcggcatccacgacgaatgcgtgtcgctgcaaagtcagctcaccaccctacagcaacaggagacgcttgagcgtgaacggctccagcaatcacaggctcagttcaacgccgcgctgaccgcgagctgctttgccgatcgggaagcatttctctccgccctgctggatgaaacgtcgatccgccagcttgaacaacaaaagcagacgctggagaaccagctccagcaggccacggcgctttcggtgcaggcaagcatgcagcttcaggcgcatcaggcacagcgccccgaggggctggaaaccgatgccgcaacgcttcaggcgcagttacaccagctggcgcaacagcttcgggacaacaccacgcatcagggggagatccgccagcagctcaaacaggacgccgataaccgtctgcaccagcaggcgcttatgcagcagattgaggaggcggcgcgtcaggccgacgactggggctatctcaatgcgctgataggctccagcaccggcgataaattccgtaaattcgcccaggggctgacgctggataatctggtgtggcttgccaaccagcagctcaaccgtctgcatggccgctatctgcttcagcgtaaagccagcgacgcgctggagctggaagtggtcgatacctggcaggccgatgcggtacgcgatacccgtaccctttccggcggggagagtttcctggtcagtctggcgctggctttagcgctttccgatctggtcagtcacaaaacgcgcattgactcgctgttcctggatgaaggattcggcacgctcgacagcgaaacgctggacaccgcgctggacgcgctcgacgcgctgaacgccaccgggaaaactatcggcgtgatcagccacgtagaggcaatgaaagagcgtattacggtgcagatcaaagtgaagaagatcaacgggctgggatatagcaggctggacagggagtttgcggtgcagtaa

SEQ ID NO: 134103 - DNA, 525 bp, Enterobacter cloacae
atgctgaatcatcggaaacgtaaagcggcttttcttagcctggtgctgttgataacctgctatttactctggactcaacgaccagtgactatcatccgcgccggtagccatgctgagtatgatcccggatttgtcctcaaggagtttgccagcaaagacagaaaatttgaggcctatggaatcctggtagaccatctggctttaacggagtggggacgtattcattggtatctggatcataaagaagaactgaaaaacctttatcacataccatcatccgatggctataacattaccttttgggatatcggtgatggctttactgattttgcaagctcaggggatggcgatatgtattgcctgcctccgataaaggaaacagaaaaacattgtgttgagaaaaatatgcttatgagcgtggattatgagcaaggttactatgaaaaattctccttcagcaagagtgagtattactggataaccatgccggacgggaagttggtgcgaataaaaaatgcgttataa

SEQ ID NO: 134104 - DNA, 855 bp, Enterobacter cloacae
atgaatatagatacgcttttatcaatgtctttgccgtgtgaagttttttccacgttccaccgttttgaaaactattatgtagatgatatgcagtgtggagatttagtcgatagggatttccagttattaggacttgaggacatttctgcgcgggtagacccgttcaggtgtttgcaattcaatgcgaataatttctatagtcctcgggtggcggacttcggcctacggaaaccgcagggtgtgtcacttagccgtcagcgctgcgctgagattatgtttgatgagatgatagaactctcgacacaatttgctcacgggccatacgccccgcttataggtgagttgattaatcattttcattacggtaatggaggatcatggcacagtgagcgtctgagtagagcatatgcagaagtgattagaggtacagaaacaaatcatttgttgcattgcattcagacggagataaatgaacgtttctatctgaaacagcagatagggattgattttaattttcttacggctttaagcggacacatcactagaaacgtcaggctgccaaaatttaaccgtttcatcgataggtttaatgggttgggaataagcgtacatgatatttatgcccagaaggtcagcctggaaagtttccatcgcaatgctgtatcctgggagggggtgctgttatttaccggacaggatcattttggtcttgggacggaagatattacaaatgacttctataagaactttcgcttcttccgcatttggttttttttgcaacgacatcgcgattatgcatttaaacccttcatgacaaattttagagcttatattcatataaacggtggcgtttga

SEQ ID NO: 134105 - DNA, 1431 bp, Enterobacter cloacae
atgaataatttatctacaaaggatattataaataacagtaccataatgtttggtacaagcggtgcgcgtggcatggtcgaagcgtttactgatttggttgtgcgcgcttacgtttcaaatttcgttactgtagtaagcaaatcaaaaaaaacagacgaagttttcattgctatcgataatcgtcctagtagctatggtatagcgttgagctgtgctaacgccttaaaaaatctcggcgttaattatcgtttttatggtgttatcccgacacctgccttagcgtatcactcgcttagtaaaggtgtgccagcaataatggtaactggtagccacattcctttcgataggaatgggctgaagttttatacttcaactggcgaaatcactaagcaggatgagcttgatattacgaattgcgacatcccgttgaatgactgcgaaaatgttgaaacattgacaatagatgaatctgcaaaagaaaattacatagcaaggtatactcgttttttcccagctgattgtctgaagggactccgcattggaatttacgagcattcgagttctggccgagatgtttatccaagcatttttgaaaaactcggcgctacagtaatatccttaggaagaactcaagcatttgttcccattgatactgaagccgtatctgaggaagataagcaaaaagcccgcgactggagaaatcaatttaaccttaatgcaatattctcaacggacggtgacggcgaccgaccgcttttaacagacgaaaatggtgagtggttgcgtggtgatattttatgcattctaaccgctattgcccttggtgttaaagctgttgcgacccccgtctcatccaatactcttttgaatcaatgctgcaaattcgatgaagtgttgtacactaaaataggttccccttatgtaatcgacggcttatcaacattaatttctcgtcatgagactgtcgctggcttcgaagcaaatggtggatttattctggcgagtgcaatccgtcagggcgataactttattggcccgctaccaacccgagattctgtgcttcctgcactggtagttttagctgcctatgcgaagaccgggattaaggctgcattaaacttactgccgcaaagatatacttattctgatcggattcaggcttttccttctcacgagtcaacacgtttaatttcccttggtaaagataagcctgaagaacttctgatttatcttggtctgaatgttggtttagataaagttgattataccgatggcgtcagaatgacgctaacagactcatctatacttcaccttagagcttcaggcaatgctcctgaattgagaatttatgcagaagcatccgaagagagttcggctaaagagcttgtgttatcttgcaaagaaaaactcaaacacctctctttaacctga

SEQ ID NO: 134106 - DNA, 1116 bp, Enterobacter cloacae
atgatgaaagtattatttatttcccggccaacattattcagtggtcctggtggagataccattcagttactcaaaacgaaacaatatctggaaaagatcggtgtttcgattgatattttcgatggcggtgaaataaatttcgataattacgatttgattcattttttcaatttaaggaatcctcaggacattctccattatgtccgacaagctaaagagaaaaataaacccatggtgctttcgaccatatgggggacttattatgagtgcgatcaaaaagcgcgtgtcggattgcagcgttgggtcgcaaataatttccaggaaagcaaagtcgaatatctaaaaacggcaatgcgtattataaaaaataggaattttcattcaggaactatagaatatctgttaaaaggtcatattagagcccagcgagagattgcacgagctgtcgatgtgcttctccctaatagtcctactgagcttgaacgtgtccgtcacgatatgggattaccaggcaaggctggggtttctgtggcgaatgccgttgacttaaatgtctttaattttgatgctacagaagcctccaaatatcaacaccttgaaggttgtctacttagtgccgcacgcatcgaaattcgtaagtgtcagttagaacttattcgtgcatgtaaagacctcccatacaaactggtattagtaggtaagcctagtcctaatagtttaggctattacgaacaatgtaaacgcgaggctggtgataacgttatttttatcgagcatgtctcacaggaagagcttgctgcattatataaagttgctaaagctcatgcgttaatttcctggatggaaaccccagggctttcaacacttgaagccgcaatgatgaactgtaacgtgcttgtgacggatcgcggcgatactcaatattattttgaagatatggctgtgtattgtgagccgggtgaggtgtcctctatacgtcagggggtgattgatgttatggagaagccttttaatacgaaattaaaagagcgtatcgtttctaatttcacctgggcgcatactgctgaacagacacttgaaggctacaaactgtcacttcaattacataataaatga

SEQ ID NO: 134107 - DNA, 1071 bp, Enterobacter cloacae
atgaacaatcctatgaagaaaattgcggtagttggcactgttgggatccctgcatgttatggcggttttgaatctctggtgcaaaacctggtagattaccaaagtgaagatgtaacctatacagttttctgttcatcaaagcactataaaaataaaccagcgcattataaaaatgcccgacttgaatatatttccctaaaggcgaatggagcctcaagtatcttctatgatatttatagcttattccgttgcctcaaggaaaagcatgatgttgtcctgattcttggggtgtcgggatgtgtcgtactgccaatatttagacttttttcacattctaaaatagttaccaatattgatggtctggagtggcgacgagagaagtggggacgtatggctaaatccttcctaaaattttctgaaaagttagctgtgttcagttctgatgttgttatttctgataatcaggctattggtgattatgttaagtctgaatataataagaataatcaggttattgcttatggcggagaacatgcgcttatcaaggggcgagtggttcctgaccagaaatctgatttttatctttcgctgtgccgtatcgagcctgaaaataacgtttctatgattctcgaatccttcgccggtacaccatataaactcaaattcgttggtaactggaataatagtgaatatggcctcgctttaaaaaataagtacagtaaatttgataatatcgaaattattgatcctatatacgatatttcggtacttttcgatttgcgaagtcagtgtaaaggctatgttcacggccacagcgctggcggtacaaatccatccttggttgaagcgatgcaatttggtatggatattttggcttttgattgtaatttcaatcgctacacgactgaagataaagcacattatttctcttcaagcaatcatctaagagagataattgaaaatatagaatcctctgtacttccacagtctggaaaggatatggcagaaattgcttaccgtcgataccagtggtcagaaattacgcgtttgtatgaacagacctacaattag

SEQ ID NO: 134108 - DNA, 981 bp, Enterobacter cloacae
atgacgcaaaacaacaataacctggtcacacgcaacaatgacccggagcaaattgatttactggatttggtactacagctgtggcgtggtaagtggctaattggtgctgttatcgttttattcatcgtacttgcggttggctatctgacttttgccaaagaaaaatggacttcatccgccatcatcgcacagcctgatgcggcgcaaattgcgacttattcgaatgcattaaatatcctttatggttctgccgcaccttcaatgctggacatacagacccgcgctattggccgttttaattcttccttttctgctttgtctcaggctcttgaaaatcaggaagtaccagaggaactgagcattgaagcagcagttaaagggcagtcactgccgctcagtgtgagctatactggagagtcggctgaggccgcccaaaagcagttagcgcaatatattcaacagattgatgagcaaacggctaaagaattaaccgttgacttgaaagataacattaagcaacagatcactaccttaaacgactcgctggaaaaccaggagaaagtagcgcaggagcaaaaggaactgcgcatcaagcaaataattgaagcattgaagtttgctgaagcggcgaagattactaccccaaaaatccagcaaactcaggatgttactcaagatactttattcctgctcggtactgaggcgttgagttcgatgattcaacatgagtctacccgaccattggtcttctcaggcgcttactaccagaccaaacaaaacttactggatattcagaacctcaacgttaacccagacattattcacgtctatcgttacgtcatgaaacctaatctgcctatccgtcgtgacagccctaaaaaggccatcaccctcatccttgccgttctcctcggcgggatcatcggttctgctgtcgtccttggccgtaacgcgctgagaaactacaagccacgagcctga

SEQ ID NO: 134109 - DNA, 834 bp, Enterobacter cloacae
atgaaccagaaccccttttcaatatatgattttcttggctacctgataccaggaggattgtttttatatcttctatatttttgcgggatcactctggattgggatgtaatcatccaactaaagaaaactgcaatcgcacaggaatcttctctcagtttgttgggatattcttcaattgttatacttgcatatatcattggccatgcaatagcaatatgctctgcttttctagttgaaaagtatatgaatgatacattacagtacccttctatctatcttttttgggagttaaataatgatttcaaagacgaagtcaaaaaagattacggcagaacaactaagtatctaataattaagacgatattactaccagtatttattcttgatagaattactttttataaactgtactcccgagagcttacaaaggagttagcttcgccgctatggagcatgctggaaaagtcttataagaagattttttcagtagatttatctcaacttaaaaatggttatgccttacaaggtgatctttttagattagcctaccattactcatatgaacactcctccaaccatcagcctaaaatacagaattatgtagcattatatggattttgcaggaacgtgtgcttggtatttttattgttcttttgggtagctttcgtcagacttgtaattaataccctaacagacgaaatgtttggatttaacatattatcaactttatctatgctactgatgacatatgttttctattgtgggttcgtaaaattctacagaagattcaccttagaagtattcatggcattcagcgttttaaaaactgattga

SEQ ID NO: 134110 - DNA, 543 bp, Enterobacter cloacae
atgaatttaattgatagatttgtaagacttagatttaaacaccaagtaacaggattagttttcctgtctatagttattattggcgctatgacatgcgtttatctaaattttacgaatcatcatggcaaagcttttcattccttttaccaagcttcaattcgtggctatttattttctggtttcatatcagtaggttcattgcttttgtctttgcatacttttgtaattgtcaatttaaaagacaaactattttcaactgataggtataaagagatatatttaactaacaaaaatctgcctactggttctgatatagatgagtgtgaccttttcaaaccacttgatacattgtcttcttttataaacatttctgtttggctttcaatcctttcagcagtatgccagttcacgattggtttgatagacttcggtttggcatcagtattttgcatatggttagcaatgctaaccatatgttttctcctcaactctttaatccttataagagttcacattcgaaatatgcttcatcaaaagaattaa

SEQ ID NO: 134111 - DNA, 408 bp, Enterobacter cloacae
atgctgactgccttcaatgagataaaatccgcgacattccgatatgattccgtcgatttcaaagaaagtgaaatgatcggcgtggaacaatttacaagaaacactgaagttacattcaatattagcgataacaacaaacccaaagtaagacaaatagcaaatagcattgatcatatgattagcaatatttcaggaataacgaagggtgtggtttctgtcgtagatcatagcaaaaatgaacgattggttgatcttattaactcaccatgttacttcagcgaatatgatttcgacactctagcccagcacgtgaatggtttaactaatgacaattatattgataatgctataattgcaattattaaagatgaaattgaaaatggtagcaaaaaaaatgaatttaattga

SEQ ID NO: 134112 - DNA, 303 bp, Enterobacter cloacae
atgaaaataaaaagccaaggatttgcaattgtcaaccctaacaacaacattaagatggttgatattattgactatttcattaagcagtctaagcatgaaatcaaaagagcagattatgacaggcagatattgctttccgatgacggtaattattatacaggcttggttttaactttcaaaaaccagaagaaaaattgtctttcaaaatttaaagatggcaaattcgagatcaaagttgaagatctgaaaggggatgataaactcgttaatttcaattttctttgcataaataaaaaagtttga

SEQ ID NO: 134113 - DNA, 669 bp, Enterobacter cloacae
atggtaaggaatgacctcatagccgctgaacggctggtgctgggtggcggcgtcggtcagtaccagagtgtgtttgtcggcctcgtggctgaagtagaacgcaatcccctccagctccatcaggcggctgataaagtccaggctcgattcctgatactgcacgcagtagtcccacacccggtagctgccggtaagtttgtcttcgaggttaacctgatgctcacccagcagggttttgacaatctgcggtaccgtctggccctggaagatacgcaggttacggtcgcgcttcatcggccacaggtccggctccaccgtcagctggtacaccgcgtagcgggtgcccgtcagctccacggcgctcaccgccacgcgcgtcaccttgccgttgatatagcgggaagtgagcaggttctgcgtcgggatggtcaccgtgaccggctggcccagcagcttgctgcggtcaatgcgcgcgtccgtaccaagcagggtcagcgtcagcgcgaacgactcggacatcgcctcacggccggagagtttccagaagagcagcccctcaaccgggagctggacggtaattcggttgagcataatctttattccgtaatggtttatgctgggaacgtttatgaacgtaaagctaatttcgacgaggtggttttggattga

SEQ ID NO: 134114 - DNA, 690 bp, Enterobacter cloacae
atgaacagtcagcaactggaatacgtacgtcagcagctcattgtggcgaccgcagatctgagcggggcgacgaaagggcagctggtagctttcgccgagaacgcgcaattcaccgcgactgcgcgcagcaggggacggaaaaaggtattcgacaaagataagcagcgcatggtcaacccggacggcccgccgatgagcggtagccagtcccgcgctaagggatcgtccatcgcgctggtgggtccggtggagttcgtgacagcatcatggcgccgcgctgtcctgtcgctggatgaccaccagaaagcttggcttctgtggaactacagcgagaatatccgcttcgagtaccaggtggcgatcactcagtgggcgtgggccgagttcttggagcagctcggcgcgaagaaggtggccggcaagacgctggagcgcctgaagaagcttatctggctggcggcgcaggacgtgaaagcagagttggcgggcaaggacgtgtatcagcaccaggacctggcggctctgtgcggcgttaagcctgataactggtgtcataactacgccgactactggcggggcatgtgctccatctttaatcggcttgatggtgattctctccgttgcactctgagaacacgatcacaacaaaaggcgactttttcgcagcagggtattgcaaaagtcaattaa

SEQ ID NO: 134115 - DNA, 153 bp, Enterobacter cloacae
atgattggcaccctaacctataaaatgacacttcgcccatacatgaagcccttgctgtttgtcgcggcaatgactaactggcactggttaaccgatatctgcttcaagaaagagattgtcgcagaaggcgcgaaggtggagctaaatggctga

SEQ ID NO: 134116 - DNA, 201 bp, Enterobacter cloacae
gtgcgccatgcccacctctacaccaatgaagaggtccgtgactggtacagcaaggatggcaactccatcaactgcaaatgcagccagcagtctgtgctggttgatgcggacggtaatccggaatacccggacaccatcacgaaactcaaacaggaatataaatcgatgcaggcgcgcggttacgcctgggcggagaaataa

SEQ ID NO: 134117 - DNA, 402 bp, Enterobacter cloacae
atgattaccacagaaaaggccaaagaatatctgaagtcagtcggtatcacgctacctgatttcatcttagaggcgctcgtagagcaggccaatagcattcaggaatgccttgatgagcactactcaccagctacagcgctactgattcagtcatacctgttgggcatgatggctctggggcagggtgacaagtacgtgtccagccacaccgccccgagcggggcgtcagaatcattccgctatcagtcgttctcagatcgctggaaggggtccttaaatctcctgagaggtctggataagtatggctgtgctaactccctgatccctgccgacccgacagcaacaccggcttttgctggcatctggatcgggaagggcggctgcatgtgcggggataagtga

SEQ ID NO: 134118 - DNA, 408 bp, Enterobacter cloacae
atgggcataaaagtgaagggcatcagccaggcgaaaaggaatcttgatcgaatcgttggtgaaattgaagggataaaagtcctaagagccatcaaatcagcattgctcatcgttgcgcctgaggcggcgagaatgacaccagttggaagcacatcaaaccttatcaattcacagatacaggaagtagaagccagtggcaccttggtcacagggcgcattatctactcagcaaattacgcaatctatgtgcatgaggcgaaagggaccttaaagggacagccgcgacctttatcacgaggtggaggtaattactgggatcctgctggtgagccaaaattccttgagaaggctggcgataatactcgttcagatgttgactctgtcgttaagaaggagctttcgctatga

SEQ ID NO: 134119 - DNA, 384 bp, Enterobacter cloacae
atgacacccatgatgcacgagcgggtgcgcaacatgttcggcgacgccgggctaactaccggcttcacggtgcagcagctgatgtacgacgaccctggcgacctgtcgaaggcgatcatggtattcaggccaaatggcgggtcgaatatccgcaccgatttaggttctgagtatcacgtgctggtcgacgtcgttggggcgaaagataagcgcaaagacgcgctcaatgccgtgcagcgcatcgtagattacgtccaggccaaccccatggctgacgagtgtgtcggatacatccagaacatgggcgcaattcccgcgccggtgctcacagaagaagggcgaatagtcttccgattgcaatttgcatgcgcgtttggcgactag

SEQ ID NO: 134120 - DNA, 2100 bp, Enterobacter cloacae
atggctactacacctacaaacctgccagtcccgagcgaatcaccgattgacctgaaatacaacgctgggaaaattgacgaattcgttacctctcagaatcatacgtatactgaccgttttggcgttcagcactggactatatctggaattgagtacacggcttcacaggctatctcccagtttggttatatcacacttgatagtttcgaagaggggaacactctcaccctgccaaatcaggttcttcgctttgaggcaacgggagagtattaccgttgggatggggtattccccaaagatgttccggtagggtctacaccagagacaactggaggtgttggcatcggtgcatggataagcgtcggcgacgcatctctacgtgccgatatcgaaaatggatatctcaaccctaaatactctcgagtttaccagactgttgctgatatgaaggcaggtaacctgaaggttggagataatgttacatggaatggatattatgctgccggagatggcggggggaataatggtgtagtcgtcttggggccacagactgctgatgatggaagtgtatttgcactgagcaatggattgtatgtagcagcaatttttggcgatacagcggacccatgccagttcggcatttctccaaccagaactgcaacgcaaaacacagcatcattcaatgccgctataagctatgggcttaataaaaagaaaagattgttacataaaacgcctggtagctacttaattgaccctatagacatcgaaggatcttcctttgactggttttggtgggagtgtgggcgaggagatgtaacattgacttgcaacagcacatcctccccagcaattactatgaggggcatctttacaccagaaggtggaccgctttttgcaaattctttccagtatgcaactgtgcttggacttagaattagaagtccttacatcggtcttcgttatgcttttacagaaaacatgcatcttcgagatcttattttcagtggaataggaactactggtattgcaattgttggtcctctagaaggcaaggagaatgctgtatgggatataatagagagaataaaatttgcaaactggaagtcagcttataaatctggagtcggtctgcaatcagaaatagcaaccaagcatgtatacgtaggggattgcactttccgtgactgggatatgcaaaactgcggactatctgataacgattatgttttagattgcggttacttcgatggtggcctttttgatagcttacagtggcacatgaatgcggcttcgtcgtttaccgctcgcgttcattgtatgcgtatttacaaaccaatctatgttcgctggacgaattgttacttctgggaacccaatggtattggtgtgcacatactatctcctcgcgaatgtgttatggacgaaacaaatatgattgctggagccggtcaaagcgctaacgatcctagcgttcttattgcaaactttgattcattgaccagttatgccgttgaaataagaccgcgtatcgtgaacggatatagcactcctgtagttatccaatctcagggggatatcgatcttacaggcatcaaagaaagaaataactgcctggccagcacatcatcaccagcaatttctttgcttggtgcaactggagtgaaagtaagaaacgctcaactaaatagttcaggcggtccatctctagcaatcgacaacagcaccgttgaggtattcaatatcgattactctggttacgcttcacaagcaacaatatctaatggaggttcgataagtgttatccctgctaatcgcgttcgacaggttagttcggcgtcatttgtcggtgtgtttgacgatgaaattcaatacaatgctacctctggaggtgctaacgtgacgctgccttccgcgacaaactgcccaggaaaagtaataagaattattaagacagatagttcttccaatggggtagctatacttcctgcaagtggtaatgcgattaatggagcttcatcctacagcctcactgcacaatattcatttgtacaactaagaagcactggagcaaactggattattatcggtaaatcataa

SEQ ID NO: 134121 - DNA, 1110 bp, Enterobacter cloacae
atgaagactgatagctcgtctaatgttaacagagaagtcttatctatacagtatcttcgcgggatagctgcaatcatagtgttcttctctcatttcaaaaatacaatcaacgagataagcctagttaacatcaggtatctcggtgattcgctgttctctaacggcggattcggcgttgacctgttctttgtgattagtgggttcgtaatcgcgctctccacagaaaaagatttagggcgaaagatgggcgctatctcatttgtgattaagagggtgttcagaatctacccactgcttattgtaggagtcattgctatcggataccttcaaaatatcccggtaagcaaaattctatggtcgatgattccgttgcatcttgattatatgtcaaagcctccattctttggttacaactcactatatgtagcctggactattacgtttgagcttagcttttaccttctgtttatggtatctatgtttgtgagccacaaatacagagcaatcgtatgcacattagctattttttcgctattcataattataagggtcactacaggtagtgagattacgctgtctgccacttcaccaataaaccatatcaattcgtggcttatgccagtggcatcgatatattcatcctcgatgatgtttaactttatctatgggatgattgcatattatgcatacaagcatataaggacaggagcactacacggacctatcttaaatacatttctgatcactgtgattgtttgctcattcttcatgctgattggtaattcagcaataatggggcacggaccagaaaaatggggtgttgtttcttttgcccttatactttctgcgtccatgtacgagaaaaacgcaggtattttccgtagcagattccttttgcatttaggggctatatcatactcactgtacctcatacatccagttgtgctatatttcctcagtataaacaattggtttgatataagaatatctggcttcccaaaatttgttataggaacatgtatcgtaattcttacgtcaacgattacttatcagctattagaggtgcgctcatccgctttaggcaaaaagttgttagccaggctcaaatga

SEQ ID NO: 134122 - DNA, 1248 bp, Enterobacter cloacae
atgattgcaaataaaagaaacaaagctgaatttatattgatatttttaattttgattgtggtttatatcaactcaaatcatacaatattatctgacgatacattttttgcgaatgtattatcaaagacgaatattattgactacacaagcggcaggtataatcactggagtggcagatacctcttagaagcgttaatggttgaatttataagatttgagtttattacaaagattctaatcatatcgtctgtggttattatggggtattccattgccattatttcacaatcaaaaaaaagcttcagaatatcattagcgttatttgtttcatttttgttaatgctggacattaatacttatagtcagtccgtgttttggttttcaggagcgtacaactatgtaataccaatttctttaggtatatttgctttgtctttatacaaaatcaatataaaaacaacaaaatttagggttatattaatttcggcattattatttttctcatgtaacaatgaacaatttggcgcggtaactttattatttctggctatgattgtctgttataaaattggcacatcaactcttaaaaaaatcgatttgctgtacttccttattgtgcttgtaagttttttaagcaatattctcgctcctgggaataaaataagattcaatattgaatcaagtaagttcccagaatactatagctacggcctattcgataagatatctttaggaatggataagctaaacgctcacattttaagtggacataattatttagttctagcactggcaattattatactttgtcatataattaaagaaaataaaactaatataacatcagtaataaccaccattacttgcgggatttatatcacatttgtactatcagcgcattataatttattttcctttacaaacacgatcagcttaacgaatggttatttaagtggaggtactgcaaacccagtaacttggagggaacataccttgtatatatcatatctatttacaatgatatttttatcatcaatatattgctatttattgagtacaatagaagaaaagaaaaaattctatttgggtgctgctataagcctctgttctatctcgtcagcaataatgataggcttttcaccgacagtatactcaagcggaacgcgtgtaatgtttatttttgacattactttacttatagtgcttgttttagcaatgagcttcaaaaggtttgagcatgaagactga

SEQ ID NO: 134123 - DNA, 462 bp, Enterobacter cloacae
atgatttacaatttgagaggatacataattataccaatctgcattatatgctgcattttaacatacataatttataactcatggaacaagcccatagccatcgacaacaaccattacaaaaattacagcagcttattaaaatatggaattgacgaatgtaatatagagaatggaaaagcttttatttctggatgggcgatttctgacaaatccataaaaagtaatgtggctgatgctgcacaggtttttttactgataggtaacaaaacttatcagctaaaaacaagaagtagaaagagagtagatgttgcaaaattttatagcctgcctgatacattcaaccattcgggattttacgcatcggcgtacttaccggagttgaataattacgataaaaaaacagtaattataattaagggcttagaaaaaaataaaagtggatttaaatatgattgcaaataa

SEQ ID NO: 134124 - DNA, 906 bp, Enterobacter cloacae
atgaatatcgagctgcgccatctgcgctattttgtcgccgtcgccgaagagctgcattttggtcgtgcggcggcaaggctgaatatctctcagccaccgctaagccagcagatccagatcctggagcagcaggtcggggcgcgtctgctggcgcgaaccaaccgcagcgtgagcctgacggcggcgggaaaacagtttctcgccgatagccggcagatcctgagtatggtggaggacgccgccgccagagcggaacggctttatcttggggagacgggagagctgcgcatcgggtttacctcatcggccccctttatcagcgctgtttcacaaacgctatcctcgtttcgccgtaactttccggatgtgcatattcagacgcgcgaaataaatacccgggagcagatatcgccgcttaacgaaggatcgctcgacctggggctgatgcgtaacacgcagttgcctgataccctggcgtggcaggtgatcctccgcgaaccgctgatggcgatgatcccccgggatcatccgctcgccgcgcagcacagcgtcacgctggctgaactggcgaaagagccgtttgtcttttttgacccacaggtgggtaccgggttgtatgacgatattcttggtctgatgcggcgatatggccttgtcccgactatcgcgcaggaggtgggggaagccatgacgatcattggtctcgttgccgcagggcttggcgtatcgattctcccggcctcatttaaacgggtacaactggcggaaatgcgctgggtgaagatagccgagcaggatgcagtctcagagatgtggctggtgtggtctaaacatcatgaacagagccatgcggcacagcgtttcaaagaacaattaattaccgcttctcgcgggcattatttatag

SEQ ID NO: 134125 - DNA, 2010 bp, Enterobacter cloacae
atgtttactgtattcaggcgactgctggtctgcctgctttggctatggctgcccctcagccaggctgccgacagcggctggctgcgcgccgccgataatcagcacgccagcgtcaggctgcgtgcgcaacccgaaagcactggcgaaacccgcctgctgctggacgtcgccctgcaaaaaggctggaaaacctactggcgctcgccgggcgaaggcggcgtcgcacccgcgattaaatggcatcagcccgtcgaggcgatctggcgctggcctgtgccgcagcgtttcgacgtcgcgggcatcaccacgcagggctaccacggcgatgtcagctttcccatcactctgcggggcgacgtcccgaagatcctgagcggcgtactgacgctctccacctgtagcaacgtctgtattcttaccgactacccgttttcgctgaacatgaccgcatccgcaggcgccggttttgattacgatttcagtcgggccatgggcacccttccgctcagcggcgggttgacctcaacgcttaacgccacctatgcccccggcaagctgaccgtaacggcgcagcgtgacgcaggctggcaggcgccgtccctgtttatcgacggtatggatgatgttgatttcggcaaaccggccctcaccgtgcgcggtgactcgctggtcgccaccgtgcccgtgacggacaactggggcgaggccgcgcccaacctcagcggcaaaaccctgtcgctggttctggccgatagcgggcaggcgcaggagtccagcctgagcattcagccggggaacgccgcgccgacgctctcgttaggctgggtgctgctgatggcgctggcgggcggtctgatccttaacgtcatgccctgcgtactgcccgtgctggccatgaagctgggcacgctgatgcaaaccgaacggcaggcgcggggtcaggtacgccgacagtttcttgcatcggtagccgggatcgtgatctcgttcctcgcgctggcactgatgatgacggttttacgtttaggcaatcaggcgctcggctgggggatccagttccagagcccgtggtttattggcgcgatgacgctggtgatggtgcttttcagcgccagcctgctggggttgtttgaaatccgtctcccttccggcgccagcaccttcctcgccacgcgcggcggcaacgggcttgcgggtcatttctggcaaggcgcgtttgccacgctgctggcgacaccctgcaccgcgccgttcctgggtacggcggtctcggtcgcgctggcggcgccgcttcccctgctgtgggggatcttcctggcgatgggtatcggcatgagcctgccgtggctgctggtggcggcctggccggggctggcccagcggttgccgcgtccgggacgctggatgaacgtcgtacgcgtagtgctggggatgatgatgctcggctcatcgctgtggctgctgagcctgctgacggtgcacattggcagcctgcccgtcatcacgctgggcgtgttcctgatccttacgctgctgctggtcaccgcctggcgctaccgctggcaaacggcactgcgcgccggggtattagctgtagtggtggccggggcggtcgcgtttgtatccggttccggcggcgagggttcccgccgcgatcgtattcactggcagccgctcagcgagcaggccattgcccgcgcgctggcggagaacaaacgggtgttcgtcgacgtgaccgccgactggtgcgtgacctgtaaagccaataaatacaacgtgctgctgcgcgacgacgtgcaggatgcgctctcctccccggacgttgtcgccctgcgcggcgactggagccgcccctcagataccatcagccagttcttaaccacgcgcggcagcgccgccgtaccgtttaaccagatctacggaccgggattaccgcagggccacgtgctgcctgcgttgttaagccgcgaagcggtgctgagcaccctgtccgatgcaaaaggaaaataa

SEQ ID NO: 134126 - DNA, 189 bp, Enterobacter cloacae
atgaacaagctgatgagtgaaaacaccatcaaaaaagcgctgtgggtaattggctacgacaccaaaaccgaggcttgcggtcacggtttcagaacagtggcctgtagcgccctgaacgagtccgcgtggtcaaaggatgccattgagcgtcagatgaaccgcaaggagcgcaacggcgtacgagcataa

SEQ ID NO: 134127 - DNA, 813 bp, Enterobacter cloacae
atgaatatgaagccactgcccggtataatttgtatccttttactggccggatgtacaaaattatcatctattgatggcaggaaaaccggagctgctacaccacgcatggatgcgatttccactcccgcatcacagcttactgaccgggatgtttttggtgatgagctgacgctggatattacggaagaagatattgagaatgcggtggaggaagcctcgaatgggtttgagatcccgcaaaattctgccatcattctggtggaatcgggatcacgtgcacctgatgttatcatgcagaaagaaatgcagcgatattaccgggtttccactttctccggtattcctgtcgccaggaaaaaaagggcggttaaaccagcaacgcctgcaaaggaaacagacagcgacacggaaaattttttagacagcaaaaacggcgtgatcaatgccaattatatgcaggcgctgcgatacatcggtgcaaaaggaaggcaaaaaaacattgtggtttactggagcgaacttgaagccgggaaatataatgcggccataaaagaggtggtctggaaaaagtatacaggcgggaatgtttccggctcatcgctgcgctatctgatccggtttgctctggtggatgttgcgaccggggagtgggcaacgtactcaccggctaatacagaattgatggctgttccgttgaccggaaaaacagacaataaaaaagatatgacagaacagcaaattgcagatctgaaaaagaaaacctgcaaaatggtggttgaggatctggtcaatcggtacagcaataaaatctga

SEQ ID NO: 134128 - DNA, 291 bp, Enterobacter cloacae
gtgataataaatcctattgagcttgtttataaatcattaaccggtatagttatcccttatatgccggaaccagaaaaagttcaggggaaatgctcatgctgtgaacgttcggctgaagcgtttgattattacggctacagattgcttaacagctataaacaacccgttatgcactgcccgcaatgccagaccttttttgtctctgcgcctgatattttaggtcttgaaccctctaaaaaaatatcaagtcagcggtttggcccggaaccatcataccgactggaattatga

SEQ ID NO: 134129 - DNA, 135 bp, Enterobacter cloacae
atgaaagaaaaatactggaaaaatacaatctccctgaaaatgatttttctgtatatatatggaattttggtgatggttatcaaaaattatcaccttatgatgctgaggatgaattttattgtttccctgatataa

SEQ ID NO: 134130 - DNA, 828 bp, Enterobacter cloacae
atgaaagttccattactgaagttccccactatgatatttaaaaccaaacatcttatggatgatgaatcggctgaggatatgaaatatggtgatttaacagaacagcaattgcgcaatgattatcatctggagcaggtatcagataccattgatccctggcggaatcaattttttatacctggagtaacacaatttcctcaacctctttctgatgctgaagtcgtcagtaatttgttcagcgatttcagactggagagtgcgaaacttacattcatggggtatcgcagtgtattccttgcaatggttgatcatctacagaacagaacttcgggagtctttacaagtaaagatctggatctggctgctaaagaacaaattgagaatgataaatcagtaaacagtacctatctgtcaataaagagtgtactggatcaaaatattgattttgatgctggcggatatcctgaatcccataggtcaaaattgacaagcggtattaaaaataaagtgttgcctaagtttgacaggaaccaggataaaataaatgggctgggattatctgtccacgatatgtatgctacccacattacgttaacatcgctgaaggtggttaagaatacctacgaagcaaccatacattacaggatgcaggatcactttggtcttgacagtaatgatatcactcattggctttatagccattgggatgtctttaaaatttggtttgtacttcaacattatgagaaagagaactatgcttttaaaccatttattacagagataaatgctaccgtaaaaatatcaggtattagagggtattattcctga

SEQ ID NO: 134131 - DNA, 615 bp, Enterobacter cloacae
atggactcagctacagcagagggaaagttagtatttgataatatatatgtagtagataaccaacttaatatattatttgctaaatcatatagtcgcaagggaaataaatggatcgaccctgttaatttgaatcattccgtatgtaatcgcttgagtggtggcataaaaaaagatgttttaactaagaaagattatattgttgattttgaaaccattgagcagggtccattccatttaaaaggtgttgataatgtctcaattaaatacattagagacgattccttaaaacttgtacgtgacgacattaatggtgaaaccgtcgtcgattcaattaaaaattataatgataacgctcctttcatcagggtggttttttttataaaaataaaatccgaaatgcatattattagtttgatatcctggggcgagggggggggcgaaaatagttattataagatatattcgtatttatatgataagaatggtatcatacataataatgaagagctaaatagagatcttaatttatcaggatatgattcagaaaagcagatgtttaaatataaagatgcgagtgccataaaaaaatatatccttgaacattataatttctaa

SEQ ID NO: 134132 - DNA, 2820 bp, Enterobacter cloacae
atgtgggacgtgaataaggccatcgaacatttaaatagtcatgcagaacagggatctgttggatattgcgcgaggtatgttaaaaacgcaatcagtgccgggggagatatcaacccatggccttcaatagagggtgcaaaagattatggcgatgcattgctgcatagaggatttcaggttatctcgtttgagagtagttttatttcgggtgatgtggtaattattcaagggattaggaaagatgattttccagaaggcgaaataacaagagatcacccttatggacatatggccatgtttaatgggcagcaatgggtgtcagattttaaacaaaataatggttattaccctggtggcgattaccgaaaagcaaagcctgcatgtgttttttatcgacataaagatgcccttggtgacggatcgcagagtaccagtgtagttggtggaaaaatgaatatctgttaccccgtcagggataaagacggaaaagagtttcgttctctggatgatataatgcgtctggttgacgcagaagtacacggcacctggctgctgggaggaaacgggctgtggcacggcgcagtacatatcagtgacgtgtctaatccttattctgccctgactccggctacgctcagctccggcaaaccggttccccttcagtttatggctgacggcaccattgcggcataccggataaacaatgactacctgaaaggcccctataaagggcaggaactgcgttacagcagcacgtttgttctggtgaaatcactgtgtcagccagacccgcaaaaagaaaaaagctggctggaattctacagcttgtatatgcatctggcaccggtgaaagattatccggcctccccctgctataaagtcagggtcggacacagcgggatactgctgcgtacatacgccgacgggataaatggccttccggacggccaggagagtggcgatcctgtaacgtatcaggcaccgccaaagacccgtaaaagtctgaaagcgggagatcgctttgtgtcatcgcgtaccggacgtttttacgtgacgaaagggaggcagtcgactctgatgacattcggcctggttcgcctgttgaccggcgaaaagatgggagatgaagagtactgggtaacgctggacccggaactgatggagccggatggcgaaatacaggcgctgatgcctacgtggatgcagaatgcgaagaaaaatggcatttttgactcggtgcagatgggaggggaaacggaagaatggaaggtcagcgccggaacgccagcaggatttatgggacgtgaggaatatcccggcagtgagggtggtcaggttgagcgcgagtggtttgtccatcttgaggtactaagtgcggacccgaagatgccggcatttttaggcaatccggcaggggtgaagggcgataaacgaacggtgctggccccgaaaggcaaagtactgtacacccgccggacgacagacgggcaggcgacatttgccgccacgccggccattctggatgctcagcgcgttctcccgcgagaggccacaacgccggtgacggatgaaacgaagcagtggtggtttaacatcacgggcagcggctggctgccggagaagaatttggcagaggccggacagtacgattttctgaagctgggttttcagccgctggaggaaagcagcagcggcgatatgacgaaaagcccttatgaagggtgggtgccggaagcctttgattcagttagtcgtgcagcggagcagggagatgaatggtacgaacaggtgccgcccttttaccgggagctgatagcgaaaatggacgtcaaccatgacggaaaggtgacggaagaggaaatccgccaggcactggtggtgcgggacccactggtgaggaatgtggtgaaccggctggtggtcagacaccacagcgagtggtacggcggccgcacgacggggcggtgggaaggattttataaggatctggacgcagaggaagtggcatactgtgagaagtggcagaccgatctggagtggatgagtgaggtatcgccctttaataatgatgagccggtgtggcattttcatccggttgtgtttttggacgctataacgaagggtaaatcaaaaataacacgacagatgctcaggagaatttggactaatccagaaaatgtttctgactctgtccttgatgttgtagccgaagaattttcgaataaatttgagatatgcaatatcaatactaagaatagattgtatcatttttttgctcaaatatatcaagaagtagggccaacttttaatttaaatgagggctttaactacaggccacaagtcttgataggtaagttttcatattaccgtaatcaccctcaagatgcgcaaatggatggttatatccccggaagacaagtggcaaataaacaaaatattgcgaatagggcttatggcgggcgtggggggaacaataatattgcaagtggagatggatggcgttaccgcggaagagggatgaaacaattgacattccgaaataactacagttcttttacaaactaccatgaaaaaatttggggggaacacatcgattttgaattaaatccagatctattactggagacggtatatgcggcaaggtctgctttgtatttttgggatcagaataatttatatagcagtgctgacaatggcattagtagagatgtatcagattcgataacccgggtcattaatctttatgatgaccattatgctgacagatacaacaatttagtaagatttatacaagaaggtatatttgatgaaatactataa

SEQ ID NO: 134133 - DNA, 210 bp, Enterobacter cloacae
atggtgaaattgattatgactattttactcatgcacaggattttttttgaatcgtggcttacgcatattaatgccaaagtaattaagcagacacttaatcaatctgaagtacagctttctttaggtgaggaagaattattgaataaatacaaaatagaacttaatcatgagtcttgctggaagattaattctgtacagccagttagctaa

SEQ ID NO: 134134 - DNA, 300 bp, Enterobacter cloacae
atgagaaagattagcctgaaattttttttattgatggttttattgctatttattcctctgaataaagtcatggcaggggagattgaatgctcatcaccgcaggaaacagttctctacttttatagatggtatctcaatgaaattaaggatgagaagtatcctctaacacaaaattataacggcgataatgccagaataaacaagtgggttagttcatctttactcagtgaactgaaaaaaaggcaattgcatggtgaaattgattatgactattttactcatgcacaggattttttttga

SEQ ID NO: 134135 - DNA, 2214 bp, Enterobacter cloacae
atgtccttaaaaggtcttcgtttcacgctggaggttgacggccaggagccggacacctttgcggtggtgagtttccggttaatccagcgccagtcggttccgtttgtgctgagcgtggacgtggccagtgactcgttcatgcagacggcagagatgctgctggagaaaaagtcggtgctgaccgtctggcagggagatattgcgcagcgtcacgtgaccggcgtggtggccggattcgggacgcaggagaacaacgggtggcagatgcgctaccacctgcgtatccggccgccgctgtggcggtgtggcctgcggcagaacttccgtatcttccagcagcaggatatccggacgatatcggccacgttactgaacgagaacggggtgacggggtggacgccgctgttttatgaggcgcacccggcgcgtgagttctgtgtgcagtacggggagagtgacctggcgtttctgtcgcggctgtgggcggaggagggcatcttcttctttgaccggtgtgcgggggacagcgcggagcagacgctgacgctgtgtgacgacgtggcggggctgtcggacgcgggtgagtttccgtttaacccgaatacggatgcggtgaccacggcgtgtgtcagcacgttccgctatgaagcgcaggtgcgaccgtcgtcgttacagagccaggattacacgtttaaggtgccggactgggaggggctgtacgggcaggagggggacaacctgaacgggcagctcgcgcagtatgaggtgtttgactatccgggacggttcaaggatgaacagcacgggaaggattttgccctgtaccggctggaggggctgcgcggggatgcggagaaggcgacgggggtgagtaactcgccggcactgtggccgggagcgcggttcacgcctgccggccacccgcagaaagcgctgaaccgggagtggcaggtcatcagcagtatcctgacaggggaacagccgcaggcgctgcacggtagccggggccggggcaccacgctggggaaccgttttgaggcgataccggcggaccggacatggcggccgcagttgcaggagaagccgaaggtggacggcccgcagagtgcggtggtgacaggcccggcgggagaggaaatcttctgcgacgaacatggccgggtgcgggtgaagttccggtgggaccggtataacccggagacggaggcgagctcgtgctggatacgggtgtcacaggcgtgggcggggccggggttcggtaatctggcgataccgcgcgttggtcaggaggtgatagtggacttcctgaacggggacccggaccagccgataatcacgggcaggacataccatgagtttaaccgttcgccggggaaactgccggggacgaagacgcagatgaccatccggtcaaaaacgtacaggggaagcggtttcaacgaactgcggttcgatgacgccaccggtaaggagcaggtgtatatccatgcgcagaagaacatggatacggaggtgctgaacagccggacgacggacgtgaaggtggaccacacggagaccatcggcaacaaccagcaaatcacggtggttaagggccagacggtgaaggtggggagcaaaaaggagggggggcacgaccagtccatcacggtggcgaacgaccggagtatcacggtgcgcaatgaccagacggtgagggttaggcatgaccggacggtgaacatcagccacgacgaggggctgtatgtaaaaaatgaccgtaaggtgacggtggaagggaagcaggagcagagcaccaccggagaccatatcagcctggtgaaggggacgcacagcctggaggtgaagggggacctggcgcggaaggtggccggggcgctggggataaaggtgcggaatgaaatcgtcctggagagcggcggcaatattaccctgaaggtgggaggctcgttcgtggttatccatgcgggcggggtggatatcaccggaccgaaaatcagtctcaacagtggtggcagtgtagggacgccggtggggacactgcaaccagcagtgctgggggcgctggccgatgagggtgatgatggttctgatgcgaatgatacaaatgatgcaggtaattcagagctgccacgaaaaaacgtccaggacacgtttaatagtcccccgggggatctggtaccgccgcaactccggagaatattttcacgataa

SEQ ID NO: 134136 - DNA, 519 bp, Enterobacter cloacae
atgccaacaccgtgttacatctccattactggccagactcaggggaatatcactgccggtgcatttactgctgattctgtcggcaacatctatgtgcagggccatgaagacgaaatgctggtgcaggaattcctgcataacgtcaccgtgccaaccgatcctcagtctggccagccttctggtcagcgtgcccacaaacctttcatcttcaccgtagcgctgaacaaggccgttccgctgctgtacaacgcgttggcttcgggtgaaatgcttccgaaagttgaactgcactggtggcgtacctctgttgagggtaagcaggagcactatttcactacccgtctgactgacgcgaccattgtggatatgaacctgcatatgccgcactgccaggacccggctcagcgtgagttcactcagctgctggcggtatcgctggcataccgtaaggttgagtgggaacacatcaagtccggcacttccggtgccgacgactggcgtgcgccgctggaagcgtaa

SEQ ID NO: 134137 - DNA, 498 bp, Enterobacter cloacae
atgagaaacaaaaatgatggcagtgtcgcgccgaaagaacgaatttcaataaaatacactccaaaaattgacggagtgccaacagatattgaactgccccttaaccttttgattaccggcaatttgaaaggtgcgccggatgaaaccccgctggatgaacgtaccgccgtttctgttaaccgacacaacctcgatgccgtaattgcggaagcgggtatcgagcgggaattttcggttccggctgaactcagtgatgtgcctgatgaaagtctgcatatcaacctgaaaattaagtctatgagcgatctttccccggacagcatcgcccgccaggttccggagataaaaaaactgctggagctgcgcgaagcgctggtcgcccttaagtcaccaatggggaaccttcccgccttccgccagcaaatccaggcgctgctggaaaacgaagaaacgcgcgagcagttgatccaggaactgggcatcgccgctaagaaataa

SEQ ID NO: 134138 - DNA, 1485 bp, Enterobacter cloacae
atgtcagtacaggaagatattaccgccgccagcgcgccacagactgccgcagcgccgtcactgcttgatgaaattatggcgcagacccgtgtccagcctgcatcagaaagctacgatattacccgccagggcgtgggggcttttattgccgccatgctacagaacgacagtaacgaggaacccgtcaatattctggccgtggatgccatgattgccgatattgatgcgcgtaccggcaggcagatggacgcgattatccatactccagagtttcaggaagtggaatcgctgttgcgttccctgaagctgctggttgaacgggctgatactcgtgaaaacatcaaaattcattttttgaacgccacccaggaagagttacttgacgacttcgatttcgcggcggatatcacccagtccgcttattataagcatgtttattcaagcggttatggtcagtttggcggcgagccagtggcggcggtaattggtaattttgcgtttaaaaataccacgcgggatatgaagttgctgaaatatctcagccaggtgtccgccatgtcccattcacctttcctgtcgtcaatatcgtccgaatttttcgggctggattcgtggacggaattacctggcgtcaaggagcccggggccattttcgaaggcccggcttactcccgctggcgtgccctacgggagtctgaagattcccgttatctgggactgaccgcgccccggttcctgctgcgccatccctactcgaccgatgaaaacctggtaaaatcgttccgttataatgaagatgtcagccagcgccacgatgattatttgtggggcaataccgcgtttctgctggctgccaatctggctgaaagtttcgccaaataccgctggtgcccaaatatcattggtccatccagtggtggcgcggtgaaagacctgccggttcatatgtatgaagccatgggacatatgcaggccaaaattccgacggaggtgttaatcactgaccgtcgcgagtatgagctggcggaagagggatttattaccctcacaatgcggaaaggctctgacaacgcctgctttttctcagccaattcggttcagaaaccgaaaaaattccccaaaacaccggaaggtaaagccgctgaaaccaattataagctcggcacacaactaccatacctttttgttatcagcaggttagctcactatatcaaagtacttcagcgtgaacagcttggttcatggaaagagcgaggcgatctggagcgcgagctgaatggttggatacgtcagtatgtggccgaccaggaaaatccccctgctgaagtccgcagccacagaccgctgcgccaggcgaaaatcgacgtgctggatgtggaaggcgagccgggctggtaccaggtcgctatcagcgtaaggccacattttaagtacatgggtgccagttttgacctgagcctggtcggacgcctggataaggaataa

SEQ ID NO: 134139 - DNA, 423 bp, Enterobacter cloacae
atgagccgggattcaggatttacaggcagtctgtttgagcgcatcacggaggcggcgaacccgtcttcataccagagccccaaagaagcgctgctgagatcgatcaggcgtaacctgcaccagatcctgaatacccgctccggcagttgttatggttcgccggatctgggcatcgttgatttgaatgatgaaacactggcttccagtgatttcagacgtgaaattcgaaaaaacatcagcgagtgtattttgcgttatgaaccccggattgccgataccgtcgtcacggcggcaatacaggatgaatataccccgctggagctgcgttttcacattgtggcaacggtagatttcagtgaggccagagacgtgttcgagtttgatattctgctggacagccaccagcattattgtgtggagtaa

SEQ ID NO: 134140 - DNA, 1842 bp, Enterobacter cloacae
atggctttcgaagaacgttactaccgcgaagagctggactatctgcgtcgacttggaaagttgctggcacaggaaaaaccgcatctggctcactttcttgccgagaaggagggcgatccggatgtggagcgcctgctcgaagccttcgcctttatgtccggtagactacgccagaaactcgaagatgagttccccgaattcactcatgggttgatccgtatgttatgggccaactatctgcgccccgtccctgccatgacggttattgcctatgaacccgaagttgatctgttgaaaacgccgatcaaggtttgccgtaatgaactcatcagaagcagaaccagccattctcaaccttccggcctgggagcgctgacggacaatagcaatgaaacaacaccctctcagccctgtcattttaccctggcgcgggatatctggttacaacctctgcgtattgataacgtgcgcaatgccagcagcctgaaagaaggtgttattgatatcagcttcattgcagacgaccgggtgtcaccggatatcctcgatctgaacaggatcaccttctggctgggcaacgaagacgactatacccgccaccagctttatctttggttctgcgaatgcctgatggacgcagaactgattgccggagaacgtcatttgccattgccggatctctggctggatgccgccgggtttgacaaccaggatgccctgctgccctggccgaaaaacgtccacagcggctatcgcgtgctccaggaatatttctgttatcccgaagcgtttttctttttccacctgcgggatgtcgccccgctaccagcggattttccagtcagcgcctttacgctgcgcctgcaatttaaccgcccgttaccggctgatattaaattacgccaggattcactgcggctgcactgtacgcctgctgttaatctgttctctcattacgccgaacccgtcaggccggacggccgcatggcggaatacccgttgcgggccagccacaggcatccggatgcctatgatatttttcagatcagtgccgtcaccagtaaagtaaaagcgccctctgatgcagccattccaggtagccaggtgcatcactggcccgaatttgagagcttcaaccaccagatggaatacagccagcagcgggaggttgtctactggcaccaccggacaaatacctctctgtttcatcgcgggctggagcattccatcgcttttgttcatgctgacggcagcgtgccggacagctcacggtttaacgatgatgtgatcaccgcctcattgatctgtaccaaccggatgctccccgcccggctgcacaccggtgatatctgcgttgctgtcaacaagaatccggcagtagcctcatttcgtaacgtcacacgtccgacacagcccctctggccggtgacagacggcgacatgcactggtcgctgatttccgccatgaacctgaactacctctccctgctggaccgggaaacgctgatccagatcctgcgcacttttgatttgccgggcgttcatcatccgcaacgggccaggctgtcgcggcagaaactggacgccatcgaaaaactcgaaactaaacccgtcgatcggctatttaagggcgtcccggttcgcggactggcgaccacgctgtggattcgtcccgatccgtttgtctgtgaaggtgaaatttatttgctgggcacggtgctgtcgcacttctttgcgctctacgccagcatcaattcctatcactgtctgaaaattataaacacggaaagccaggagtcctgggaatggcaggaaaaaacgggccagcacgccctgatataa

SEQ ID NO: 134141 - DNA, 1050 bp, Enterobacter cloacae
atggcaggaaaaaacgggccagcacgccctgatataatggcggagacaccgtttccggtggatgtgcgccgctgtaatttctatgtgctgatggaaacgcttcatcgtcggtatggcgtagcgaatcaggaaatttcgctgcgtaccgaacccgaacaggaaattgtgcgtttcagttccgatgccagcattgcgtttccgggcagtgacttaagcaaactttcccgaagccacagcgggcattttgtgctggaaacgaaattcctcggcttttccggcagccagtcgccgttgcccggctattatctggaccggatggcacgcgaatccgcgcagaatgaagacggcctgaaagagtttctcgatctgttcagtcaccgctggacgcagtttgcctaccatgcctggcgtaaatatcgctattacatctgctttcgcaacggcggctccgatacattttcacagcgaatgtatgcgctggtcgggctgggcagtcagagcatgcgtgacaaacttgccattaaccacagcaaaatgctggcctatgccggtatcctggccacaccaggccgggcaccggaggtgatctgcaatctggtgtcgcactgttttgatttaccggatgtcactattgaacgttggcagttgcgtaaggtgaccatcgatccgtcacgccgtacccaactgggggtacgtaatccgaaaagcaaaaccgccggacatgtgcagggcaaatccattattggcgtcaattttacccttggctcccgcgtgccggatcgcagcggcaaattcctgttgcagattggcggcctgtcgcgtgaacgctatctctcatttttacccgatggtgaaaaccacctgccgctgaccatgtttatttcctttattctgcgcgaccagtttgcctgggatttacggctgagcctggcaccgcagcaggctaaggggatgcgtcttggcgacagtgccagttctcagctggggcgaacctgttttattggtgagcccaaaacgccgcccgccatcaccatttgtatcagggaataa

SEQ ID NO: 134142 - DNA, 1284 bp, Enterobacter cloacae
atggctgaggaaaaacagcaatcccggcaggcatcgctgactctacaggtaatgaacggcaatgaactggaaagcggacgtgccgcaaaatgcctgttcagcgaagacaacggcgatatcggacatgcttccgactgccactggccggtgcaggacagggcgggggctatcgccggacatgcctgttctgttatccggcatgacggtgcgttctgcctgaaaagcctgatgccggggctgatgattaatctggcacccgtctcaggcgatgcgctggtgcgcctgcgtcagggcgatgagatccagctcggtgcacttgcgctgaaagcttttctacatgaaggggctgccatcacctatgacgagcggatggcgacgccggaaaccatcgtcatgaaccgcgataatctggcggaaacattgttgactaccgagggccaacccgcttatccgggaatgccgttccagcaccagcttgcctccacggtggcgaacggtttttccggcgatccgctacaggcgctacagtcggagagactgacggcattaccagactcgttgctctccatgcgcgcctcccgaacagagccgccgttgtccgatctgaccggtaatcatgggattaatacgccctttatggatctgccaccgggtcactcccgtaacaataacgaagataaattttccgacatggcgcagtaccacctggccgtcacgccgttactgcgcgggatggactgtccgctgaccattaataactctcaggacgccgacgagtttcttgaagaggccgggcgagcgctacaggcggcaattaaaggtctgctcaacctgcaacagcagcagaatagcctgtccgataaacacctgcgcccgctggaagataacccgctgcgcctggatatggattatgccaccgctcttaacgtgatgtttgctgaagggaaaagcccggtgcatcttgccgcccctgcggccattgccgaaagcctgcgcaatatccgccaccacgaagaagccaataaagccgccatctgcgaggcgctgcgcgtgatgcttgatgccttctcgccacagaatctgctgcgccgctttgtgcattaccgccgcagccatgaactgcgccagtcactggacgatgccggagcctggcagatgtacagccattattacgatgagctggcatccagccgccagcaaggttttgaaatgctgtttaacgaagtctacgcccaggtctatgaccgggtgttgcgcgaaaaacagcgggagccggaagcatga

SEQ ID NO: 134143 - DNA, 534 bp, Enterobacter cloacae
atgacagggcgttttttgcgcgtctgcgtgatggtgatgtttttcgccgccgccctgagcggatgcgagacggcgaaaaaaatcggccaggtcatctccaatccgaatatcccggtgggtgatctgaagtcacagccatcggaagtcaccgtcaccctgctgaccgagccggataccaatctaaccgccgatggtgaagccgccccggtggacgtgcaactggtctatctgagcgacgactcaaaatttcaggccgccgactacgaccagatcgccaccaccgccctgccggatgtgctggggaaaaactacatcgaccaccaggattttaacctgttgccggacaccctaaaaacgcttcctcccataaagctggatgagaaaaccggctttatcggcgtggtggcctatttttctgacgatcagacaacggaatggaaacaaatcgaaccggtggagagcaccggacgccactatcgcctgctggtgcatatccgcgccagcacgattgagatgaaaaaagaggaagagtga

SEQ ID NO: 134144 - DNA, 1347 bp, Enterobacter cloacae
atggcgacaatgaaaaacaaggttatctggcaggagggtgtgtttgccctgccgcagcattttcagcagcagcaacgccactgcgaatacctgctgacccgtcgtctggatgcgcagggagattttgcgtggggctttaccgatctctccattaataccgcactgctggcccagggaaaaatcatgattgaccgggcggcgggctgtatgccggacggcaccgtgttcagtatcccggatcaggatctgctgccggcgccttttcagccggggacgctgtcatcgaaagaaagtcacgatatttatctggcgctgccggttatcagcgatgtggtcaatgaaattcaggggctgcacagcgccgggcagggaacgggacgctaccgccttacccatacccgcattcgtgattttcataccgatgaaggtgacgaacagcctgtcggtctcgggcaactggttccccggatcgtcagcggcgcggaagatctcagcgcgatggtgacgcttcccctgtgtcgtattcgtaacaaaagcgccaccggggcgctgatgctggatgaggcttttattcccaccgtccagacggtacgggtcagcagcatactcggggcatttgccggagaggttcagggactgcttaccagccgcgcggccgatctggccgggcgcatcggatccccggagcagagcgggatcgccgatgtggctgaatttatgatgttgcagatgctgaaccgtcaccagatgcagttcacccaccgggtacgcctgcacacgctgcatccggaggcgttctaccgggacctggtggggttgctgggcgaactgatgacctttacggaaagcaaccgcctgccctgcgcggtggagccctacgatcaccgggatctcaccctcacctttaacaaaacggtgataccggagctgcggcgggcgctcaataccgtactggttccccgcgcgcagaatctgcccctgcattataccgaaggcacctggattgcctccgtcagcgatccgacgctgttgcagtccagcaagctggtactggccgtgcgcgcccggatgcctttcgaccaggtacagcgccagtttattcagcagtcgaaagtcgccgccaccagcaaaatccgcgacgtggtcagcgtccaggtcccgggtattccgctgcgcacgctcaccgcggccccgcgccagttgccctaccacgaaggctatgtctacttcgagctggaaaaaggcaccccggcctggcaggacgtggtgaaaacgggcgcgctggcgctgcatatctccggcaccttcccggatctggatctccagctatgggccataagagggtaa

SEQ ID NO: 134145 - DNA, 765 bp, Enterobacter cloacae
atgagcgatatgagcgaaccatcggcttttcctgtggagccggaaagcggaacgccgggacgccagtaccggcttacgcttcgcggcaacagcctgaacccaatgctcgatgccgccacgccgctgctcggcatggtgatgcgcctgtcaaccatgaacagccaggcgatgccggagcacctgttttcccaggtggtaacagacgttcaggccgtggagcagttgcttcaggagcagggctacgaaccgggcgtgattgtctcgtttcgctatatcctctgcacctttattgacgaggcggcactcggcaacggctggtcgaataaaaatgagtggatcaaacagtcgctgctggtgcatttccataacgaagcctggggcggtgagaaggtgtttattctgctcgaacgcctgatccgtgaaccggtgcgttaccaggatctgctggagtttctgtatctgtgcttttctctcggctttcgtggacgctacaaagtggccatgcagcagcaggatgagttcgagcggatataccagcgcctgcatcatgtgctgcataagctgcgtggcgatgcgccttttccgctgctgcaccaggacagaaaaacccagggcgggcgctatcagcttatcagacggctgaccgttaaacatgtgctgctcggtggtctcgccgtgctggtgatgttttatctgttttacctgctgcgtctggacagccagacacaggacattctgcaccagcttaataaattactgcgataa

SEQ ID NO: 134146 - DNA, 2760 bp, Enterobacter cloacae
atgatccagattgatttggccacactggtaaaacgatttaaccccttctcaaaacaggcgctggagatggcggcgtcggagtgcatgagccagcaggcggcagaagttaccgtcagccatgtactgatacagatgctggcgatcccgcgtagcgacttaagggtgattaccgaccgcgctaacattggtgcggatgaactacgccaggcgctgacggtggaaaactatgccactgcccggtctgcggacagctacccggcattttccccgatgctggttgaatggctgaaagaggcctggctgctggcttccgctgaaatgcagcagacggagctgcgcggcggcgtcctgctgctcaccctgctccactcgccgctgcgctacgtgccgtctgccgccggccggctgttgactgccattaaccgcgaccagttacagcaggattttgccggatggacgaaggagtctgccgaatccgtggtgctgaatgccgacgggcaggtcgccagcgctacagccgataccggcgacagcctactttgccgctatgccaaaaacatgacggaagatgcccgcaagggacgactcgatcccgtactgtgccgggataatgaaatcgatctgatgatcgatattctctgccgccgccgcaagaacaacccggtggttgttggtgaagcgggcgtgggtaaaagtgcgttaatcgaaggtctggcgctgcgtattgtggatggccgggtgccggacaaactgcgtgacaccgatattatgacactggatctcggcgcgttgcaggcaggcgcgtccgtcaagggtgagtttgaaaagcgcttcaagggattgatggcagaagtgattcagtcgccgaaaccggtcatcctgtttatcgacgaagcgcatacgctgattggcacgggcaaccagcagggcgggctggatatctccaacctgctgaaaccggcgctggcgcgcggcgaactgaaaaccattgctgccactacctggagcgagtacaaaaaatacttcgagaaagatgccgccctgtcgcgccgcttccagttagtgaaggtgagcgaacccacggcggcggaagccaccattattctgcgtggcctgtcggcggtgtatgagcagtcccacggcgtgctgattgacgatgaggcattgcaggcagcggcgacgttaagcgaacgctacctttccggccgtcagttgccggacaaggccatcgacgtgctggataccgcctgtgcgcgggtggcaattaacctgtcatcacctccgaagcagatttcggccctgaccaccctgcgccaccagtgcgaggcggaaatccgccagcttgagcgcgaactgcgtattgggctgaggactgacacctcacggctcactgaagtgctggtgcagtatgacgaaacgctgaccgaactggatgaactggaagccgcgtggcgccagcagcaggcgctggtgcaggaaattatcgcgctgcgtaagggactgctggatgaaactgctgcaccggatgcagggaccgtcgccggggatgaacggatagcagagaccattgacgataacaccgtggctgcggatgaacccgttgccgggccgccggaacctgaaatccttccggcagagcgtctggcacagttaaccgccgaactggacgccctgcacaacacgcagcttctggtttccccgcacgtcgataaaaagcaaatcgcggcggtgatcgctgaatggaccggcgtgccgcttaaccgcctgtcgcagaatgaaatgtcggtcattaccgatctgccgcagtggctgggcgacaccatcaaggggcaggatctggcgattaaacacctgcataaacacctgctgaccgcgcgcgccgacctgcgccgtccggggcggccgctcggcgcgttcctgctcgccggtcccagcggcgtgggtaaaaccgaaaccgtgctgcaactggcggagctgctctatggcggccgtcagtatctcaccaccatcaacatgtcggagtttcaggagaaacacaccgtttctcgcctgattggctccccgccgggctacgtgggctacggcgaaggcggtgtactgaccgaagccattcgccagaagccctactcggtggtgctgcttgatgaagtggaaaaagcgcacccggatgtgctcaacctgttctaccaggcctttgataagggtgaaatggccgacggtgaaggccgcctgattgactgcaaaaatgtcgcctttttcctcacatcaaacctcggttatcaggtgattgttgaacatgcggataacccggaatccatgcagaaagcgctgtatccggtgctggcggatttcttcaagcctgcgctgctggcgcgtatggaagtggtgccctatctgccgctgtcgcgtgaaacgcttgccgtcattatcgccgggaagctggcgcggctggataacgtgctgcgcacccgctttggcgcagaggtggtgattgagccgaaagtgaccgacgaaattatgcagcgcgtcacccgcgccgaaaacggcgcacgtatgctggaatcggttatcgatggcgagatgctgccgccgttgtcgctgttgctgttgcaaaaaatggcggcgaacgcggcgattgcctgcatcgtgttgggcgtggcggacggcgcatttatcgcagacgtggaggactcgccggaggacagtgcagacgccgacgcacagccggaaccggaaacagaggacgctgctgttttatga

SEQ ID NO: 134147 - DNA, 735 bp, Enterobacter cloacae
atgagcaaaatgcggatactcttggttggtctgttgttaccggggctgctcgccagcaccgtactggcagaagcgcctgctgaaccggcggcgtccggcgcggtgcagccgggcatcgtggtgccagagacgaacgcacaggcgacggtaacggccatgatggcctgccgccgggagcctgctgcgctggagcggctggactgctatgaccgcattcttgcgccggaacagcctggttttgagcgcgcgctggtgaaggcaagctacaaaggtgaggcctggaaacgggccttcagccaggaaaaacagcgcccggataactccaccacgctgatgctaacgcagagcgatgaagagcgaccaaccgtgattatcaccacgcctgctatcggcaacgtgccgccgcgcccggtgctgatgttcagttgcgtggacaacatcacccggatgcaggtggcgctgactcacgccatgacgcagaacgacatcgccgtgacgctgaccaccgaaaccgagcgttttcagtcgcactggtttatccgcgagaacggcactctgctggagtccagccggggtttatccggcattgaggagattaaacagcttttcggcgcgaaaacgctgaccatcaataccggtacggacagcgccgtcggaaaactgacgtttaacattgacgggctggcgaaaaccatcgcaccacttcgtgaagcctgccactgggcgggggaataa

SEQ ID NO: 134148 - DNA, 1416 bp, Enterobacter cloacae
atggacttacgtaatcccgatatctggtttgcaaacctgctgaaaaatctgccggaagaaaaactggccgccgcactggacgacaacaatcctgaatgggagtttatcgacagcgaaatcgtcaagctcggttcgctggcccacagccagcttgatgtaccggaactccagcgccgggggctggcgctactggcctcagagagcaaggactttcgcctgctggcgcacctgctgcgtaccctgcaacataccggtgatatgttactggcgttgcgcctgctgacgcagtatacggagcattactgggcggttgccgcaccgcagaatatggcacataaaaaacgttttgcccttcaggtactgaaacgttttgaggccggtgctgatggttttgcgcaacaggctggtaccgcccaacgcgaccagctcctgggcgaactggcaaagctggcgcagctctggcagcagaataacgcgccggacctggcgcaggcggcggacgatatctttgcgctgtaccagcggacattccgcgacagcgaacctgccgcagcttccccggctccggtacagacttccgccacagtcaccacggcccccgccgcaccagcgacacccaccacaccggcttcaaccccggcacccgtggtaaacatcgacagttatgatgataaagcctggcgcgacacgctgctgaacgtctccgccattctttgcgagcgccagccggactcgccgcagggctaccgtctgcgccgccatgcattatggcattccatcacctccgcgccgcaggccgaaagcgacggacgcacaccgctggccgccttccccgccgatatgatggatgattatctggcgcggttaaacaatgccgacatggcgctgtggcagcaggttgaaaaaagtgtattgctggctccctactggtttgacgggcattacctctcggcacaggccgctcagcggctgggttacaccagggtggccgatgctatccgcgatgagaccgcgcattttctcgccaggctgccccagctcgccgccctgcggtttaacgaccggacgccgttcatcgcggaaccaacgaagcaatggctggcctcctcttctgcgggtagcaacgcagcgcctgccgtacagactgatgaggagttacaggcggtccgggcatgttttgacgcacaggggttggaagccgcgctgcaccatctggaaaccctgcccgcaggcgatccccgcgaccagttttaccggcagtatctcggcgcgcagttgctggaagaggccgggatggtacagcttgcccagcagcagtaccaactgcttttccggctggggctgcaaatgatgctgaccgactgggagccgtccctgctggaagcgctggaacagaaattcacggcagaaaaataa

SEQ ID NO: 134149 - DNA, 3531 bp, Enterobacter cloacae
gtgttcagattaccgacaccccgactgttcagcagtctgcgatccgccctccggccagccatgccccggtttaaggtttccgccgcctggctgatggcgctagcgtggatttttttgctggtatggatctggtggaaagggccgaaatggtcactttatgggcatcactggctggaaccgctgacaaacctctggctggctaccgctgtctgggggcttatcgccctggtctggctgacctggcgggtgatgaagcgtctgcaaaaactggaaaagcagcagaaacagcagcgcgaggaagaaaaagatccgctgaccgttgaaatccaccgccagcagcagtatctggagcactggctgctgcgcctgcgccgccatctggataaccgccgttacctgtggcaactgccgtggtatatggttatcggccctgccggaagcggtaaaagcaccctgctgcgagaaggttttccgtctgatgtcatttacatgccagaaagtatcagaggggtggagtaccagccgctgatcatgccgcgcgtaggcaaccaggcggttatttttgatgttgatggccagttgaccgccccctccgccgacgatcttctccatcgtcgcctgcgcgaacactggctcgactggctgacccggacacgggcgcgccagccgctcaacggtctgatcctgacgctggatctgcccgacctgctgacggcggacaaggcccgccgggaatccctgctacaaagtctgcgccagcagctacaggagattcgccagtgtttgcactgccgcctgccggtatatgtggtgctgacccggctggatctgctgaccgggtttgcggcgctgtttcatgcgcaggacaaaaaagatcgtgaaacgatccttggcgtgacgttcacccggaatgcccatgaaagcgacgactggcgcagtgaactggacgccttttggcagacgtggggacagcagatgaacctggcgctggcggatctgatgctggcgcaggggaatgccgcacagcgaagcgcactgttcagctttacccgccagatgcagggaacgggagatattgttgcatccttactcaccgccctgctggacggcgaaaatatggacgtgatgctgcgcggcgtgtacctcacctcctcgctacaacgcggccaggtggatgatatttttacccagtccgccgcccgccagtacggcctgggcagcagttcgctggcctcctggccgctagtggaaaccgtgccttatttcacccgccgcctgttcccggaggtgctgctggccgagccgaatctggccgatgaaagcagcgtctggctaggcagttcacggcgcagccttgtaacagcctccgtctgtggtgccgcagttgttattctgctggcaggcggctggcatcactattacaacaaaaactggcagtccggcgttgatgtactcgcacaggccaaagcctttatgaatgtgccgccgccgcagggtactgatgaatatggcaacctgcaactgccgctgcttaacccggtacgcgacgccaccctcgcctacggtgactaccgcgaccataattttctggcggatatggggttgtatcagggtgcccgcgtgggaccgtatgtggagcagacctatattcatttgctggagcagcgttatctgccttccctgcttaacggtctaatccgcgatctgaataacgcacagccggagagcgaggaaaagctcgccgtcctgcgggttatgcgcatgatggaggataaaagcgggcgcaataatgaactggtaaaacagtacatggcgaagcgctggagcgatgaattccacggccagcgcgatattcagacacagctgatgtcccacctggactatgcgctggcacataccgactggcacgcagagcgggcggcaggtgacagtgacgccatcagccgctgggcaccctatgacaagccggttgctgctgcacagcgtgaactgagcaaactgccaatataccagcgcgtctaccagacgctgcgtaccagagccatgggcgtgctgcctgcagacctgaatttacgtgaccagattggccctaactttgataaggtctttatctccggtgatgatgacaaactggtgatcccgcaattcctgacccgctacggactgcaaagctatttcgtgaaacaacgtaacagtctggtcgagctgaccgcgctggattcgtgggtgctgaacctgacgcagagtgtcgcatacagcgacgccgacagggatgaaatccagcgccatatcaccgagcagtatatcagcgactacaccgccacctggcgcgccggaatggataacctcaacgttcgcgattatgaagccctgccggaactgacggatgcgctggagcaaatcatcagcggcgaccagccattccagcgggcgctgacggcgctgcgggataacacccacgccctgacgctttcgggcaagctggaagacaaggaacgggaaatagcaacgaacgaactggattaccgtctgctgtccaggctgggacgcgactttgcaccggaaaacagcgtactggaagagcagaaggacaagaccagtacgctacaggcggtctaccagcaactgaccgaactgcaccgttatctgctggctgtccagaactcaccggtgccggggaaatcggcgctcaaggcagtacagctacggctggatcagaacagcagcgatccgatcttcgccacccgccagatggctaaaaccctgcccgccccgcttaaccgctggatgggcaagctggcggatcaggcgtggcacgtggtgatggtggaagctgttcactatatggaaatggactggcgcgataacgtcgtcaaacccttcaatgaacagcttgccgataaatatccgtttaacccgcgcgcgtcgcaggatgcgtcgctggatgcgttcgagcgcttctttaaaccggacggcacgctggataccttctataaggagaacctgcgcctgttcctggaaaacgacctgaccttcggcgaggatggcaggatactcatccgcgaagatattcagcaacaaatcgaaacggcgcaaaaaatccgcgacatcttcttcagtcagcaaaatggcctgggggcgcagttcgccgtggaaaccgtgtcactttcaggtaacaagcgccgcagcgtgctgaacctggacgggcaactggtggattacagccagggccgtaattataccgcccacctggtatggccgaataatatgcgcgagggcaacgagagcaaactgacgctggtcagcagcaccggcagcaaatccccgcgcagcatcacgttcatcggcccatgggcgcagttccggctgtttggcgcagggcaactgaccaacgtaaccagtgataccttcaccgtgcgctttaacgtggacggcggctacatgatttaccgcgtgcatgtagataccgaggataacccgttcactggcggactgttcagccagttccggttgccggataccctgtactga

SEQ ID NO: 134150 - DNA, 1359 bp, Enterobacter cloacae
atgagtaacgcacagatgcaaattatcgttaccggccgcgatccacgtgacctgccggaattcagcgccttacgtgaggagatcaacaaggccagtcaaccttctcagccggagcttaactggaaactagtggaatcgctggcgctgaccatcttcaaaacgaatggtgtggatctgcataccgtttcctattacaccctggcacgcacccggatacacggacttgcagggttctgtgagggggtcgaattgctggcggcaatgacaggtcatgagtgggataaattctggccacaggataatcatgcccgtaccggaatgctcgactggctcaacacccgtaccggcaatatcctgcgccagcaactgtcattctctgatacagatctgccgttactgtaccgcgcagagcgggcgttacagcttatctgcgacaaacttcagcaggtagatttgaaacagccgccacgcgtggaaaacctgctttattttgtgcagaacacgcgaaaacggctggagccgccgcagaaaagcagcgtgaatacgccgtcacaaaccacggtcagaacactggtttatgcgccggaaagcgcactgcccgcgacgccagaggctctcctgcccgtacctgatttaccggaaatgaaggtcagggttcagcatggtgccagccctgaaacaaagcctatgacgggccgcaatgtaaaatcatttctggcgggtgttgcctgtaccgccgccgtcgcagccgttctctggtggtggcgggtatacccgatgcagcagcaactggcgcaggtaacagataccgcgcaaggcgcggcaacggcctggctggcctcccctgatctgggtagctacgggcaacggctgttaccgcttcctgatgttccgccattgcaactgctggagacgggtatgcagatgatgcgaacagcagacagtcgctggcccgagagtctgcaacagcagcaggcaacggctcggtggaacgctgttctgcacacgcgggcgcagaacagcccgaatatgaaaggctggaaacaggcgcgggaaaatttacgggatttcgccgacctgatgctgaaaaaagaaactgaaaagcagggttttaccctctcatatatcaaaacagtgacatggcaggcggagcggttattgaatcaggcaacgccgctggaatatctgctgacgcagtaccaggatgcccgcgcccgcaagcaaaacactgaagctctggaaaaagagatcaatgaacggctggacggcgtgttaagccgttggctgctgctgcacctcacaacgccggattcggcaatggatagtgaagccgggcaaccggtatccactaataattaa

SEQ ID NO: 134151 - DNA, 480 bp, Enterobacter cloacae
atggccaatctcgtttatctgacactaaacggagacatacagggaatgatttcagctgggtgctcgtcaatgcagtccattggcaacaaagcccagctcgcgcatctggatgagatcatggtcacatcgttaagccacggtctgagccgcgatcaaaacgtcaatcatcagatgctgaccatcattaaacccgtggataaatcctcgcctctgctgggtaaggcgatttcggataatgagtgtctgacctgtgtttttactttttaccgtaccaaccgttttggcataaatgaactgtactacaagctcaaactgactaatgcccgaatatcgaatatcagtctgaacgttccccataccattaccgacagtggagggcagccagaagagtcaatctcgtttagctatgaaagcattaactgggaacactgtatcgcaggcaccagcgcttacagtctgtggagtgaacggcttttttaa

SEQ ID NO: 134152 - DNA, 870 bp, Enterobacter cloacae
atggcttccagcaaaactctcgaacaggcaattgccgacatcaccatctggcgcaaaggcgaacagcgtgcgccgcataagcctttattgcttctgtacgtgctggcgagctatcagcaggggcatgcacgactgtttgattacggtactgaggtccacgaacagttgcttagcctgctagaacgctttggcccacagaggaaggcgcattacccaaatatgcccttctggaggctcaaaggggacggcttttgggatctgaagaatactgagttttgtttgaccactggcagtaagcagccgcccgttaaagaacttgtggaacataacgtcgcaggcgggtttgatgaagaacactttgcgctgctgaataagaacaaaaacctgataggctcgctggcgcagcagatccttgaagcgcattttcccgaaagcattcaggaagagatcgcggatgagatgggttttgatattcagcagatccgtaaggttcgcgatccgctgttccgccagcaggtgctgcgagcttataactatgagtgtgcaatctgcggattcaacatgcggcatgataacgcctccgttggacttgaagccgcgcatattaaatggaagcagtttggtggaccgtgtgagatcccgaacggactggcgctatgtgcaattcatcataaggcgtttgataaaggatcgattgggctggatgagagtatgcgggtattagtgtccgaggcagtgaatgggaatggggttgttgggcggctgttctgggattttgctggtaagcagattgctttgccgatggtgaaagggaattatccaagggaggggtttgtggagtggcataggaaggaggtgtttaaagaatga

SEQ ID NO: 134153 - DNA, 258 bp, Enterobacter cloacae
atgggtttgaagattagattgcaatggtatgatatgaggactgaactaggtgaaggtacagaattttcgaacgatttcggcgataatgaggagatcatgaccaaaggtcttcatatgccgactaagaacaatgtgaataatggtttttttgatgttgaagccgaatggatacccgttcttcagccccacttcgtacataaaataacccccactatttatgactatcaggtttctttcgactatagggataattggtga

SEQ ID NO: 134154 - DNA, 132 bp, Enterobacter cloacae
atgttttcagctttacgtcaacagaaaattgcgcacgttgttttgattgctgcaaaaatgggcgatggcagcgtcagccatcgccggaccggggtttactttttcgcctggcgcgtcatcacggtgcgatag

SEQ ID NO: 134155 - DNA, 2907 bp, Enterobacter cloacae
atgccttttacacttggtcaacgctggatcagcgatacagaaagcgaacttggattaggaaccgtcgttgccgtcgatgcgcgcatggttaccctccttttccctgctaccggtgaaaaccgcctgtacgctcgcaatgactcccctgttacccgcgtaatgttcaatccgggcgacaccgtgaccagccacgaaggctggcagctgaaggttgaagacgtaaaagaagagaatggactgctcgcctacattggaacgcgtcttgataccgacgagacgaatgttatcctgcgtgaagtgctgctcgacagcaaactggttttcagcaagccgcaggaccgtctgtttgccgggcaaattgaccgaatggatcgcttctccctgcgctaccgcgcgcgtaagttccagagtgaacagtaccgcatgccgtggagcggcctgcgcggccagcgtaccagccttattccccatcagctgaatatcgcccatgacgtgggccgtcgccatgcgcctcgcgtgctgctggctgacgaagtgggcctgggtaaaaccatcgaagcaggcatgatcctgcaccagcagctgctctctggcgctgccgagcgcgtgctgattgtggtgccggaaacgctgcaacaccagtggctggtcgagatgctgcgccgctttaacctgcgcttctccctgttcgacgacgagcgctatgccgaagcccagcacgacgcggacaacccgtttgaaaccgaacagctggtgatctgctccctggacttcgtacgccgcagcaagcagcgcctggagcacctgtgcgacgcagaatgggatctgatggtcgtcgacgaagcgcaccacctcgtctggagcgaagatgcgccaagccgtgaatacatggcgattgagcagcttgccgagcgcgtaccgggcgttctgcttctgaccgccaccccggagcagctgggtcttgagagccacttcgcccgtctgcgcctgctcgatccgaaccgattccacgattttgagcagtttgttgaagagcagaaaaactaccgtccggtggcggacgccgtcgcgctgctgctggccggtaatcgtctctctaatgatgaacttaacaccctcagcgatctgatcggcgagcaggatattgagccgctgcttcaggccgcgaacagcgacagcgataatgcgggatccgcgcgtaaagagctgatcgacatgctgatggaccgtcacggcaccagccgcgtgctgttccgcaacacccgtaacggcgtgaaaggcttcccgaaacgcgagctgcacaccatcaaactgccgctgccgacccagtaccagacggcgattaaagtctccggcattatgggcacccgtaaatcagcggaagatcgcgcgcgcgacatgctctacccggagcagatttatcaggaatttgaaggcgacactggcacctggtggaacttcgatccgcgcgtggagtggttgatgggttatctgaccgcgcaccgttcccggaaggtgctggtgatctgcgccaaggcagccaccgccctgcaacttgaacaagtgctgcgcgagcgcgaaggtattcgcgccgccgtgttccatgaaggcatgtctattatcgagcgcgaccgcgctgcggcgtggtttagtgaagaggacagcggcgcgcaggttctgctgtgctccgaaatcggttctgaaggccgtaacttccagttcgccagcaatctggtgatgttcgatctgccgtttaacccggatctgctggagcagcgtatcggccgtctggatcgtatcggtcaggcgcacgatattcagatccacgttccgtatctggagaaaaccgcccagtccgttctggttcgctggtaccacgaaggcctggatgcgtttgaacatacctgcccgaccggccgcaccatttacgatcaggtgcatagcgatctgatcggttaccttgcggcgccggaaaacaccgagggctttgatgagctgatcaaatcctgtcgagagaagcacgacgcgctgaaagctcagctggagcagggtcgcgatcgcctgctggagatccactccaacggcggtgaaaaagcgcagcagctggccgaaagtatcgaagaacaggacgatgacaccagcctgatcagcttctccatgaacctgttcgacatcgtcggcattaaccaggacgatcgcggcgagaacatgatcgtgctgaccccgtccgatcatatgctggtgccggatttcccgggcctgccggaagacggctgcaccatcacctttgagcgtgatgtggcgctgtcccgcgaagatgcacagttcatcacctgggagcacccgctgatccgcaacggtctggatctgatcctctccggcgataccggcagcagcaccatctccctgttgaagaacaaagccttgcctgtgggcacgctgctggtggagctgatctacgttgtggaagcgcaggcgccgaaacagcttcagcttaaccgcttcctgccgccaaccccggtgcgtctgctgctggataaaaacggtacgaacctggccggccaggtggagtttgaaagcttcaaccgtcagctgagcgcggtgaaccgccataccggcagtaagctggtgaatgcggtgcagcaggacgtgcatgccattctgcaactgggtgaagcccaggccgaaaaagcggccagagtgctgatcgatgcggcgcgtagcgaagccgatgagaagctttctgccgagctgtcgcgtctggaagcgttgaaagcagtgaaccctaacattcgtgacgatgagctggccgccattgagagcaaccgccagcaggtgctggaaagcctgaatcaggcgggatggcgtctcgacgccctgcgtcttatcgttgtgacgcatcagtaa

SEQ ID NO: 134156 - DNA, 2358 bp, Enterobacter cloacae
gtgacgcaggcgcaagaaggctttttactgaccagacactggcgggatacccctcagggtactgaggttgaattctggctggcaacggacaacggcccactaaacgttacgctcccgccgcaggagtccgtggcctttattcctgaagctcacgtcgagaaagtgaaacaactgctacgcggcgaaaacaactggcgccttacgccgcttcagctgaaagatttccaccgccagccggtttacggcctctactgccgcgcccatcgccagttgatgcgctatgaaaagctgcttcgtgaagcaggcgtgacgctttacgaggccgacattcgcccgcctgaacgctttctgatggagcggtttatcaccgcccccgtctgggtagatggcaccgcgcaaaacggcaggatcgttaacgcgcgcctgaagcctaatccgcactatcgcccgccgctaaagtgggtgtcgctggatattgaaaccacccgccacggcgaactgtactgcattggcctggaaggctgtgggcagcgggttgtctatatgctcgggccgccgaacggcgatgcgtccgcgctggattttaatctggagtacgtcaacagccgcccgcaactgctggagaagcttaaccagtggtttgccgagcacgatccggatgttctgatcggctggaacgtagtgcagtttgacctgcgcgtgctgcaaaaacatgccgagcgttaccgtatcccgctgattctggggcgcggcaacagcgagctggagtggcgtgagcacggttttaagaacggcgtattctttgcacaggccaatggtcgcctgattatcgacggcatcgaggcgctgaaatccgccttctggaacttctcttccttctcgctggaagcggtcgcccaggaactgctcggcgaaggtaaatccatcgacaatccctgggaccgaatggacgagatcgaccggcgctttaacgaggataaaccggcgctcgctacctataacctgaaagattgcgagctggtgacgcagatcttccacaaaaccgagatcatgccgttcctgctggaacgcgcaacggtgaacggtctcgcggtcgacaggcacggcggctcggtagcggccttcagccacctctatttcccgcggatgcaccgggcgggctatgtcgcccctaatctcggcgacgtgccgccgcaggccagccccggcggttacgtgatggattcacggcccggactgtatgactcggtgctggtgctggattataaaagcctgtacccgtcaattatccgcacgtttctgattgatccggtggggctggtggagggaatggcgcagccagacgatgcgcacagcaccgaaggttttcttggagcacgcttctcgcgggaaaaacactgcctgcccgaaattgtgggaaacatctggcacggccgcgacgaggcgaagcgccacggcaacaagccgctctcacaggcgctgaaaatcattatgaacgccttttacggcgtgctgggtaccagcgcctgccgcttctttgatccccgtctggcgtcttccatcaccatgcgcgggcacgacattatgcgccagaccaaagcgctgattgaatcccggggctatgacgttatttatggcgataccgactccacctttgtctggctgaaagcggcccattcagaagacgacgccgcgcgcatcggcaaagaactggtcgcctacgtgaacgactggtggcgcgaaaatttgcaaaaagagcggttaaccagcgcgttagagctggagtttgaaacccattttgcccgctttttaatgccgaccattcgcggaaccgaccagggcagcaagaagcgctacgccgggctgattcaggaaggtgacacgcagcggatggtctttaaagggctggagacggtgcgcaccgactggacgccactggcgcagcagttccagcagacgctctacctgcgggtgtttcgcaacgagccctatcaggactacgtgcgcgacaccatcgccagcctgatggcgggtgagctggatgaccagctggtgtatcgcaagcgcctgcgccgcccgctggccgaatatcaacgtaacgttcctccccacgtacgcgccgcgcggctggcggatgaagagaatgttcgccggggccgtgcgccgcagtatcagaaccggggtacgatcaaatacgtctggacaactaacggcccggaacccgttgattaccagcagtctccgctcgattacgatcactacctgacccgccagcttcagccggttgcggagggaattttaccgttcatcaatgacgactttgctacactagtgacaggacaacttgggctattttga

SEQ ID NO: 134157 - DNA, 417 bp, Enterobacter cloacae
gtgaaaaaacaactctttttattactgctcgcattgttattccctgctttcgtaagttacacatggtttattctgaccacaggccatcataattacacccaagataataccttctctttttggctatacactcctgcaactttaaaaaaattaccctttatttcgaataatagcgtttacagctatgattacaaccctgacaaccaacaaacaagagttatcattacctggactgatattaataatatcctcgaaaagaaacaagacctcattgcttttcttgaaatgcttgagggtttaaataagtatgactgctcatggttatataatgataaaaatgacttttctgacaactaccagcgatactgcattttccagaaagaaaaaacgttggaattagaattttttgaaacttga

SEQ ID NO: 134158 - DNA, 849 bp, Enterobacter cloacae
atgaccactagaaatgatattaccgatggtctttttgcaacaaccagtaaacatggactaatatacacaaaaaaattaggctggattgatctgggtcacgctcaggggaacgacgccagagctttgaaaactaaattagacaatgaaacattcgctgaatacttcgaagaatttgatgaatggtactatcccgtttcatatcaccaagaaatgggaaaaaacgtgaagattttagataggaaaatttctttacgaacaggcgtaagcacacaagttatggtaaaagcatgtttatcgccacaggtaaaagcacgagtagcactcacaattatgtacagtactgctaaaagattcgaagcatggcagaattcgattctcttcaactggtatacagatagtggatatagtgcggaggatctaatttcagatttagtaggattctaccgtgtatttggaaagggtcctgatcctttatggttagccgaaccagtttcttatgaaacagcgcttcaggtatgggattcgtatgctcccctcggacactacaaaaatacccaattttcacctttgttgttcccaacagaaccaccaatgaaatatggttatccgataaaaaaagaattcccttcatggctaagctatattaagccgcttactcaggaatatcatgatttttttataaacaacttcaaagaccaacctgttaaaaacttctttaaggaatctacacgtataaatcatgagttatatagctcattctcctctgtaagtgaatttaattactcagatgacccatttgagcgtccaatattcttcctgttaaacccgcatcagccttattcaggatag

SEQ ID NO: 134159 - DNA, 498 bp, Enterobacter cloacae
gtgataaagggtgatactggcgcacaaggcattgcgggaagaaacggtcgcgacggtgtagacggtcataacggtaaagatggtgtgacaaccaccgtgacacaacgacagctggatacggctatccaggcgaaggtcgctaaaaatagcctggctgttactgccgccacgcaggatctgcaagccaccaggcagacattacaggcaatgaatactaccaccagccagcaatttaaatctctgcgtgatgaagtggacaataataagaagcaggccaatgccggtatttcaggggcgatggcgatggcgggtttgccacaagtgcaaaccaatcagcgcgtcatgttctctgctggcggcgcgacttacaacggcgagagcgcgcttgctgtcggtgcgtccgttaactttaattcccatgtcatcgcgaaagtgagcttctcagatgataccgcgaataatatgggcgcttcggttgggattggaatgggcttttaa

SEQ ID NO: 134160 - DNA, 1104 bp, Enterobacter cloacae
atgccctccacgcagcaggagattttacgcctgagccgcgatgttgagtcgggtcgcacgatttatttacagctattgacgcgccagcaggagctgaatatttcccgctccagcgctgtcgggaacgtaaggatcattgatgaggctgttacgctgccggacccgataaagccgcgtaaagcgttaatcatcgttcttggcgcgctgttcgggctaatgctctcaatggggaccgtgctggtacgtcaggcgttcaaacgtgggatcacgctttccgaacagctggaagcgcaggggatgccggttctggctacgttgccacgttcacagtggctgtggagtaaaacgcagttgcgcagaaaaaatccgttttctcgtcgctggaaacacaaaacctcggatgtgcctttcctgcccgtcgatcgccctgctgatatgtttgttgaagcggtgcgcgggctgcggaccagtctgcatttcaccatgatggaggctgagaaccgcattgtgatgatttctggccccacgcaggactgcggaaaaacgctggtggcgacgaatctggcggccatcgccgggcagagcggtcagcgggtgctgtttattgatgcggatatgcgccagggctatgttcataatatttttggtctggagaaccgccacggattgtcctgcctgctcgaagggaaacgcgacttagcgaaggtcattcagcatgctgaaaaagggggaattgacgtcatcacctgcggcccggaacccctgcgcccgttagaattgctgttaagcgaacgattcctttccgtcatgtcctgggttaacgagcaatatgacattgtcatcattgatactccgccggtcctggccgtcaccgatgccgcgctggtcgccagagcagccggaacaacgctaatggttgcccgtttcgataaaaccagcgtgaaagagatggagaataccgttaaacggttacagcacgttggcgtgaaggtcagcggcacaatcctcaacgatattgttaaatccgcagcgctgtattacagctcggggtacagccagtatgaatacggttatgcttcgaggaaaaaaggggaaaggcgttag

SEQ ID NO: 134161 - DNA, 840 bp, Enterobacter cloacae
atgttgtatcacgttgttattgaaaagaaaccagcaaaaaccgggaaagccggcgttgaagaaaacaaaaccgatctcacgaaagaacagctaatagctcgcttcatagaaccttacgagcagggcaatccaattacagtaaacggtacgactattcaaacatcagaaattaacagattaactgttaaggctactgaatccagcattgaatccttaatacctgcaatagaggcagaagatcaaaactccagcgtgtttatgatcgggggaccatcttacttagaacgtgcaatatatcgagccactgatgtaacagatgagttcatcacgggtcccgcaggtagcaaaaaatcgacttcgtcccagaaaccgtctaaatcaatagctaattcgaactctaacaaggttttcatcgtccatgggcatgatgatgctgcgaagaccaagacagctcgatttgtagaacaattggattacaaagctatcattctgcatgaacaagcaagctcaggtagaacaataatcgagaaaatcgagcaatatactgatgttggatttgctgttgtcctctacacaccggatgatataggtaattccaaaggcaatgcagacaacctacagctacgtgctcgtcaaaatgttgttttcgaacatggctttttaataagtaagttaggaagagatcgtgtagtggctttggttgatggagcaatagagcttccaaacgatattagtggggtcgtctacataaagatggatgaggcaaacgcatggcactttcagttggctaaagaaatgaaacaagctggatttgacattgatatgaacaagctagtgtga

SEQ ID NO: 134162 - DNA, 960 bp, Enterobacter cloacae
atgaaaagcacaaaacgtacccctagtcttcaaaaatccctcaaactctaccccctaaatcaatctcctctattcaagcttaaaaacaagaaaaaactcctacaagtcattggcttatcaaagaaacaagcagataagttaatgcttgattcagctttcaaagaattcgaaaacgacgctgggaggaagattcaggaaccaattgcccaactcaaagcagttcacaggaagatcggctttttattgagcagaatcgaattacctccatatcttcactcgggtcggaagaagcattcaaccctgactaatgcagaatcacataagcaagcaactgaacttctgaagctcgacattcacaagtttttcccctcgactagggcagcgaaggtctataaggcatttgttgataaatttgagatgtcacctgatgtggcttatgtaatgaccaatctcgcaacctttgcaggaaaagtgcccacaggcagcccgataagcatggctatagcgttttgggccaataaggatatgtttgacgagcttagcaaccttgcagcctcaaacagcttggtatttacggcatatgttgacgatgtagcgttctctggttcgaaaatcccaaaaggatttgccgcccaagctaaaaaatgtattcgttctcatggtctcacctctaaagacaagaaagagcgattttattcgtcatcagagggaaagctacttacagggatagtgattcaggatggagaactcaaggtacgctgggcacacaatgattcaatcggaaaagaatttgctattttggctgaagcaaaagacaacgctgcaaaaataatccatctagaaaagctagcaggtaagctgcatgcagctggtcaagttgactccagacagaaagataaagctcgttttttcacacagcagcttaaaaccgcgaaaaagctatcagagcaaggtacttaa

SEQ ID NO: 134163 - DNA, 192 bp, Enterobacter cloacae
atgggtcgaaagacacgtaaaaaatgccaggctagtgttcagcaaacgttttgtgtgagtgatgagttaaagaaaaaccttaaaggcttaggcatgtttttcttgagctgtgttgccaacgaggctttcacagcgattattcactctgatactgttgccttcatcttagcttccatcaagggattcctgtaa

SEQ ID NO: 134164 - DNA, 405 bp, Enterobacter cloacae
atgcctgatgtcattgatttggttgaatcaagaagcattgtttattatttttggggctcctttattggcatgctattcattcctgctctttgttattttgcatttgtgtttgtatttgtgttttttacgaaaaaccttcaggctcccaagctcctggcgaaaggaataacccttgcttatcactatttcggtgtagtattcattattggcatgctactctcgtttatcgtcatattttatcccctgggaaccaactatgtcttatgtgaacgtccagggcccttttcgggaacgtattacaccaaaacggaagagatttgcacgcaggtgaaatacctgcttaaaacaagagccagagatatccaaaaattgaatgatcagctggacggtgtatcgtcacagtga

SEQ ID NO: 134165 - DNA, 507 bp, Enterobacter cloacae
atgagcgttaacattaatcttaataaaattaaaagaaggtgctttttatttttctgtatcttcttttttggtatttttgcttggggtttttattgggctagcgtaccagatataaccgatatcattgaatccagaagcattatttattttttttggggttcttttattatgttgtttgttttcccggttgcttgttgtttcgttttggttattgtctatatgacttttacgaaaaacatggagccacccagcttcttcgccaaaggcattatcgtcggttttcacgttatcggtgcaggatttgttattggcaacattctctcgtttatcgtcatattttatcccctgggaaccaactatgtcttatgtgaacgtcctgggcccttttcgggaacgtattacaccagaacggaagagatttgcacgcaggtaaaatacttgcttaaaacaagagccagagatatcaaaaaactgaatgaccagctggacggcgtatcgacgcagtga

SEQ ID NO: 134166 - DNA, 879 bp, Enterobacter cloacae
atggaaggttataatgactggataggggatcatcgtgaagatattctcagaggaaataactggcagcgtaatttgcgtttcgaaaatgaaatcaagcagctgaaaaatagcctgggcaacaatgccaaccacattatgctgctcacgcctgacgaggcgcagggtgtgattgacgatttgttaggtagtcagcctgttggcttttctactacctatgccggtaacatcaaagagacggtttctgcgactaagaatctgtcgaagctattttcttatcagcaggccggaaagattgttttcactttaaaaggtcttgggatcaaagcaacgcagtatgcttatcagggaaaaatgtatgtgaagattacgggctacccttctctgcgacgcattcttaacggaacccgttaccggattaatcatcccaaagtgcttgaggttggcattggtagcgtcgggtttcaaaacggcattatgtcaggagcccgattctgcatctggttttccgcatgctggcggttggttgagttgatcttcaaatctgaccatgacgtcgccgcattcctggggaatgtgacgatggatgtggcgaaagttattgtgggggtttttgtttcgagattggttggggaagggatctcgttggctatatcaccatttatagcgagtgtagctgttccggtttgggggcaaatagtctgtgtggttgtaataggtatagctattgccaatgcgctcaatgggctggacaaacagtatgatttatcaaacaaacttatagattgtataaaaaagggtatgaaagagcagcaaaaaatcgcagagtggaacgctcgaaactcagtaaatggtagttcattttactgggagaattactga

SEQ ID NO: 134167 - DNA, 480 bp, Enterobacter cloacae
atggcgaatacaatgtggttgacgttgaagggacaatcgcagggaatgatttctgctggatgtgcttcgatagattcaatagggaataaatcacagcctgcccatcgagatcagattatggtcatggcaattaatcatggaatgagtcgggcgcaaaatgtaaatcatcagtgtttgacgtttattaaacctgtggataaatcctcgccgttgttggggaaagccattactgacaatgaaacgctaagctgtgaatttagcttttatcgcaccagtcagactggtttaaacgaatgctattactcactaaaactgattaatgccagaatatccagcttccatctacaggtgccgcataccattgatgacagtgcgggtcagccagaagaaatgatcgaattgtcatacgaatctattgcctgggagcatcgtattgctggaaccagcgcctacagtatctgggatgagcgaattttttaa

SEQ ID NO: 134168 - DNA, 1314 bp, Enterobacter cloacae
atgaatatcactttagattttcaaacagttgctgaatttttccatgaaactctaattagagcttttaatttaagaactgaagattttagtgtaactgaaaatggggtacatcaatatacaattaacgagcactcattatctttttccatttctgacattcaaaatatcgccaatcatctttcaagtttttcttctgcaggtggaactgatatttataattccaatgagtatgaggtcgtagttagaaatgtttcacgcatcccttttttaaacatgcgtggtggagttttagaagaaaaagtagatcaagttaataaacttaaatattttatagggcctctatccccaaaacatctcatcgctctacttcaaaatataagtacgattggggaaccaatttctttattaaaaagaatctcaagatatccattaagccatagagcctataaattaagagacgaaatctctagtttttctaatgcgattgatttgataatgaagctttttagcatgttttcatcattacatattgaatcacaaaacaacaaaataattaatgaattcgaaaaatttgcagattcatttttatttgaaataagctacaatcttgatatttcaatcatgccacaaagacatattgaggaacttgtaagggttggacggattatacgagagagaagatctacatatgaagaaatagatgtaccaagaagacattatattaaagatttggtacaccattatcaaatgggggtatctgcagaggatccatttttagaattcatatctttttatcacgttgcagagcatttttttcaaagcgtttatgaagatgaagtcataaatcagataaaagacaaaattactcatcctaatttctcatataaaagaaaaaatgatattaaaactctgataggaagtgttaagaaactaactcgcacaaaagaggatgggattggtgtctctgaaatagatgctttggaatacactataagaaaatttgttaatttagatgatttaaagaataaaatacaatcatatgataatgaaacttttttatactatataaatagtgaagtaccattttcttccggccctcaaattaactttacagatgaagatgaaaataagacacttaaatcaatcgtaaaaagaatatattatactagaaatgctatcgttcatagcaaagatggagaaaaagggaaatatttacctttttcacacgaaaagcaattagttaaagaaatccctttaattcggtttatttccgaatcaattataataaaaaactcaaaggttgtagatagctaa

SEQ ID NO: 134169 - DNA, 267 bp, Enterobacter cloacae
atgcaaactgatttttcttctccgtcttctgctccaactactcccctgatatcggtaactgatgccactccggagcgttttttacgtctgcccgaagtgatgcatttatgtggtctgtcccgctccacgctttatgacctcattaagaaaaatgcctttccgcagcagataacactcggcggtaaaaatgttgcctggctgcaatccgaagtcaccgcatggatggccgaccgtattgcccaacgcaagcggagatatgacgcatga

SEQ ID NO: 134170 - DNA, 951 bp, Enterobacter cloacae
atggcaaaaataataagcatgatcaactggaaaggtggtgttggtaaatcgaccctatctttacatattggcgttggattaatgctaggttcagatgaaagaccaaaagtgctacttattgatttggatcctcaatcaaatttatcatatttagctcttggagtgaaaaaatacgtacaccatgtatacaccaaaaaaaaacccacattaaaaaatatatttgatgattattttgacggtaaaacattcaatacccgtgcagctataataaaacaaccaatagccgctggccctggagaaatttggcttaatgttgatttactaccctcccatcatgaattagtactcgttgacatgatgttagcaagggaaaagaaaagtgcatcatctcaccaaagggaaacagagcttgaacttgataagatggcaattattaaaaaagcaatagatcaagttgcagatgaatatgattatattatccttgactgcccgccaaatataaaccttgttacacagaatgcattctttgcgagcgaattatacctaatacctgcaattccagattttctttctactgtcggtatttctcttattaaatcagaaatggataagctaaataaaaatttcagaggaatgattcaatattcaaattcaaatattgaatttaatgacactgaaatgcttgggatcattttcaacatggtaaatgaatatggtgagaagcccaaagcgactcacgaggaaacaatagaagatgtaagaaaacaacatccgaatatggtattcgaaaattatattacagatggtgatggaatatctgtcgcttctgaaaataacttaactgttttcagttacggatctttacctcgctctaaacctaatgcagaaaagcaaagccattatctgactaaagtcgttagcgaactctatgaaaaattggagaatatataa

SEQ ID NO: 134171 - DNA, 438 bp, Enterobacter cloacae
atgaagactcatgagttaatttccttagctgaatatatatctaagataatggctcactatccaaacaaaagtgtagagtatgctctggatgatatattaaatttgctagaaacacgcaacagcgaaacatcgctcaccaataaaaaagaaccaaaaacgcaaacacaaataaatagtagattatctaaatctataaaagacagcatttcactacaatatgtctttggaggaaactcgaaaccagacgatgaaactagtgaatcattaagtaatttatctctcgccgagctaaaagaaatagcaactaaaatgggcattaggacatcatcaaggcaaaataaaggtgtgttagttatgaatatatccaaaacaatggaacggagaaagatagattcaacaattaaagataaagataaagataaagataaagataattaa

SEQ ID NO: 134172 - DNA, 1686 bp, Enterobacter cloacae
atgagcattattcacgtaaatcaaattggaagcaaaattaatgcgttattcgctgataaaattgatagcagtgatctcaatcctatagataaagaaatacaaactaaaatattaacccgttgtctttctgcatacgccgtttattgtattggagatacatcgatagatgaagctgcgtcagcagttgttgatggtgccgatgataatggtattgatgcaattcattattctccttcaagtaaaagaatgatcattgttcaatctaaatggaaaaaagatggaacaggagagcctgataacggtgacttaagaaagtttaaagatggtgtattggatctcattaatcttgaacttgataaatttaacaataaagtgaatcttaaaaagcagatgattgaaactgctttaggtgaatttgatacgaagttcgatcttgttttaattcatactggttcaaatactctaagtaaacataaccagcaagtaatggactcaatacttaatgagttaaacgatgctggtgatggtactagtgaggatgttgttaatttccaccatctaaatcaggcgataatacatagtgggcttgcatctggtatggatggtgaaccaatcgatcttgagattggtctctcgcaatggggaaaaattgaagaaccacatcaaggtttcttcgggattgtagctggcgaagaagttgcaaattggtgggtgaaaaaagggaaaagactatttgccaaaaatattagacaaatgttaggtgccactgaagtaaatgatgaagttaagagaacaattgaagaacaacctgagaatttttggtattacaataacggtgtaacaattgttgccgaatccataaagaaatcaatggttggtggaaatagtagagatattggttcgtttaaagcgaataatattagtattgttaatggtgcacaaactgtaagcgtaattggtaaatatgcgcaggatggcggggcgaaccttaataaattacgtttacctatccggttaatttcactagaaggagcgcctgaggactttggtgctagtgtgacaaaaaccaacaaccgtcaaaataggatcgagagtagagactttgtctccttagatgacgaacaaatacggttgaaaaaagaattgtcacttgaaggtattgagtataatatagtcaggagtgagaacgttaaaacttctaccgccataattgatttatctgaggcgactattgcattggcttgcgcatctacgcaagttggtctggcagttcaggcaaaaagagaaattggtcgtttttatgacaatcttaagaaagcgccatataaaaccattttcaacccacaaactaatggtatttacttgcggaatactgttttcgccttgcgaaaaatagatgaaattattggttcaatgattgcaaatctacctaaaaaatcgggtaaggaatatggagttcttgttcatggcaatagaatgttagcatttctagtttttagaacactggcaatccataaaattgcaaataactttgattttgatattaatacaattgactggcagaaaagcacagcatgtatgcttgagaaattaatgttagaaattgaagagaactacaaagataaattccttgctactttatttaaaaacgcaagtatctgtaaggctatatctgagaaaatttaa

SEQ ID NO: 134173 - DNA, 774 bp, Enterobacter cloacae
atgctcagaacattcagttatgagttctatatgctgatcctggtcacccggggacggtgcgtgcagttcattgacttcagttccacctgttgtacagaaggtgacctggtcattctgcagcccggacaggcccaccgtttcggtactgataaggactgggatggatggatgatactctttcgcccggagtttgttatggaggcaccagatacggggcatcagatacagaagtctgtgcccccctctggtttgccggaaaaaatgaccctgagcgaaagtgattttcaaagactgaatacgctgattatgcagatgcgcgcggatgctgccatgactgctggccgggaagatatacaggatctgctgcgttaccagatccttttacttcttaaattcgtcagcattcattatgcccgggccttaccagaaaagggctgctcagatgcgacccggaggcgattcagacagttcagtgccatggtggagaagcagtatgcccgctggcatcagttagcggactacagtaaagcgctcggatgttcagaaaaaagcctttcccgcgccacccttgaggctgccggtatgccggcaaaagcgtttatagctgcccggatcgttcttgaagcaaaacgaatgctggcgcataccggtttacccgtagggaccattgcacagacgctcggatttgaagaaaccacacatttctcaaagttctttaaacgcgttgcagaccttacccttggcgagttccgcctgaagcagacagagagctga

SEQ ID NO: 134174 - DNA, 432 bp, Enterobacter cloacae
atgaaacccactgatgaaaacatcaccaaaattttgaccgacctggagatctcgctgaatgaacgctggagtaagggtgatagcagcggctattttgataactatcatgaaagcatcacttacttcgaccccgtggcagaacatcagctgatagggaaagaggctgtgctggcgcacctgacaaagctctacaaaaatcctcatatcgtccggaacgaatacaatcatccatatgtgattgccagtgatgacggcgggcttgcggttctgggctataacctcaacaccttcgtactggatgaggccgggaatgaaaaacaactccgtgcctggaatgcgacagaagtgtataagctgatcgagggtgaatggcgtatcgtgcattcgaactggggtctggcaaaatcgcttaacattgccaccgcttcctga

SEQ ID NO: 134175 - DNA, 909 bp, Enterobacter cloacae
atggatataaatcagttgcgttgctttgctgtgttaggtgatgagcttcactttggccgggcagcccgtaaacttgaaatgatgcctgcgtcactcagtcgttttatcaaacagctggaagacgatctggggataaggcttctgaaccggtcgacccggaatgtgtcgctgacgcctgaaggtgcggaatttctgaatgaggcgaaatccgtgattgctgaattcgatgcgctacggctgcggtttcgtaaaacgacgctgtcgcaaaacaggacattacggatcggtgccattgacagcgcggccagagggttactgccggaattactgaatcttttcgtcagacattatcctgatgcggatatccatatttccgaagataaaacgcacagccttattccccggcttatctccggatggctggatgtggtctttgtgcgtccccctgagcatgttgacgccacgctgacaacgcgttctgtcgcgaatgaaagctgcgtgctcgcggttcctgccagccaccggctggtcggttatgatgaagtcagtatcagcgatttctgtcatgagcccgttatcatcccggaaaggcgcacaagacctcacagtcatgacctgacgatgcatgccttcagggcggccggcaaatctccggtcattgcgcagtacgctgaggaaaaacagaccatcctgagcctggtcgcagcaggactgggtattgctttggtgccttcctcctataaaaacatgaatgcagacggcgtgaaatacatcgcgctttcgccgtcggaaagtattaagggacttcctttgagcgtcatgtggcatcagggaaacaagaatatgtatgttaccgctttgctggagatactttccggtaatattgaagcgctgacccgggacctttga

SEQ ID NO: 134176 - DNA, 1311 bp, Enterobacter cloacae
atgaataacgacctcgaaaaaaaggtgatgcgcaaggttaccctgcgcattattccttttatcatgctgctgtatttcatcgcttttctcgatcgggtaaacattggctttgcggccctgaccatgaacgaggacctgggcttttcgcccaccgttttcgggctgggcgccggcattttcttcctcggctactttttgtttgaagtcccgtcaaacttaatcctgcataaagtcggggcccgcatctggatcgcccgtgtgatgatcacctggggcctggtctccggctgcatggcgtttgtgcagggtacaacaagcttctacattctgcgttttctgctcggcgtggcggaagccggtttcttcccgggcattattctttatctcagctactggttcccggcagccagacgcgcgcaggtcacagccatctttatggccgcagccccgctctcgacagcactgggttcgcctatttcggccgccctgcttgagatgcatggtttccttggctatgcgggctggcagtggatgttcgttctggaggccctgccggctgtgatactgggtattgtggtcctgttcttcctgaccgatcggccggccaaagccagatggctgactgacgaagagcgcgcgtggctggaaaacaccatgcaggccgaggaactggcccgggcggcaaaacagagccacagcagcgcatggaaaggccttgcggataggcgggtactggcgctcgcgctggtttattttggtacgtctgccggactgtacacgcttggcatctggtctccgcaaatcatccgcagcttcggtgccacctcactggagattggcttcctcaacgccttcccggcggtcatcggcgtcatcgccatgatcctgtgggcgcggcattctgaccgcaccagagagcgcagctggcatgtgattgctgcctgcctgctggcggcagccggtctgatttacgccggtaacgtcagcacactgtttaccgtgatcgtcgccttaaccctggtcaccgcaggcatcagcgcctcgaagccgcccctctggagtatgcctaccgtgttcctcagcggcccggccgcggccgcgggtatcgccacgattaactccatcggcaatctcggtggctttgtcggcccgatgatgattggcgtgatccgccagcagaccggtagctacacctggggcctgtactttgtcgccggactgctgactatttcggccctcattgtcctgatcctttctgccagggcgggtaaaccgcaaacggcagaactccctcatcctcatactcattaa

SEQ ID NO: 134177 - DNA, 1089 bp, Enterobacter cloacae
atgcgtaactataaaattgccgccatacctgccgacggtatcggtccggaagtcatctcggcaggtgttgaagtgctgcatgcgctgacgcgccgcgatccacagcttaattttgaagtacagacctttgactggggatcggactactacaaaaaacatggcgtgatgatgccggaagacgggctgaatacgctgaaaacgtttgatgccatttactttggtgcagtgggcgcaccggatgtgcctgaccatattactctctggggcctgcgcctgccaatctgccagggctttgaccagtacgccaacgtgcgtccaaccaaaatcctgccgggtgtgacttctccgctgcgcaaccgcgggccaggcgatcttgactgggtcattgtgcgtgaaaactctgagggagaatactccggcaacggcgggcgtgcacaccgtggcttaccggaagaagtcggcaccgaggtggccattttcacccgcgtcggcgtcacgcgcattatgcgctatgccttcaggctggcacagtcccgaccacgcaaactgctgaccgtggtgaccaaatccaatgcccagcgtcacgggatggttatgtgggatgagattgccgccgaagtggcgcaggaattcccggatgtgcagtgggacaagatgctggtcgatgccatgacacaccgcatgacgctgcatccgcagacgctggataccatcgttgccaccaacctgcatgccgatatcctctccgatctggccggcgcgctggcgggcagtctgggggtggctccgaccgccaatatcgatccggaacgtcgcttcccgtccatgttcgaacctatccatggttcagctttcgatatcaccggcaaagggattgctaacccgatagcaaccttctggacggcggtacagatgctggaacatctgggtgagcgtgacgccgcggcgctgattatggaaagtatcgaatatgtctgtgagaaaggcattctgacgccagatgtgggtggaacagcccgtaccgcggacgtgacccgcgctgtagtggaatttatcgaagccagagctaatatcgccgagaccgtataa

SEQ ID NO: 134178 - DNA, 1260 bp, Enterobacter cloacae
atgaacaatgaacaggcagcagggatcctgcaggatatctttcagcatgccgtcgacagcgcccgggccgggcctgcgatcctgtctaacctgccggaaaagccacgtggccgctgcgtggtgatcggcgccggtaaagcctcggcagcgatggccgcggctgtggatgcagcctggccggatgtggaggtctccggcgtggtggtgacgcgttacggttacgcggtgcctgccggccgcatccggattatcgaggcggcgcatccggtatcggattcgatgagcgaagttgccgccatgctgatagtggaagcgctgcgcggattgacccctgatgacctggtgctggcgctgatttcagggggcgggtcggcgctgatggcgctgcccgcaccaggattaacgctgaaagacaagcaggccattacccgggcgctgctgcacagcggtgccagcatcagagagatgaatctggtacgtcgtcatctctctgcggtgaaaggcggcaagctggcaggcatggcgaaaccggcgcgtattgtgtcactgattatcagcgatgtgccgggggataaaccggcagatgtggcatcaggccctactgtggccgatgacagcacgccgcctgatgcgcttcaggtactccagcgttacggtattccagtcccggaacaagttcataaactgctcagccagccgggaagcccggctgaacgcgccgcgaacagtgatgtcaggctcattgccacgccgcagctggcgttgcaggctgccgcgcaggctgtacgcagacacgggctgacgccgcttattctgggcgatgcaatcgaaggcgaaagccgtgaagtggcgattgtgatggccgggattgcgaaatccgtgaggcagtatggtcatccggtttccggtccggccgtactgctgtcggggggggaaaccaccgtgactgtcaacaacgatcagcccgggaagggcggccggaatacggagtttttgctcagtctggcctgtgcattacagggggacagcggtatctgggccatcgccggcgacagtgatggtatcgacgggacggaagatgcggcaggggcgctggtctttccggacacgctggcacgcggcaaaatgagtggcctgaatgcggctgattatcttgatgtccatgacagttacagttattttcacgcgctcggtgacctggtgattactggtcccaccttaacgaacgtaaacgacatccgggcaatactcatatcctga

SEQ ID NO: 134179 - DNA, 333 bp, Enterobacter cloacae
atgaaaaaagcaggaattgtgtgtttatcactggtcgtggctgtactcacaggatgttcctccccaaaatctaccccggaagaaccagaaatgacagctgcacgccagtgctctgatcaggtgctcaccgcttcaaaaaataaagcgggtacaacgaagttaacgtcaatcatgaaagatgaagctacgattgttcgggttggtgattcttctcaggaaacccatcttatcaagggattcccttacgttgagtccacgtctcttgataacggtaagccgggttcaacatggcgcaactgcatgcaggcgaaagggtttactgttggtggttga

SEQ ID NO: 134180 - DNA, 378 bp, Enterobacter cloacae
atggtcagtttcgcaagccgttatcgtatgcctacctcgatccgtaaagaccgtccgctgactaatgatgaattacagcgcatcgttcccagcgcgttctcatcggataaacacgattcacgctctgaacgttatacgtatatcccgaccattaacattcttgatcgcttacgtgatgaaggttttcagccatattatgccactcagtcacgtacacgcgaccaggataaacgcgactttacaaagcatatgctacgcctgcgccgtcatgaccagattaacggaaaagaagtaccggaaattattctgctgaatagccatgatggttcaagcagctataaaatgatcccctggtatgttccgtcaggtttgcagtaa

SEQ ID NO: 134181 - DNA, 465 bp, Enterobacter cloacae
atgacagccgggctggatatggcactcggcatggtggagaaagatctcggcgcagacattgcccgtactgtggcacatcgtctggtaatgaaccagcgccgttccggcggtcagacgcagcattcagaaattcttgccctggcaccccgctcagaccgtctgcaaactgcgctggaatatgcccgtaataatctgcacaaaacactgacggtggaactgctggcagatgcggtacatatcagtgcccgccaacttagccgcctttttcgtcaggagacgggtaaatctccggcaaaagccattgaaggactccgacttgaggctgccagattaatgattgaacaaagccgcctatcactggatgccattgcccgcgagtccggttttcgcgacagacgacatatgcgggaggtgtttattcgcgggtatggcattccacctcagtcgcttcgcgcagggcgttaa

SEQ ID NO: 134182 - DNA, 1077 bp, Enterobacter cloacae
atgattgaagtcggaagaatcattgcagatcgctataagattttatcttacgttggtaaaggtgggatgcaagacgtatataaagttttagatttaaagctggatttagatttagcgttaaagactccacttcctggcttggaaagcaaaagatttcttaaaagtgccaaaatcgctgcaaagataaaccatcacaatatagccaaaacctttgactatgtcgaagataatggcaatatatttttagcggaggaatttgttgaaggtgaaaatcttgaggaaaaattgcgtcactttgattttctagacccacattatggcgcttgtatactacataaccttgctaaaggaataatggcatctcataaagcaggtgttattcatagagatttaaaacctagtaatgtaatggtgtctggtggtgtacaaatttcgaatctaaaaatcacagattttggaatagctacgctaacacaagaactttttgatgaagctgctgccagtggtgacctaacaagatcgacttctggtacgataaaaggtgctttacccttcatgtctcctgaattaatgtttggtaaaaagggtaaacctatagaagcatcaactgatatttggtcattaggtgcaatgatgtttaaactattaacaggagactatccatttggcgtttatctggatgctgctgttaatgttaaaacaaaaaatagaatggaatggccaaccttcatgactgccaatccacaatatcaaagtttatcacaagatctacaaaaaattgtagataagtgcttaagttatgacccggacaaaaggcctacagctgaaacgcttgttaaggcatgtgaaaccctttgttatttatccgaagaacgtcatgttggtcgcgtcaataatattattcaaggagggataagtggatttattgatgggacaccttctaactccttttttagtatggaaagtgtatacggttcgaggaccccaaacacctcaacaagaaatactgtttgttattccacttttgatggacatccatggcctagagcacaccctgtaattctgtggaaagattga

SEQ ID NO: 134183 - DNA, 1059 bp, Enterobacter cloacae
atgaagattaatcacgtcctaccagaaagatattcattaaagagcactggattcggtggtggcatgggggacattttaatatgtaaagataatcatttagatagagatgtaattgtaaagttgttaaaggatggagaagaagagagacgtttactagatgaacagaaagcgctactaaaacttcgttctaaacatgtagtacaactttatgatttaattgatataacagtctccggaaaaactaaaaaaggaatagttctggagtatattaacggagtagatttaaattacaacccgtcagaaagtcaccccgaaaaactaaagaaattatggcagatagcatgcgggttaagtgacatccactctgctaaagtaattcacagagatataaagcccaataatattagagtagatgagaataaaattgttaaaatattggattttggtttagcaaggtcctcaggaacagaagcattcactcattctgtcattggaaccttaggatatatggctcctgaactatggaagagaaaaaacattagtttcgatcaaaaaattgatgtttatgcatatggtgtcctcgttttagatttatttggcatagaaaaaccagatgaattatacgaacatcccccggccgcgataaccaatatacctgaactaggaaagatacttccaaaggatttagccagaactttcattagttgcttatgccatgacaaagatgctcgaccggcaatgtctttggttagagatcaaatagctaaatacctattaaaagatagacaccgtgccctcttcgtcttgaatggaaagaaatatgaagttaacgcaaaaaataaaagcgtcacgatcacttggggtacgggtgggagtatgcaaataatatatgatggtttcgattttaaagtgggtagtttttcaggaagtgcgacaattaataatcaacaagtgatgacaaacaaagtatttcctagctgcagcgtgattactcttataaatggaaaatctagaagctttgtcacctttgatatatctagaccggaggtaatatcatga

SEQ ID NO: 134184 - DNA, 1164 bp, Enterobacter cloacae
atgtttacagaacgacttgctcgctggttagctcgttcttcggccaaaagcggcattaaccggccagaagacctcaacgctgtccttagcacggatataggactggttagagctgagaatcaggatctaatcgccgcgattagagttaacactccgtcaaacgttggcagtcctttttttgcaatggcgttattagatggcatgggtggaatgaaagatggaaagcaatgtgcaacaattgctttatcaactttattctattctttgattaagtttagaagtgatcctcccgagtctcggttattaaaagctactttagaagcaaactccgttgtatacggctatgcaaaaggacatggcggttcaacattatccgctgtaattattgaaaatgggtctgcccctgtaattgccaacgttggcgacagtcgaatatatagcttttctctggaatgtggacttacagctattagcagtgatgactctctagaagcattgggtggcagagggcgtggattactccagtttataggaatgggggaatctataaaacctcatatcaataccttagataaaaaccataaaaatataatattgacatccgatggaacccacttcatttctcattcagcattcgaagagttattaagtcattcatctgatttttctacatcagcgcagagaattgctcaatatgttcaatggtgcggtgcgaaagataacgcttcatttggaatgattaattgcagtgatattgaaaacaacctcaactcccatagagatattggtgtagagttatgggaccctcatgggaatctacatatcatgtggatgaaaaattatcctgccgcgcagaattacttctctcaaaatatagtggacaatcaagataaagaaccttcgtctattatagacaatgatagctttgaaaataaacaaacactaaacaatgcttcgacaaaaaatctagatttagattctgaaacaccacaaagagagctattcttaaacgaaaccccagaaaaacctcaagatccccctattacaaccaaagccatcaaacaaagaaaaagcaaagaaagaaagaaagctattgaaaagaacaaaaaagaccaatccgtaatgataaatatcaaggatgaggaaaacaaaaatgaagattaa

SEQ ID NO: 134185 - DNA, 1743 bp, Enterobacter cloacae
atgctcaacgaacgtcagtttgctttactcgatgcgctggagtcgcagcctgcggcactcagcggcctggcccagcataccggcgtttctgcccgcaccatcctgcgtgatatcgactacatcaatttcaccctcagcggcacggcgcggatcagggcgacgggcagtgccctgtaccagcttgagattgccgacagaaaacagtatttccggctgttacagcgccatgataatgatgaccggctgctggcgctgctgctgatccgcccggtgatgtcccgcgcgcagctggcggatgcgctaaaccttcccgatccctggattgccgagcgtctgccgcgcctgcggcagcgctatgcgcgcgcattcccgctcgccagccgtcccggcgccgggtacttcattgatgtcgacccggataagcgcctgatcctgctggctaacctgttcaaaaaggatccgctggcgtttccgctggcggggatcgccccggcaaccttatccatgctgcacgcgcactgtcagagcctgacggcgtggccggatattcaggcagattatcgggccagcatggttctggccggatacgccctgcgccagcagcttccggtttacgccgacgtcgccgaatctgacgcgcttcgcgactgctgcgagcggacggggatctggctcagtccgacggtgattaacgtcatcgccagcacgctcaatcggctacagcaacacgccaacggtatcacatcagagtatgtcgccggccagctggcgaggctgtccgccgcagggcagccgcaggtgatcgacgctcagctgaaagatgacctgaccggccacctgaaacgttgcgtggcgatgccaaactggctgccggaaagccgacccggctccatgaataaccttaaggccgcgtggcctgccgcgtttgatatgagcgtaaaattcatcaaccagttgcgcatggagatcgacatcccgcttatcgacagcgatctgccgggactctatttcgcctgtgcactggagcgacaccacagcgcatggacgcccatctttctgcttgccgatcaaaacgccattgcgaccatcaataaaatggccattgagcgagaggtgatgaactgccgggtcgttgtcgccttcacgcccgatgaacttgtggccctgacagacgaaaaccatccggcgctgattgtgaataacagccactttctgctggatgaaggcctacgtaacgtactggttatacgcaacatcattaccgcggcgggtatcgatcagattaaggatttcctggcctcggcgtttattcgccagcaacctgaacgctttttcccgccagagggatctttttactacgcgaaccgcacctgcgagagctgggatgaggtcatcgccgccattaccgcgcgtctctgtgaaaggcagttaattaccgaagatgaagcgctacgcattagtcagcgcgaacgggagggcgagaatctgatcgtcaaccacgtggcgatcccccactgctggagcgaggccgcggggccatttcgcggatattttattatgctggaacgcacgcttcacgtgaacagcgaactcgtgaagcacgcccttatcgcctgtgccagcgtggaaaatcggcaggagcagaaagtatttagttttctggccggcatgttaagcagtcattcgccgcagcagatcgacagtgtggacagttacgagacatttattgcgttattgcgctga

SEQ ID NO: 134186 - DNA, 1062 bp, Enterobacter cloacae
atgaacattgatttactgaaatccctttgcgatgccagcgcggtcagcggcgacgaacaggaagcgcgggatattttgatcgacacccttgaaggccatgcggatgagatcacctttgacggcctgggcagcgttatcgcccgcaagggcatgcgcgggccgaaggtggcgattgtcgggcatatggatgaagtgggctttatggtcacccacatcaccggggcgggatttatccgcttcgacaccattggcggctggtggaaccagtcgatgctcaaccatcgcgtaacaatccgcacccgcagcggcgcaaaaataccgggggtgattggctcagtcgcgccccatgcgctgagcgagaagcaaaagcagcagccgatgacatttgatgagatgtttatcgatataggcgcgaacagccgcgaagaggtggaaaaatacgggattgcaatgggggatttcgtctgcccggaagcgaactttgcccgctggggcgaggacaaaattgtcgccaaagcgctggataaccgcgtgggctgcgccttaatggccgagctgctgctgacggtgaacaacccgaatatcaccctgtacggcgtgggcagcgtcgaggaagaggtgggcttacgcggggcgcaaacctccgccgagtgcattaagcctgacgtggtgattgtgctggataccgccgtcgcaggcgacgtaccgggcatcgacgccattagatatccgctaaacctgggcgacggccccggcgtgatgctgttcgacaaacgctattttgccagtcaaaagctggtggccctgctcaggcaaagcgcagaaaaacaaggcgcgccgttacagttcagcaccatgaaaaccggcgcaaccgacggcggacggtataacgtgatgggcggcgggcggcccgtggtggcgctttgtctgccgacacggtatttgcacgccaacaacggtatgatctcccaaaaggattatggcgcggcgctgaacatagtgcatgaactgctgatgtcgcttgatgaaacgcaggtcgccgcgctaacggattttcgctaa

SEQ ID NO: 134187 - DNA, 243 bp, Enterobacter cloacae
atgctgaccgcaaataccctgagcggagggatcgcgggcatgctcactatctcgtttggtattcaacgcctggcacccggtcttggcgtgttcgatccgctgattggcctgatgtcaccagctggctcgttttatctggtgctggccatcggcctggcgctgaacattgcgttgattatcgttctgaaaagcgggtggctgaagcgcaaagctgcccgtatggagaaggcaaatgaacattga

SEQ ID NO: 134188 - DNA, 1209 bp, Enterobacter cloacae
atgggaacgtcgttacggttagtggccatcaccaactgcccggcgggtatcgcgcacacctatatggtcgccgaagcgctggagcgaaaggcccgcgagctggggcatagcattcaggttgaaacgcagggcgccagcggagtggaaaaccatctgagcaacgaggctatccgcgccgcagactacgtgattctggcgaccgggcgcggactaagcgccggcgatcgcgcgcgctttgccggtaaacaggtttatcagctccccatatcccaggcgctgaaaaacatagaggccatatttgataacttacacacgcagtcgcagcttttcgccgccgatagcagcgtgaagctgggaaaagaggatgtgcagcagggcagcgtaatgagtcatctgatggcgggcgtttctgccgcgctgccgttcgttatcggcggggggattctggtagcgctcgccaatatgctggtgcagttcggtttgccttatagcgatatgtcgaaaggcgcaccatcgtttacctgggttgtcgaatcgatcggttacctgggcttcacctttatgatcccgattatgggggcgtacatcgcctcgtcgattgccgacaaacccgcttttgctccggcgttcctggtctgctatctggcgaacgataaagggctgctgggcacgcagtccggcgcgggatttcttggcgcggtggtgctgggacttgcaataggttacttcgtgctgtggtttcgcaagctgaagcttgggaaagcgttgcagccgctgctgggctcgatgctgatcccgttcgtgacgctgctggtgtttggcgtattgacctggtacgttgtcgggccgctaatgtccgatctgatgggtgccctgctgcatttcctcaacaccataccaccgtcgatgaagctcggcgcggccttcctggtgggcgcgatgctggcgttcgatatgggcggtccggtcaataaaactgcgtggttcttctgcttctcgctgctggaaaaacatatctacgactggtacgccatcgtcggggtggtggcgctgatgccacccgttgccgcaggtatcgccacttatttggcgccgaagctgtttaccgaacacgaaaaagcggccgccagcagcgccattgtggtgggcgcgaccgtcgccaccgaaccggccatcccttatgcgctggcggccccctacccatgctga

SEQ ID NO: 134189 - DNA, 447 bp, Enterobacter cloacae
atggcgcacctgacgaccgcttgtatcgatctcaacattcagggcaacagcccctattccatcctgaaacagctggcggagatggcctggcaaaacggctttgtgaccgaccgcgccgcatttttacaaacgctacttttacgcgaaaaactgcactccaccggcttcggcaacggggtcgccgtgccgcacggtaaaagtcacgtggtcacacaaccgtttgtgttgttcgcccgtcaagcctgcggcgtggactggcaggccagcgacggcgaagcagcaacctgctggatctgccttggcgtgccgcagcagggagaagaggcgcaggtgaagctgattggcaccctgtgccggaagattattcaccccgaatttatctcacaactcaaacagggcggtcaggagcagatcctcacgctgctcaaccagacgctgagcgaataa

SEQ ID NO: 134190 - DNA, 1539 bp, Enterobacter cloacae
atgccaataaacgataataccccacgcccgcaggagttcgccgcggtcgatcttggctcaaacagtttccatatggtcatcgcccgcgaggtggatggcgcgatgcagatcatcggtcgtctgaagcagcgtgtgcatctggccgatggtctcgacgcgcgtaacatgctgagcgaagaggccatggagcgcgggctgaactgtctgtcgctgttcgcagaacgtctgcaaggcttttcgccgtccagcgtctgcatcgtcgggacgcatacgctacgccaggcgctgaacgcgcctgaatttcttaagcgcgcggaaaaggttatcccctacccgattgagatcatctccggtaacgaagaagcgcgcctgatttttatgggcgtggagcatacgcagccggaaaaaggccgcaagctggtgattgatatcggcggtggttccacggaactggtgattggcgaagacttcgagccgcgtctggtggaaagccgccgtatgggctgcgtcagcttcgcgcagatgtatttcccgggcggcgtcatcacccgcgaaaacttccagcgcgcgcgcatggccgccgtacaaaaactggaaaatctggcctggcaataccgtattcagggctggaacgtggcgctgggcgcatcgggttcgattaaagcggcccatgaagtgctgctggcaatgggtgaaaaagacggctttattacgcctgagcgcctggtgaaactcaccgaagaggtgcttaagcataagagcttcgacgccctgagtctgccgggtctgtccgacgaacgtaaagccgtgttcgtaccggggctggcgatcctctgcggcgtgtttgacgcgctggcgatcaaagagctgcgcctctctgacggcgccctgcgtgaaggcgtgctgtatgagatggaaggccgtttccgtcatcaggatattcgcagccgcaccgcgcagagcctggccaaccagtacaacattgaccgcgaacaggcgaaacgggtgctcgaaaccacggttcagatgtacgagcagtgggaggagcagaatccgaagctggcgcatccgcagctggccgcgctgttgaaatgggccgccatgttgcacgaggtggggctgaacattaaccacagcggaatgcatcgccattcagcctatattctgcaaaacagcgatctgcctggtttcaaccaggagcagcaaaccatgatggcgacgctggtgcgctatcaccgcaaagccatcaagctcgacgatctgccgcgctttacgttatttaagaaaaagcagttcctgccgctcattcagctgttgcgcctgggcgtgttgctcaataatcagcgacaggcaaccaccacgccgccgacgctgaagctaaaaacggatgactatcactggacgctgagcttcccgcacgactggtttagccagaacgcgctagtgctgctggatctggaaaaagagcagcagtactgggaagcggtcaccggctggctgttgaagattgaagaagagagttctgaggcggcagcgtaa

SEQ ID NO: 134191 - DNA, 2241 bp, Enterobacter cloacae
atgaatattcaccacatcctgaagcaaaataaagaccgctggtgggcacttcctcttattttacccgtcgtgttactcccggtgcttagtgtggctaataccgtaacgcagttgggcgacggtatcgttgcgctctattatctcccgctctcctttttgctgacgctgatgttattctttggcctggaagccctccccggggtggtggtgtcgctgtttttacgttattacccctccgttgggttatttgaaaccgtggctggcattctgcattttatcgttcctctggtgctcagctggggcggttatcgcgtgtttgcgccccggcgcaatatgaccgcctacggtgacatacgcctgatgggacagcgtattttctggcaggtgttttgcccggcaacgctatttctgctgctgtttcagtttgcggtctatctcggcgtctatgagagccgccagagcctcgcaggactgaatcccctcaatattcggacccttattaactatcaggggctgctggtgagcgggctgacgggcgtgccgctaagctacctgctgatccgcctgatacgtcatccgcgctatatcaagggactgatgtcccagctccgcgcgcaaatagacaaaaaggtgacggcctttgagtttgtggtgtggtttttagccctgggcgggttgctggtcatgctgctgctgcccatgaatgcaaacagttccattttcagtaccaactacaccttgtccctgctgatgcccgtgatgctctggggggcgatgcgctttggctacaagctgatgtcactcatctggacgccggtcctgctggtgtcgattcactttttttatcactacattccggtgcaagaggggtatggcattcagctggcgatcacctcatccagctatctggtcttttccttcgttgtgacgtacatgtcgatgctggcgacacgtcagcgggccatcaatattcgctcccgcagtcaggcttttctcgatccggtggtgcatatgcccaacctgcgggcgctgtcgcgcgagctggccagtcatccgtggtcagcgctctgtttactgcgcgtgcccgagctggaggtgctgggacgcaattacggcgttatgctgcggatccagtataaacagcagctggcgcaatggataaacggcacccttcagcccaatgagcgagtctatcacctcaccgggtatgacatggcggtgcgtctggaggcggagtcgcatcaacagcgcattgaaacgctggacgagcatatcaagcagtttgtttttatctgggatggtatgccggtacagcctcaggtcggcgtgagctattgctatgtacgctcacccgtcaatcatctctatctggtgctgggggaactgggtatcgtggccgatctctccctttctaccaaccacccggaaaatcttcagcagcgcggggctgttcatttgcagcgtagcctgaaagataaggtcgcgatgatgagtcgtttgcaggccgcgctggagcatgacgcttttaccctgctggttcagcccgttcgcgggctgcgcggtgattgttatcacgaggtgctgctgcgaatgcgtgatgataacggggcgctgatctttcccgagcagttcctgcccattgcacaggagtttggtttatcgtcgcgtgttgatttatgggtactggagcgtacgttgagttttctggcacagcaccgccagcgtttaccgggccagcgctttgcgatcaacctcgcaccttctaccgcctacagggcgcagttcccgcttgaagtgagccgcctgttagccaaatacgccgttgaagcgtggcagctgatctttgaagtgaccgaaagcagcgcctttggtcatgcggatctggcggcgtcgaccctcaggaaattacaaaaaatgggcatccggatcgccattgatgattttggcacgggctacgccagctatgcgcggttaaaaagcgtggacgcagacattctcaaaatcgatggcggttttattcgcaatattgtcagcaacagcctggattaccagattgtggcttccatttgccatctggcccggatgaagaaaatgctggtggtggcggaatatgtggaaacggaagagatacgtagcgcggtgcacgcgctaggtatcgattatgtgcagggctatttgattgggttgccgactgagcttgatacgttgctcaacacgcagccttctcaggagagcgcctga

SEQ ID NO: 134192 - DNA, 747 bp, Enterobacter cloacae
atgaaagcattgtctgtattaacagcgatggtgctggcggtttccaccagcgcgctggcagagacgaaagccagcgtagtgctggtgcacggggcgtttgccgacggcagcagctggaataaggtgattacccggctgcaaaaacaccataccgaggtcattgcggtacaacttccgctcacgtctctgaaagatgatgtcgccgccacgcagcgtgctatcgcccgggctcatggggatgtggtgctggtcggtcactcctggggcgggacggtaatcagcgaggcgggaaacaatgcccgcgtgaagtcactggtttacgttgccgcttttgcgccggattccggccagtcgacggcagctctggcaaatagcttccctgctccgccagggagcgccagcctcgctaaaaccacagaggggtatttatatctgccgataaaagcggtcagcgagaatttcgcccctgacgtgaaggacgttgagcgcagcgtgattgccgcgacgcagagccccattaaggccgatgcgtttggggagaaaatcgcgcatgccgcctggcatgacaaaccgagctggtatgtggtcagcaaaaatgaccggatgatcaatcctgagctagagcgcgcaatggcgaagaaaatcaacgccaacaccacggaggtagcggcaagccatgtatcgatggtcagccagccagacgtcattacccgtacgattgaacaggcgttatcgggtcaacagtga

SEQ ID NO: 134193 - DNA, 1986 bp, Enterobacter cloacae
atgagcaaccttatttatttaacgcttgagggcaatattcagggaaagatttctgctggctgtggttctcaggcttcagtcggcaaccgctatcagctgggacatgaagatgaaatctttgttttcagcctgatgcaggaagcgggcggtaccggtggccggcttcatcatcgcggactacaattctgtaagctcctggataaaagctctccgttaatcagtaacgctattaataataatgaacgtcttaagcttacctttgatatttaccgcactaatcgatacggtcaaatggagaagtattatcttatcgaattacgtggtgcatcaatacggtccattcagctgcattcaaaaatgaatgatatggactatgaatatatctcggtggattatgattatattctgagtcgccatcttattgccggtaccgaatttgattatctgctgacgcctgaaaattacagccgtctttttccgatgttgcagaagactatcctccccgaagagcagcctgaacggagagtgacgttggtgctggggatattctttgatggcaccggtaataacgcggtaaacacccggaacatgcttgaggcccttacggcgcagcactttgatattaacagcccggatgcggcaaccattctcgccagaaatgcatcggagaagatgggaattagtgggatcggggcggggagctatctagggtattacacgaatattcatcgtctgaatgagttgtatgaacgtaacttcccgccagacggtaattatattcaaggtggtgtttatgttgagggcattggtacccgggcgggcgaacctgataatccgatagggcttggattaggtacagcagagactggtattgtagccaaaactgacgatgcggtagcgcagctggcgacagccatagatgcagcacttggtttactgaaagggaagtttgttgtcgataccctgctgtttgatatcttcggcttcagccgtggcgctgcggcggctcgccacttcgccaaccgtgtccaggcggaagaccagtccattatcagcgccatttcaacgggcatggttaaaattagcttccgcggtgctccggcaggcagaaaccgttttctcggcattatggacaccgtagcggccgtcggcacggtaatgaatggtctcaatccgcacagcgccaataccggcaatgtcaacactcgcctgcgtcccggcgtggcggaaaaagtatttcacatcaccgcccaacacgaatgccgctataacttcgccctcaacagcattgctcccgcctggccggaactcatacttcccggcgcccattctgatatcggcggcggctatctgccccagttgcgggaagacctcttccttacccgtccgctggtggaaaccctgcctcacaaccagcccggcacacagtcgcacgtttaccggcagacgatggcgcagctaggcgtgctggagcattcacccgccatcatgcccgtcattcgaaccaatgccatcaccccggacgtctgggaagatgatttcgccccgcctgaccgctacagccagccgcagaagcgcgcgtttgccgctctgacgctacgccaccggacggtcctttttgactggtcaaaggtggcgctgcgggtcatggtcgatgcggcagtggaggcaggagcgctatttgctgacgtagacaatatcaaaacacacgccttacctgatgagctaaagccgttgtctgaccgcgcccgagaaatggggaaagcggcccgtcagcacagaagcgtaaccggctttacacctgatgaggtggacataattgcccggaaatatatccactgctcagcccactggaacgccgtggagcttaaacagtccggtgaattacagggtggcgcctcagcctccgaaaccatcggctttgtcaaccggccggatgaaaactggatcagaacgatttacgacatggatggaaacaaacgatga

SEQ ID NO: 134194 - DNA, 684 bp, Enterobacter cloacae
atgaaaaaacgcaacgtgctggcgcttgccctgctgcttacagctgcaggctgcagcccacaaaaatctcaccctttacagtcaaaacaagccgccagcggtgactggacgctgccttatgatgaatggacttttaccttcatcacgccaagaaaattaccatctatggtaaatcacgccagagtcatcgacacggatggttatctgtatacgttcaataccctcgatccgacttcatgggaccctgcctctgttgataaatggcctgaaaatgcgcacggtttttacgcgaacttcaataaagttaaaaaacccccgcagtacattgtcttctgctgggaatcctatattgaccagcaaacctacgaaaccagcgccgtcttcggcccggacacctggctgcgaatgaaaacaccggcagatcatatcagtcccacgggcagaactgtctggtacaacagaatggtatttggcctctcccccggaggaaaagtcaaaatctggttttcagatgtcgccggacgccccagcctgcccgtcaaaccgctgaaactgacgacccgctccggcaaggaccttaccctgtgcaaaggctacgtcgttcccggcggtacgtttaacgtcatccagtcaacgcaggatttcatcaaaggcaaaacttacccttacgggaactgggattaa

SEQ ID NO: 134195 - DNA, 483 bp, Enterobacter cloacae
gtgcctacagttaagcaatgtaaattaaattgttgggcagtcatcatcacccagcgcgcggttgatgaagaacgtcactctaccaagcacctccccccttccagagcagcaccttcgatcgcttcgccatcatctgtcatgagtgacagccccatcagattggcaaactgtgtgtggcagtcgcacagaatcaacaacacatcacctggcgtcttcttcattacaggttcgattaccgcaaagcctgtatcagtttcgaagctcgctctgcaactcttactatcgccccatcaccggccagtcgccgcccgttttgcatacgacaggcggcagtttactttactcgttctattgagaataatgcgtgtattactcagctttttttatcttctttttctgcctcgtaaattgctcttatacttcaatttccactcattgttccgtagacagccaatagagcagtcaagtaatcctattttgtaa

SEQ ID NO: 134196 - DNA, 795 bp, Enterobacter cloacae
atgtcattcaattttgagaaactggatacagaattggctgaggcggttcatttcgagactgtattcaatcatttatcgaaggcgaacggtaggtccatccaggatactgcaatcgttttaaaccgcgccatgagttcttttcgtcataaacacccgtataacggaatggagtttaagttatacaactacaacccatcgaaaggttttcatcaagatgagaattccgctactcgacatgcctatatcctaaacgagatcgctaaaggcaatgtattcgtagaagattcaaaccaagaaggggcatatcacctcatcgatgaatttggccgtgagtatacttcgtattatgctttttattttaagctgtctgagctccttcggtttcttattcataataaagtatctataccccaggaatttgaacatgctttgcctcaagctgaaaagacctatgcattatataaaaaactgattgataaagacgtggaacgctttgttcaggatgttgaaaaattcgaaagtgaaacgactcaatcttccgagtcggaagaaataaaatggggtaattttgccggcaaagagacagcacttaaattaattgcaggtatggcaatagctctcgagaaaacccaagggaagtatgtgaggggaggaaagctgaacaaatcagaggtctccaggacggccagaagactgataggagagtacggaaatggtattgaggtgaccgacaaggctctgatcatgttgatagatgaggctttgagtctacacgcttctaagatttctgcttag

SEQ ID NO: 134197 - DNA, 573 bp, Enterobacter cloacae
atgactaacaaaaatgccctagccgggcagggtttcgctcaacctgaaaacagcagcgatgatatttcggtcattaaatttgaggccgcgaaagtccgtattgttaagatcaacggtgaaccgtggttcgttgcaaaagatgtttgcgcggcgctggaactatccaattcacgcatggcgttgcaggctctggatgatgacgagagaaataccgtaactttaacttacggtattcgcgggaacccaaatcatagcgctgtctctgaatctggtttctacaagctgatcgcccgcagccgtaaagctattacgccgggcacattcgcccatcgtttcagtaattgggtatttcgcgaggttatcccttctatccgcaagactggctcttatggtgtgccgttcgcgttcctgaacgactttagccggcgcatggcggcttatcagcaggaggccagcaaacgcgggtataagttgcagcagtgtaagggggcaaaagaagctcttgaacaagaggagattcagctgtggcgtaagtatcaacccgagttactgaaggaaaatagcgatgattaa

SEQ ID NO: 134198 - DNA, 960 bp, Enterobacter cloacae
atgactgaaaataaaaaatggaaagaaaagttaatatcctcaagctttccattagaatatgtggtctcaaaaaaattagcagattatggaatagccgtatcaaatgattacgcatactctcgtgaagacgcaggcatattgaaagacttttctatagacatgcatggtaattattgggatgaagaatgcacatatcatttaaatttccttatcgaatgcaaacagaggcacgataaaaacaaatggctttttatgagagatcctaacgctcctgattttagtgcgttaactctgggttacactttgcgggcaatagataattttacaagaatagatctgcctccaaatgcaacaattgccttagatgaaaatatgaactatgccgtgaagggtgttgaaatagacactagcaatggaaatgtttacgatagtgaaattaaacacggcatatctcaactagcttattctttaccggatgtaataattcataacattgctgaatgcataaactcccaccctgaggataacctgccatttttcattgcacccattctggtaaccacatccgatctttatttaacacatgatgaattctcagcagagagtattagaaacgcagaagatttaagcgatatagcagatcttgtgccgtatctagtgatagaaaatcagcatacccctggattcggaatgcaccgaaagcaacgtttttcgtcatttgaatactttctagaatccaaacaacttgaaatcataaatgacattaggaaaaaacatgaaaaacatccattcctattgccacaagaaagattgcttgatttaattcatcagccacatcaacatttcagcgaatacttctcgcagattattgtctgttcccttaataacttagaaccattgatagaacaaattatagaaatcgcagataacgcattattgaattccaaaaagctttcttga

SEQ ID NO: 134199 - DNA, 906 bp, Enterobacter cloacae
atgtcatcacttgatttcgcatcacacaactcatttgagcgggctgtatctcctttcagagaaatggctgcttacgaggccttgtggacggaacaaggcgccactttcaaaactattgcagacaaatttcgtcatgcagaaggatgcattttaccatctgaactagtaccagaaagcaccatcgaacactttaagtccaagcttatcagtatctttgacaaatttaacgttgaggatatcggggtacgtgtgcatggtgcgggggaatatcctcagaagcttcgtgatgcacgtcatcctattgaagttctctactatcaggggtggtgggatttagttaacacaccttctgtagccgttgttggctcacgaaaggtctctgacgagggtgttcgaagaactagaaagttagttagatgtttggttaatgatggttttactattgtctctggcctcgctgagggggtggatacttgcgctcacaagaccgcgttagaatttggcggaaaaacaattgctgttataggtactcctctttcacataattaccctaagcaaaatagtgaacttcaaaagaagattagagaagagtttttattaatcagccaagtcccattccaacgctatttggatcaggatttccgcagtaatcgtattttcttccctgaacgaaatgtaactatgtcggctttgacagaggcaacaattattgtagaagcctcagacacatcaggtacattgattcaagcgagagccgcgttagcacagggtcgaaaattatttattttagattcttgttttcacaattcttctatctcatggccagctaaatatgaagcgcagggggctataagagttagagattacgatgatatacggaagcatctgaggtgtgtatgcgtttaa

SEQ ID NO: 134200 - DNA, 639 bp, Enterobacter cloacae
atgcgtttaacaaaaattgatgagttaactcgcggccagcactatcatcttagtgaagatgatacatgttatttctttggcgaatacaccgcgaggaagggatacgctttcagtaataccaataatcttatccataattttaagaagggtgtcgagaagaaaggtaaggcagagtgggtttacaaagagtctgctattattaatgtcgcaaatctcataaactcaatatcgaatattgacgaacttacatttgttcccgttccgccttcaaaatgttgttcagatcctgcgtacgacagtaggcttatcgatgttctaaaacagtgtcaaaaaaccaaacctaatctgcaatatattgaattaatcaaacaaagagtttcagtacaggcatcgcattcagttgaagcgcgtccaaccccagaagaaatagctggtaattatattttcgatgaaactttagcagttaatctaagaaaatatatagttattttcgatgatgcgcttacagctggtagccatttcaaagcaatgaaaacaacgatcaagctccatcttcctcaaagtattgttattggtgtctttatcgcaaggactgcgagggaagcagaatgggaggatgatcttgctgatgatttttag

SEQ ID NO: 134201 - DNA, 1398 bp, Enterobacter cloacae
atgccgcctgctgcatttgagcatatgtggagtacattaaaatctggccgctcatggatggggctagtaaaaaatcgctgtaaaaatggcgaccactattgggtaagtgcttatgtaacgccaatagctaagaatggttcgattgttgaataccagtctgtaaggaccaagcctgaacctgagcaggttttggctgcggaaaaattatatgctcaattgagaagcgggaaggccgcgaggccgaaattggctgctagcttttccgtgaaaatactcttgctcatatggggtagtattatatcaagcgcaatggctgccggcatgcttactgatacatcaataagcagcttattgttagccactttaatgtcaggaagcttaagctctgttagtgttttggctattctctctcctcttggaagactggttgaaagagccaggaatatttccaataacccattaagtcaatccctctacactgggcgcaccgatgagtttggccaaatagagtttgctttacgaatgatgcaagctgaaacaggcgccatagtaggtcgcataggtgatgcatcaaatcggcttagcgaacacacccgaggcctactaaaggatattgagtcaagcaatgtacttacagttgagcagcaggcagagacagatcaaatagcaacggcagtaaaccaaatggtggcaagcattcaagaggttgcgagcaatgcacagcatgctgcagatgcggccggaagagcagacactgagacggcatctggccagcgtctggtagcccacacaagccagtcaatcactgcccttgaaggtgaaattaggcaagccactcaggttattcatgagcttgaaggtcaaagtaacgagatatcaaaagttcttgacgttatacgagggatcgccgagcaaacgaatttgttggcactcaacgcagcaattgaggccgcgcgtgctggtgagcaggggcgtggttttgctgttgtcgccgatgaggttcgcagtcttgctgctcgcacacagcaatcgacaacggatattcaaagcatgatcagcgctctacaagagcgagcgcaatccgctgttacagtcatggagcaaagtagtcggcaagcgcacacgagtgtagctcacgcagaggaagcagctacagctcttgatggaattggccaacgcgttaacgaaattaccgacatgaacgcgcaaatagcgactgcggtcgagcagcagggagcagtaagtgaagacataaaccgcagtattatcaatatacgcgatgctgctgataccaatgtacagaccgggcagaataatttgcaaagtgcgaaatctgtcgctcagttaactagcgctctgagcgaactggcaaaacagttttgggaaaaacgaggataa

SEQ ID NO: 134202 - DNA, 654 bp, Enterobacter cloacae
atgattcagtcacgtaataaatatctgcagtttatgctggttctgctggcagcctgggccattgcctggggggccctgtttgtcatggggcagaccgttctgctctatgggctggggaaaaatacgctgttcttcattcatggtgctgttctggtgtacctgctgtgtgtgttcctggtttaccgccgctgggttgcaccgctaccggttgttggccagctgcgtaacgttggcgcaccgtggctggtcggtgcgatggccgtggtgtatgtcggagaatttctgctgggtaaagtgctggacctgcccgcagagccgtttatgacgaaactttttgccgataaatccatacccgacgtgatcctgacgttgctggccatctttatccttgccccgctgaatgaggaaacgctgttccgggggatcatgctgaacgtcttccgttcacggtaccgctggacgatgtggctgggggcgctgataacgtcattgctgttcgtcgccgcgcacagccagtatcagaacctgctgaccctggcagaactgttcctggtgggggtgattacatcagctgcccggatcagaagcggcggcctgctgctgccggtattgctgcatatggaagcaaccgcgctgggtttactgtttggctga

SEQ ID NO: 134203 - DNA, 318 bp, Enterobacter cloacae; identical to SEQ ID NO: 83577

SEQ ID NO: 134204 - DNA, 861 bp, Enterobacter cloacae
atgtcatctaaaaacactcttccatcggtcgatctgatgtcctgccagcatggcggtgaaatgatcccgtccattgctattgagcgcatcatctcgttgcgggatgaaggtatccgcgtctatctcgacggcatagacaagctgcgaaaagcgcgcgatctgatgcagcaggccggaggctgtcagtacctgtatgactacgacaaagccgtagagagcgccatcaaatggagcgacactacgccagaccaggccgaaacggctatttcccgcgttatcgacggaaaaatctgggatcggctgatgacggaaaccggtatgtatacgctgatgagcaacaaacaacgtcaggaatgggatcggcaggtggcaggcaaagaaatgccgccgataacgctggagaacgttatgagtacgttccggcacctgaacgcaagcaaggctgataccttcacgcaagggctgattgatatctttaaatccctgtcgtgggattataaaaccaataacccctgcatgtttggcaagcgtatcatcatcgcgccgttgctcgatgtctggcgcagtggctgggtgcgcttcagctcagacgggcacaccaaaattgacgatctggcgcggccgttctacgtgctggacgggcgtaacgtgcctgattaccgcgtttctgacggtgccaaactggatgcctttttcagtgaaaaccagttcaacggtaaggtgttcgagtgtgattacttcagcgtgcgatattacaaaaagggcagcgcgcacattacgtttaaacgcccggatctggttgagaagatcaataatctggttgccagtcactatcccggaatgttaccccctcgcgtgtaa

SEQ ID NO: 134205 - DNA, 1284 bp, Enterobacter cloacae
atgaatactgataactattttttcagagtcccggccacacgcggaatacagggcggcatagaacaatacatgctgacggttcctatggtcgtgttacgtcgtattcttgcaatggacaatgatggcgatgttatggatcgcagccagcgagaagcgaacaaaacgcgggccaaaaaaatacggaattatgttgccggcgcaacatcaaaacgagctccctatattttgccgtcaattaccggaaatattgatagtcatgttgaattccttcccagcgaactctcgccggcagtggggattcttaaaattccgatggacgctgatttaaaattattcgatggccagcaccgtgcgctgggtatttttgaatttgtacgcgattattccaatacggaagatacgatcagcttgttgcttaccgttggcctgccacttgagttacgccagcagtttttcgctgatattaataacaacgcgagcaaaccggcagcggcgatcagtatggcatataacaacaatgatccggtcaaccagctggcaatgcatctggcccgaaccgtcaccgggctggcgggcacagtggattttgaacacaacgtggtcccggcgaaaagctcacggctgatcagctttaaagcactgaacgatgcgacgaaaaaaatgctcaacctgcgggccaacagcattccctcgacgcaacagcgtgatatggcagaaaagctctggactgcctgggcacaggcgatgcgctggaatgatattgcccaggatgatatcgctgcggagtaccgtcaggaggcgctgggactgcatggcatcatgataaatgcgatcggtatggcaacggccaggatgttacggcacagaacacctgaaagcatcgagaaccttctggcctgtgcggaaaacggtgacaacggttttcattatcgggagtcgtttgtacctgagtgctgggaagggaagtgtgttgatccggagactggcaccattaaaactgaccggcgggcgcttgaagcaacagctgaagcgttgcaaaagctgatagacccgttcgcagatgcgctgtggttgcgtgcttatctgccagctgaagaggcgagtgatacggcattactgaaatatgctgctgacatcgagagttataagcagcgcacagctgtgccgatgatcaatatcgtggagaagctgaaggcgctgggtgacggcgaaccgcagttcagagcatcggtgctggcttcccgtgaggggctaagccgctatctggccggggctgaaggctga

SEQ ID NO: 134206 - DNA, 462 bp, Enterobacter cloacae
atgatgaagaaaccacttattgccggcatcatgctggttgtggcgcacaccgccggcgctgcgcagggtgatgataccaatctgcagcagatttataccgaggcgggcattcaggggatatgcagcgccgggatgctggctgtgccggaaggggccagggatgaagttgtcccgcagaacgtcagacacctcctggttcagtgtgcctatttcgacgagcagcagttgcgccggcgtgccggcctgccggctcagacatttagccactggcgtgaccgcaatgcggtccttaatctgtcgtctgaccaggtatctgatgcgctctggctgtcagcgtggcgtgatttccgggcacaactggcctcggcctacccggccccggcggaaaaaaaggcacaggggaaagaggccgtacccgccggcacgaagcccggcactgagcatgggagtgcggcggattga

SEQ ID NO: 134207 - DNA, 720 bp, Enterobacter cloacae; identical to SEQ ID NO: 112761

SEQ ID NO: 134208 - DNA, 273 bp, Enterobacter cloacae
atgaacactatctggaaatatgtacttgaaccacaaatcaccctggatatgcccgccggcgcgacgatcctcagtgtgggcacgcagggcgatgatatctgtctctgggcgcgggttgacactgacgcgccgactgagccgcggcgcttcctggtggccggcacgggaatgccgctggctgagtccttcactggcgccaggtttatcgggaccgtgcagatggtgcaggccagcgtaaacctggttatgcacgtttttgaaacggaggtgtag

SEQ ID NO: 134209 - DNA, 306 bp, Enterobacter cloacae; identical to SEQ ID NO: 112760

SEQ ID NO: 134210 - DNA, 639 bp, Enterobacter cloacae
atgttatacatggctttatgcagttttatgatgatcctggcgctaagtgagatgttccgcacgatgacggcgatcggcaatggcagtttcgccggcaaccgcttcataccgctcgccttagttctgttaacgctggcgctggcatcacctttctttgccacattttatacgctgagccggcctgtttcgatggatgcactctccaggctgtccgttggtgcgcagtgggcaggtatcgccgccgccattctgctgtgcatcttgtatggctatcgtgcctggaaaaacggccgtttctggtataccggtgcggccattgcctcagtggtgattgccgttatttttgccaacagcctgcttttcgtgtccaggcccgatgccggcatcgtggccacttttgtgctgaacaacgatgacagtaatgacgtgcagtgcgaccgttcggtactgctggttcattacaacaagggaacccctacggagtggcgctgcccgaccggtatcatgttcatgtctgatgcgtcaaaaccctttcttccctggccggattatcacggcgggcggagtcagcatctgacgacagcactggatcagatcacagacagcgccatgcgccttgacctaagccagaaaccataa

SEQ ID NO: 134211 - DNA, 321 bp, Enterobacter cloacae; identical to SEQ ID NO: 83621

SEQ ID NO: 134212 - DNA, 849 bp, Enterobacter cloacae
atgaagaatgatgagctggccacacgacgcgcagaggcgatagccggcgatcggtgcttcacgaaagggcgcctgcgcgatgaattcagaatgaagccggctcccggtgctgagccggtgaaatggtacaaaagcgcctatggcggcaagtacgccgtataccgcattgcagactgtgttccgatgcgggaaaaacggccgccgaccgagaagcagcagcaggccggcctgcgtctttccgtcctgtcccggcttaacagcaccagtggccggatggcacggcgggcacacgactggctgagtctggcgccgctctttctggataccgaaacaacggggctgggtaataccgcagaagcgctggaaatcggcctgaccgatgcggccggccgggtgatatttgaaacccgcctgaagccgacggtcgccatcgaggcgcaggccgccgccgtgcatggtatcgatgagccggcactcagcggcgcaccatcctggccagatgtggcgctgcagctgcgccacgccatcggggcccggccagtgattatctttaacgccccctttgatacccgcattctgaaacagacggccgccgcacatggcgatccggccgactggctgggagaactgacagtgtattgcgcgatggagctggctgcagggtattttggggccaccaatcgctatggcaccatttcgctggccagcgcggccagtcaggcagcattgacctgggaaggggaggcacactcggcgatcgccgatgcacggatgacggccggggtggtgaacgccattgccgcataccatctggcattgctgcaggagcaggaacggctgcaggcctga

SEQ ID NO: 134213 - DNA, 438 bp, Enterobacter cloacae
ttgcgccaggaaaaccgcctggcgaaggtggtaacggtctttatccgcagcagtgcttatgacgccggcggtgtgccctacagtaaccaggctacggaagtgcttcccgtgccaagccaggatacccgcgacatcatcgccgcggcgcagctggggctgtcgcgtatctggcgtgagggcgtgcggtatgcaaaagccggcgtgatgctcagcgatctgcagggatatgaaacccagctggatctgttttcgccggctgcagtgcggccgggcagcgaaaaactgatggccaccatcgacaaaataaacagggaaggaaggtcaaggatcttcttcgccggagaaggtattgatccggaatatgccatgcgccgtgaaatgttgtccccggcctacaccacgcagtggaaggatattcccgcggcgtttatgcgataa

SEQ ID NO: 134214 - DNA, 1797 bp, Enterobacter cloacae; identical to SEQ ID NO: 120698

SEQ ID NO: 134215 - DNA, 348 bp, Enterobacter cloacae; identical to SEQ ID NO: 6026

SEQ ID NO: 134216 - DNA, 780 bp, Enterobacter cloacae; identical to SEQ ID NO: 16904

SEQ ID NO: 134217 - DNA, 399 bp, Enterobacter cloacae; identical to SEQ ID NO: 71312

SEQ ID NO: 134218 - DNA, 465 bp, Enterobacter cloacae; identical to SEQ ID NO: 49359

SEQ ID NO: 134219 - DNA, 1047 bp, Enterobacter cloacae
atgttgatgcagcatatcggtgtcggctattttgggtattaccgagcaactgcttatgcgatgaaacactctcttatgcccgagattgcgaagttaagaatgaaggctctgaacttctgggataagcacgggatccgtgccgcagctgatgcttttgacgtatcaacgcgaacactctactggtggcgccggttactgcgcaccggtggtccagaagcactaattccaagaagcaaagcccctctggttcgccgttcaaggcactggcatcctgatgtactcaaggagatcaggcgtctgagaactgagttacccaatctcggcaaagagcagatttttgtcaggctgaaaccatggtgtgaagcgcggcattttacctgtcccagcacgtcaaccattggaagaatcattgctggtgctcacgataaaatgcggatgatccccgtacgcctcagcgccaggggcaaagcccggttgataaaaaaacgctcagtgaagcccagaagaccaaaacaataccgcccggtaaaaacaggcgaactcatagggatggacgcgattgaactcaggatgggggacctacgccgctatatcattaccatgatcgacgagcacagcgactatgcgctggccctggcggtcccttcactcaacagcgatattaccagccatttcttcagcaaggccacaaagctctttcctgtcgctatcagacaagttgtcactgacaacggtaaggagttcctcggtaactttgataaaacgctacaggaagcctcgattaaacacatctggacctatccgtacacaccgaaaatgaatgcgacctgtgagcgatttaaccggacacttagagaacaatttattgaattcaatgaattgttgctttttgaggacctgaatttgtttaatcaaagaatggctgaatatctggtgctgtataacagcaaaaggccacataaatcactcgaactgatgacgccagtggactatattttacgtgagagtaaaaattgcaatatgtggtggacccatacacccagttga

SEQ ID NO: 134220 - DNA, 687 bp, Enterobacter cloacae
atgatcgcattcaatcacgttgttccggtacttaatctgtcggtgttcaacgtcagacgggcaccggccttcgcgtttgagcagagcaagcgcgcgaccataggcgggcgctttatccgtgttgatgaatcgcgggatctgccacttcttcacgttgttgaggattttacccagaaaccggtatgcagctttgctgttacgacgggaggagagataaaaatcgacagtgcggccccggctgtcgacggcccggtacagatacgcccagcggccattgaccttcacgtaggtttcatccatgtgccacgggcaaagatcggaagggttacgccagtaccagcgcagccgtttttccatttcaggcgcataacgctgaacccagcggtaaatcgtggagtgatcgacattcactccgcgttcagccagcatctcctgcagctcacggtaactgatgccgtatttgcagtaccagcgtacggcccacagaatgatgtcacgctgaaaatgccggcctttgaatgggttcatgtgcagctccatcagcaaaaggggatgataagtttatcaccaccgactatttgcaacagtgcctcgcaacccgcctgccgcaaccacgcaaggcagtcgggtgtttccacaccctcggctaccacctccattgtcgttttcagaagacggctgcactga

SEQ ID NO: 134221 - DNA, 1125 bp, Enterobacter cloacae
atgacgaaaaaagttttgattgtatttggaacgcgacctgaagcaataaaaatggctcctctggttactgaaatcaaaaataacccacagctcaatctaaaggtgtgcgtaactgcacaacatagagaaatgttagatcaggtactggacttatttgaaattactccagactacgatctgaatttaatgaaagcagggcaaactcttaatgatatcacctcagctattctcctcaatctaaaacctattcttcaggagttccagcctgacattgttctcgtgcatggcgatacagcaaccacttttgcagtaagtttagccgcatattatgagaaagtcgctattggccatgttgaagccggtctacgtacagggaacatatactccccgtggccagaagaagcaaatcgaaaactaacttctgtattaactaattatcattttgcaccgacagagtcttctaaagcgaatctaatcaatgagggctataatgaagataaaataattgttaccggaaatacagtgatcgatgcattgcatatagcaaaagataagattgataataatactgctatggccagtgagctagaagcgagtttccctttcttgtctgttaataaaaaaatgatattggttactgggcatcgccgcgagagttttggccggggctttgagaatatttgtgaagcattagcaatgctggcaaagcagcataatgatgttcagattgtctatcctgtccatatgaatccaaacgttagagagccggttaatcgtatccttgcaggtatcgataatgtgcatcttattgaaccacaacagtatttgccttttgtttatttaatggacaaatcttatctgatattaacggattcaggcgggattcaggaagaagcaccttccctcggcaaacctgttttagtgatgcgtgataccactgaaagacctgaagccgttcaggcgggaacagttaagcttgttggtacagataaagaccgtattgttaatgaagtaaacaatcttctcgagtctgaggcggcttataacgcgatgagtttcgctcataatccttatggcgatggcacttcatcaaaagttattgttaatacacttacttccaaataa

SEQ ID NO: 134222 - DNA, 1089 bp, Enterobacter cloacae
atgaaaattctaattactggcggtgctgggtttattggttcagccgttattcggcatataattaacaatacggctgatcaggttatcaatgttgataaattgacctatgccggcaacctcgaatcgcttacctccgtcagcgatgatgagcgatatgtttttgaacaagttgatatctgcaataaagatgagttggatcgcgttttcgaacaacataaaccggacgcgattatgcatttggccgcagagagccatgttgaccgctcaatcaccgggccagcggaatttatcaataccaacattgttggtacgtatactttacttgaatcagctcgagcatattggtcaaccttagataaaccagctcagcagaaattccgtttccatcatatttccaccgatgaggtgtatggcgatcttccacatccagatgaaatttcaaaaggagaagcattaccgcttttcactgaagaaacggcgtatatgccaagtagtccgtattctgcatctaaagctgcaagcgatcatttagtgcgagcgtggctccgaacatatgggctgccaacaattgttactaactgttcaaacaattatgggccatatcatttccctgagaaattaatcccgttggttattctgaacgcgctcgaagggaaaccgttgccggtttatggtaaaggcgatcaaatacgtgactggctatttgttgaggatcatgcccgcgcgctctataccgttgttacccaaggaaaagtaggggagacttacaatatcggtgggcataacgaaaagcaaaatatcgaagtgatccgcattatctgtaatttgcttaatgaaatggtgcctaaagaaacgtcttatgaagaacagataacgtttgttagcgatcgaccggggcatgatcgtcgctatgcgattgatgcacaaaaaattagtagcgagcttggctggacaccattagaaacttttgaaacaggcatacgtaaaacggttcaatggtatctgaataatcaagagtgggttgcgaatgtaaaaagtggtgcctataagacctggattgaagagaactacggagatcgaaacgcttga

SEQ ID NO: 134223 - DNA, 900 bp, Enterobacter cloacae
ttgaacattctgctattcggaaagtctggtcaggtcggttgggaactccagcgcgcactggcccctttaggtaaagttacggcagttgatgtccattcagcggactattgtggcgactttagcaaacctgaaggggtagccgaaacggttcgtaagctcagaccagatgttattgtaaacgccgctgcacatacagcggttgataaagctgaatcagaacctgaactggcacaactcattaatgccacagccgttgaagctattgcgagagaagcggaaaagattgaagcgtgggttgttcattattcaacggactatgtatttccaggtacaggtgacaaaccctggtctgaaagtgatacgccagccccattaaatgtttacggtgaaacgaaattagcgggcgaattagcggttcagaattcatgccgtaaatacctcattttccggacaagctgggtttatgccagtaaaggaaataattttgcagcgacgatgttacgccttgcaaaagagcgcaaggaaatgtcggtcattaacgatcagtatggtgctccgacaggggctgaactgttagctgactgcaccgcgcatgctatcaagtcagttattactcaacctgaattagctggtgtataccaccttgtcgcatcagggacaacaacatggtatgactatgctaagttggtttttgaagaggcaaagcgctcaggtatcgaactttctttggaaacgctgaatggcgtaccgacagaagcctggccgactccagcccgacggccacataattcacgtctggatacgtcaaaatttcagcaaaacttcgcgctgacattacctgactgggatactggggtcaaacgcatgttagcagaattattcttagctcaacgagcgtaa

SEQ ID NO: 134224 - DNA, 261 bp, Enterobacter cloacae
atgccggacttgaaagttattaacctggctagcagaaaagatgctgatctggaacataaccgaacagaggttattaggcttctggaagaggcgcttcatgctgctcgcgaaggcaattatcgtagcatggctattttgcttattgatgaaagcggtgcggttatggatgcctggcatagcggtggttttccgtacgttatggttggcgccatcgaatcactcaaaactgattttatcaatctgcaaatcgagaggcgctga

SEQ ID NO: 134225 - DNA, 225 bp, Enterobacter cloacae
atgccttttctcatggtgttctttgttgtcattatggtgttactcctctggaaggcaggaattccccaggctatcattatgttaatcatacccatcatgtttagtactttgggaggtatggttgccgccgtgggagtaagcgcgttcgctacacctattgttggagtgcctgttggaatcgttgtatttttaatgttgatgggtaagtttttatccagaaggtaa

SEQ ID NO: 134226 - DNA, 387 bp, Enterobacter cloacae
atgtccgatccattttccggcacagggctggccggtttagctttgactggagccagtgtttacggtctattgaccggaactgattacggtgttgtttttggagcatttgcaggcgcagtattctacatagcgacagcggctgacctgagtgtgttacgtcgcctggcatacttcttcgtgtcgtatatcgtcggcattctttgttcggggctgttgggttcaaaactcacatcctggacggggtacaccgagaagcctctggatgctatcggtgccgtaatagcttctgcgttagccgttcaaatccttacgttcctgaacaagcaggacatcggctcgctggtggcgctgataacgcgccggggaggttcaggtggcactaaatga

SEQ ID NO: 134227 - DNA, 972 bp, Enterobacter cloacae
atgtcaggcgataagaaagatccaaagggtaaagctaagggcggggttgccagggcgaagtctcttactaaagagcagcgttctgacattgccaaaaaggctgctgctgcaaggtggagggataaaattcacaaagccacccatatgggtaatttcaaagatgaatttggaatagatgctgagtgttatgtcttaagtgatgaatcgaaaaccgcagtagttactaaggctggacttgctcgacttttaggtatcggcaacttcgcaagggatgtcgataaactactaagcgctggttacatgaaggagtttggtggtccaagtttaatagcgaaaattgaaaatcctattaattttcaatatagtgggcagtccaaaaacatcaataacgctcatgggtttgatattgatgtgatcgttgatataggaaaggcgctgatagatgcaaaaagtgccgatgctctgccaccgtctagaatccctgctgccgatacagctcaaaaactaataaatgcttccgctaaatcaggtataaaaggcgtagcctatgcattggccggttatcgacctgaagttcaagaggtaatcgatgcttttaaggcatttgtacgagaggaagcccgccaatatgagaaagagtttcccgacgagttgtatgaggaatggtatcggttatatggacttaatcgtccggaaaaaggcaggccgatccgctttggacagttgactaatatgcaaatttacgtcccactggctaagagtaaggggaagatattagagcaaattcgcgccagtagggatgagaatggaaagcaatcagataagttacacctcttcctttctgaaattggcgtcaaggccttacgacaacacatcggcaaacttcttggcgttgcagcaatgagcgacaacaaagaggagtatgaggccggcattgaaaaagtttttggccgtatgaagccagaattataa

SEQ ID NO: 134228 - DNA, 372 bp, Enterobacter cloacae
atgcataaaaaattgaagttagcaggagcatttttattagctatttcttctcttcctgcatacacagctgacaaaattgacggctggatctttctgacaaatacaaacaatttcaacttctatggtaaggaacgttcattgactgaaaacaaaggtattcggtcaataatcatacaagaagttccaatttccaagaactccagtgcgaaaattctctactctcatttcaccattccttctaaagcatgcaaaaatgagtttggtgaaataacaatgtatgaaatgagcggaaaagttgctggaaaatatgattatgttaaaggtggctcaagtgcagccgcttacatagctgatcttgtctgtggaaattaa

SEQ ID NO: 134229 - DNA, 813 bp, Enterobacter cloacae
atgaaactggaagcagcacttaaacattttagtcctcagggaatgcatatcagcgaagatgtaaagggaacctctccggatcgtctcaccggcactgatgttatggcggccattggcaccaccagcagccgtgcgcgcttcggcctggctgctttcttcggcaaagccggcattagcaaaacagatgaacaactcgcagttcaggcgctggcgcagtttgccattaaaaacgcccctaaaaatgtccgcaaagccgctggcgataagctcggagcctgcatgttgacgctggcgcagtttgctttcgcggagtattcctgttcggcggctaccagcgtgatgtgtcacagctgttgtggtaacggccggaccactaaagagcaggtcacccgcaaggtttcgtacccttggggtaaagcgccatactgggccagccgctcccgtgccgttcgtccgtctgactgggagctgtggacagaggtaacagaggttgtaccggcggtctgtgatgtttgcgaaggcaagggaatgataagcgcccgttgtcgttgcggcggcataggtgaagtggtggaccgtaaagcaacgaaggaacgtggcgtaccagttttcaaaacgtgtgaacgttgctctggtattggcttctctgctatctcctcggcgacggtatatcgcgtcattctgaagcgactccctgaccttcaccagtcatcatggtcgcgtaattggaaaccactctttgaaatgcttgtggacacgctgcgcaagtgggaatgtcaagcggctgtcgaattcgagaaggcaacaacttaa

SEQ ID NO: 134230 - DNA, 885 bp, Enterobacter cloacae
atgcgtgattacggcaaggtgcatacatctttttggataagcgatggaatgcggcgagtttctgatgatgctcgtctgcttgcgctgtacctgctcacgggacaacacacgaacatgattgggtgtttccgtctgcctgatggatacgtttcagaagaccttaactggagttccgaaagggtttcgaaagggtttgatgaactatccaagaacggtttcgcaacgcgtgatattaccacgaaatgggttctgatcaggaacttcatgagctggaaccctgttgagaatcccaatcagggtatagcggccatgcgcttattttcacaggtgccggataagtcgtccgtcaagccagagctggcgcggattatgaatgatgcgatagctcatttcggaggcgcaaaactaaagggttctgaaagggttttggaaccgttccttaaccaggaacaggaacaggaacaggaacaggaagaagaaaacattttggggcatggctccgccacacccccaggtagtgatgactcctccgatggtgtgacctctcagaaaaaaaatccctaccctgacgacttcgaacaggcatgggcgatttatccaaagcgttcaggcggcaacagcaaggctgacgcctgcaaagcctggaaggccagggttaaaacaggtgccacagttcaggagttgcttgacggcacccggcgttacgctgagttcgtgagggctacagggaagctgaatacggagtacgtgaagcaggcggcaacgttttatggcccttcgaaacactatgaggaagcctgggaagtgacggcgccatcaggtatgcgcgatctgaatgccatttctcgtccagataaatccatcccaccagggttcagggggtag

SEQ ID NO: 134231 - DNA, 624 bp, Enterobacter cloacae
atgattatcccaacattaactcgtgccgaggccattcagaacataatcgccatcaacaagccgtctcttgtatgtattgggcatgctggtgatttggaacgtttgggcgaggagttaaggcaggacattgtcagtgcatgtgggcatgaaaaagttcgctttgttaatgccaagtggaggcatggggtttcccttgactctagatggcgtagagttgatttgttttcgtcattggagcgaatcgtttttggcatttgtaatgacagggcggcggttcacagttggtcttcccacggattgtttaacgggctaattatttcacactggtctcgggaacaattggatgcgatagatttgaccctggcactgcatcgccatgaatacaacgcagaaaaagaccctgctacaaagaataaaattgctgagcgtcacatgtcggcttcattcgactttaacagcatggtacgggagggcaatgacttagctcgcgagattgaagtcaaagttgaagcgatccgaaatctctattttactaacccagaagcagccaaaactgcattccagactcttaagggtcagtatggcgacatacttggaactctcgagtcaagggtcttaaagtaa

SEQ ID NO: 134232 - DNA, 483 bp, Enterobacter cloacae
atgaaaaaggtcttcttgactgcgatgttagcaatgactcttactgcttgtgcaggaaatggtccaaataataacgtccaaaagcaagccaaatatgatgaactgtcaaaatgtgatgtaaatattgaggtctctggccgttctccgaaaagtaaaaaggagtttgctgaatacctatcagctcaggcacgcaacgcttcagcggatcagttcgtcgttcaaaaacggatggaaatccttcagatggttgggtggaatgattcagtagctgatgcaatagcaacatgtggcgctgaaagaaaaaacatgcgcaaaaaaaatgcgtctgtcgtatttgaaacgatgaagtctaatactactggctctgatgaaaagcatgcccttatcaatgcttacagttcatgggaggcttatgtaacaaaccaaacgcctctcgcaaaacaggactttgattctaaagtaggctattacaaaaacatgtga

SEQ ID NO: 134233 - DNA, 228 bp, Enterobacter cloacae
atggggaacgtgaaaatttacgctggcttggttaacggcgaccttatgccaatcattgaggatagaacctctgaagaaatcgttactgccttcacaggcgatgacactggcgcaccatcaacatctgtgacgattgaggtgattaccgaaagtggatcaaaagtcaaaatttacataccaaaaagttcagctcaggcaagtgtatcagtggacggaaaacgagtttaa

SEQ ID NO: 134234 - DNA, 594 bp, Enterobacter cloacae
atgattcaaaatttattgttggaagcaataaaccatgaacgaatgcatcaaaaattgtacgagcttaatacttacttctacaaccgtaagcacgaaactcagattcgtgatgaattagtagttatcataaatcagataagttcggttattgctataagtgagcatccaaaacttagaactggcgctgtagatttatcgatctatgaacggccattatcttgcgaagacgaatgcagtattgcaacaatagagttaaagcatcactatccaaaagatttactatatgaacaggtgcaaaaagacattatcacagacctctcaaggtccgttgtttcacaaacatctcattttgttcatgtaattcaacaaagaaccgtttcttcccatcccaaaattgggaaagttaagttcctcgaacgcgatgccgataacatatcaccctatgtgaaaaccctagaagaattggcatgtttcccacaagattgtcagaaaaaatcagtttgcattgaggtgcatggaacagtgatgtccacatatacgttcaacatttacaccttacgactgaacacatcaccgtttaccaatttaggctga

SEQ ID NO: 134235 - DNA, 213 bp, Enterobacter cloacae
atgttagaaaaatatcttttagttggcgggatgaataccactccacagcaaaaaagagtggcagttgtcgaggcggctcttgaaattgccaaggcttcggttggtcaagccaatgcagcgcctcactcaagaacagaagatgacttgaagcatgtggcaaaagaaataagtaatcttgctgatgccatagaaaaggctctgcaagttaagtga

SEQ ID NO: 134236 - DNA, 522 bp, Enterobacter cloacae
atgaatattgttccattgaactacaaaggcgaagctattcgttttaataccgacggatggataaatgcgaccgatatcgctgatcgcttcggcaagcgactagaccactggctgtccaatgcagagacgctggaatatgtgagggcattggatgaggtctattcaggatcaccatctgaaatcttacatacccgtaaatccgggtatgtaaaaaccagcaaagcgcgtaaagacaggggcggtggtacgtggctgcatccaaagctatcggtagcttttgcccgttggtgcgaccctaaattctccgtctggtgcgacctgcatattgatagccttcttcgtggtgaactgaccgaacaacagaagtttgatcaggcctgtcggatacgagatgaccggcaatcaaaagccagcaatggagcacgagaaatggcccgctggcgatgggataagcccggcattgaagccaacgttgaattctggcgtgagcaactccagttaacactggacatcgcaatctag

SEQ ID NO: 134237 - DNA, 624 bp, Enterobacter cloacae
atgagaaagctcacaccaatttacaccatggttaactttgtcgatgacgcccatttccggcgtgtctggaagcatcctaagaagaccatcacaaccaagcaacgagcctgggtgcagtacatgatgtcagtgtggggcagaattaatcgcggcgatgactcaccagctggcgctgttaacgttattggccgcctgatgatccggactcaatggaatcctgatatgggtggacacatcgagagaatggtcaactggctttatagcgacgagggtggggcgctgagaggtgaggaactctataagaaagctcgcgaactggtcatccctcaatcctctaccagcaacatcatcgctctcgccaaagaatcagatgatgcagcgttcgttgaaaaggtgatggtcaagttattccaccgtgaaagcccagtccgcgattacgccattaaacgatactgcgaacgcaactgcacgcaagatatcgccaggaagatgcacctgatcaccggattagatatccaggcttgccgccgccgggttgtctggtgtgaaaaagtattcgaagcagaatttttctatgcaatgaagcgcgaaatggagaatgagatttctctaattgctgcttaa

SEQ ID NO: 134238 - DNA, 294 bp, Enterobacter cloacae
atggacgcattcaaaggcttcagcgcaacggactggttatttttcgcaacgatggtgattgcatggttttacctcgtagccaaagcgtatggctggtttattggttttctgtttcgccgttgttggcgctggtggaactggaaagacgagaaaaccctagctatggattcgttttacgaggcttttgatctggctgatatcaatcctggggatagcatggtgatcaccacccatagtggaatgacgatccgcattcatcggcccgaggctaagcgcgacgtaaaaccgctttga

SEQ ID NO: 134239 - DNA, 837 bp, Enterobacter cloacae
atgagcgtaagtatcaaacatccagcaattcgttatcatggcggtaaattccgcttggcaagctggatcatcagccatttccctgaacaccgatgctacgttgagccatttggtggcggagcgtcagtgctgttgaaaaagcaggcatcagaagcagaggtttacaatgacctcgacggagatgtagttaaccttttccgtgtactcagaaatccggaaacggcaaagcaacttattgaggcctgcgctcttaccccatactcacgcgacgagtttaattgcgcgtatgaagacagtgataaccgggtggagcaggcccgccgcctgattgttcgtgcaaccatgggattcggcagcgcaggtgcaacaaagggtaagacggggtttcgtctggataccaagcgtaatagtgctaccgcacaacgtatttgggcgcgacagcctgataacctcgccgcagtggctagtcgttttgctggggtactgattgagaatcgcagtgccattcaatgtatgcgtgaccatgatacagcatctaccctgcattttgttgacccaccttacgtgcatgaaaccagagtagagactgcaaaaaacagcgcttaccggttcgaaatgaccaatgaagaacacacggaacttctcaacgcgctgaaagagttacgcggtgcggtaattgtttgcggatataacagcgacctctataacaatgcacttgatggatggaagtgtgtatcgcgaactacggcagccaacggcttcgctggttcagttcagcgcacagaatgcctctggcttaaccaggcagcacagcagaagcgggaggccgcccaatga

SEQ ID NO: 134240 - DNA, 342 bp, Enterobacter cloacae
atgaaaccaacatacgaagaacttgaaggcaagtgcgcggcgctggctgcggagttgcgtgcagtcgaagcaatccacaacgaggcagtgttcatcacagatgatcactatgagcagtgcccggcagaagttcagaagataattcgatcgctggctgtgatgcagattcctgcgtaccaggctttcctggctgaagtgcgggccgccgcagtagatgaagtttgcctgaaaattagcaatgcaattattaattgctatcaggacgaacaaattgggcttgatgcagcagcaactatctgcggtgacttcgccgcccagcttcgcaaaggagtgcagtcatga

SEQ ID NO: 134241 - DNA, 345 bp, Enterobacter cloacae
atgaccataacaatccgtgggcagattcttgcagccctgcgtaataacccgggcctgaacagtgctcgtattgccagcatgatcggcatgaccaccaaaaagatttccggcccgttaagcacattgtttgcagacggcctgatcgagttcgaaggcaagcacggccagcggctgtatcggctgaccagctacggcatgaaatacgcaccggaaaccatacctgccatgccgaagggtaattcgaagctggtgcagcgcacagagacaaacgtgatctgccatgagtgccgcaacagtccggcgatgagaagggtattgatggtttgggggagggtaggggtatga

SEQ ID NO: 134242 - DNA, 243 bp, Enterobacter cloacae; identical to SEQ ID NO: 77610

SEQ ID NO: 134243 - DNA, 159 bp, Enterobacter cloacae; identical to SEQ ID NO: 77609

SEQ ID NO: 134244 - DNA, 159 bp, Enterobacter cloacae
atgacagtcacccacaacggaaagcagtacaccgccaaaaagctcaacgataacgagtggcaactgacgtcgctattggcactgcgggaaaaactggtgctgaaccgttggcagatgcatatcgctggcctcctggaacaggttgaggtgaaggtatga

SEQ ID NO: 134245 - DNA, 543 bp, Enterobacter cloacae
atgcggcctgagttaaaccaagagtatctccgcacaatcctaacttacgatcctgaaagtggtcatttcaaatggaactttaacaaaggcgctcgcaataaatctccttatgcggggacgctaaccagttacgggtacataaagatcctgatagaccaaaagcaatactttgctcataggctcgcatggctttatgtgcacggacactggcctgaaggttttattgaccacatcaacggcgataaagctgacaaccgcctagttaacctcagagaggctaagcgtgaggaaaactgccggaatgtatccattaaatcaacaaacaccagcggttacatcgggatcagcattgataagcgtcatgggtgctggagagcgcagatcaaggttaaccgaaagcaaatagccctcggtactttccaaacaaaaattgatgcggtgcgtgcttttaacgaggcggccgctttccatcatggcgaatacgccattcgaaagattaaacataacgaagagatgctcatgaaagagtttgggcatctttag

SEQ ID NO: 134246 - DNA, 198 bp, Enterobacter cloacae
atgggcttggatgaagaaagagtgaacatgatggttcacgccatggggcgggcggtcatggagttgtcactggcagatttacctatgacccagcaaaacatcatcgacaagctggaacggtaccggaaggaaacgggaaacgtgataggtaagggtgtgaacagggatgcagctgagatagtgcggaagggtaaataa

SEQ ID NO: 134247 - DNA, 336 bp, Enterobacter cloacae
atgaatgctcaagaaaaaatcgttactccgattggtgttgctaacgattatcgagccaaggcaaggaacaaaaaaccatcaattgacacctggggcgctgtagaacatgataatatttatggctctggaggcggtggaggtgatgacatgctaaaaagagtggagagattggaggagaaagttatctccatcagttccgatttggcagttatcaaggcgactatgtgcacgaaagaagatttacacaaggagctgaatggtcagacatggaagatcgttgtcgccctagtaattactgtgcttatagcagtcttttcaaaatacttcattaaataa

SEQ ID NO: 134248 - DNA, 420 bp, Enterobacter cloacae
atgagcgcagaaaaaatagcctttctatttcctacgagggaaaaaggggtaggctctcctgagaaatccccaagaatgcctttgttggttcttgattgtgaagagtttccaacggttacggatatttttataactgttttcttcatcgggctaaagcatgaaaagccatattaccttcagcttgaaatgttttatgagggggaggcggcagagcattctgtaagcgctttggtagggactcatcttagagctaaagatactttagctcatgaagatgatattgcggcctcccttgatttgcggctagaaaactctactttcatgtcaccaggtaattactacgtccaagcaaccctgatgcataaccagatcgccatccatgagaacagagcctaccttaaggtgtcggaggcgatatga

SEQ ID NO: 134249 - DNA, 249 bp, Enterobacter cloacae
atgagcgaatggagtgattatcgcttgatggttaggaccatggcgaagggtaacggtgtaacgctcatcagcatcgccaggcactgcggcgtatcgaacaggaaacttaatcagattctccaagcggggccatccaaagaacaggaagaactcatagccgaagctctggggtgcgcagggtgtgaccttgcggaaatccacaggcaaatgggcgagttatcagacaagtacgggagggcaggggtatga

SEQ ID NO: 134250 - DNA, 363 bp, Enterobacter cloacae
atgaaaccaacatacgaagaacttgaagccagatgcgcggcgctggctgcggagctgagtgcagtcgaagaaatccacaacgaggcagtgttcatcacagacgatcactatgagcagtgcccgccggaagtgcagaagataattagatcactggctgtgatgcagattcctgcgtaccaggctttcttggctgaagtgcgggccagtgagcttgatagcctcgcaggcgtggcagagaccatgctggttaaattcagcaaccagaggtgctcatccgatatgcatgaggttgttggctggaaaatggttcaccagcaggccagtaaccgcgccgcccagcttcgcaaaggagtgcagtcatga

SEQ ID NO: 134251 - DNA, 261 bp, Enterobacter cloacae
atgagcattctgaacattctaaacactggcctcgctctgatgggatggttattcatcatgttcaaaacaggccagtggtttatctccattgcgctaaagcagtgggataagcgtagaaagctatctcgtagacagaaggcagtaaacgaattttacgatgcgtttgacctgtccagcatcgaaccaggaacaacggtgcgcctggcgactaaaggcgatctgacaatcatgatgtatcgcacagaaggagccacccaatga

SEQ ID NO: 134252 - DNA, 192 bp, Enterobacter cloacae
atgagcaacatcgacaaactgcagatacgcgccgaagacgttgaacctggcgatgtggttatcacttctcacggtaagcgctacacggtcaaatcattctggatggaggatgacaccgttaccctgttcggaactgatggctctgaaaccggatatgactacgacgaaatgctcgacgttgagaggggctaa

SEQ ID NO: 134253 - DNA, 438 bp, Enterobacter cloacae
atgagcatcgtggtatttaccactatcattactggtgtttgtgtctttgtgacgggtcacattcttgtaaagggcatcttggacccttacctctctttcaaagagcagttggggatggtctcagcaattcttttacgggagcaaaacaagattattaacttaagcgccagtaatgaagtgattgacgaaataaagcacgcttcggccctactgctttcaaaatctaacgcggtccccctatatggcgctttcgttaaattacgtttacttcctcagcataaaagcataattaaagcatcgagaaacctgaatcttatagcgagtactttggaaggggcgagcaatatcacccccagaaaagactatgtcctcgttaacgactctctcaatgctataggtcgtgatttgagaatcattgttacctataaaggactataa

SEQ ID NO: 134254 - DNA, 657 bp, Enterobacter cloacae
atgatttttaacgagtatcaggtgcgcgccttgcttgatggcagcatgacgcaggttcgtcggccaataaaatggcgtcagacacgggctaccgaaattgcagagcgcgaagatggtagccggtggccgtggagtgaggatgcggaaaatgtttgcgattactggcacccatgcccattcggtgcagtaggcgatgttatttacgtcagagagtcattttcacggctcgactcatttaacttcttcgatcccgcagtgcctcatgaagtaccggatttctggtattgggccgatggtgatccggggtggggagactggacgcgcccacaatctggtgctgtcatgcctcgcgacgccagccgaatcagcctggagataaccggaatccgcgtcgagagacttcaggatgctgatgaatcagccatgctgaatgaccttggtgacatgctcgaacactgcgaaaccgtagctggacgcgccttcaaccatgctgagcattatgcgatcgctggcgttccggtcggtctgtgtccagaaatgcacggctttaaagcgtggtgggataagacaaatggcgctggtagtttcgactccaacccttgggtctgggtaatcgaatttaaggtggtgcccaatgttcaggataatccagcctaa

SEQ ID NO: 134255 - DNA, 219 bp, Enterobacter cloacae
atggccgacatcatcgataccgcagcagagattgaagagcttcagcgtaacgctgccctttccactcaccgcctgaaccgcaaggccgtatcagctgaacgttgtgaagaatgcgacgaaccaattcccgagccgcggcgcgctgccgttcccggctgccaaacgtgtgcggagtgccagggtgttatcgaactgaggaataagcagagggggcactag

SEQ ID NO: 134256 - DNA, 219 bp, Enterobacter cloacae
atgacgccagaaaaagacaacgccatccgcgccgcctgccgccgctgcaccgaggaaatccagcaggccatgcgcaagaagccaaagccaaactggaacgaaacggtgccacccatcatcaacaagcatcacaagaaaattgaagctctgggagttagtctcctggagttcgtcgtatacacaggcaggcttaatcgccgctacggagtggaatcgtga

SEQ ID NO: 134257 - DNA, 552 bp, Enterobacter cloacae
atgaccgattacaccggcagcaatacgcctgctgatcagcgcgacctatggcgcactccatcagctctcttcgcttcacttgatgcagagttttgcttccatctggatgccgccgcagcgccgcataacgcgttgtgccgcaagttcatcacagccgagcagaacacgcttgaaacaccctgggctgattacctgaacgtacccggctacgtctggctgaaccctccatacagcgacattactccgttcgttaagaaggcctccgccgagagcgccaatcagatcggcacggtcatgctggtaccggcagacacttcggttggctggttcaaggaagccatccagaccgccagcgaggttcgcttcatcaccgccgggcggctggcatttatcaacccggtcaccggtaagccggtatcgggaaataacaaggggtcgatgctcatcatctggcgaccgtacccgcgtacacactgccacttcgcaactgtggaccggaacgtgctgatggctttcggggcgaaacttctcgcccgccgggaggccgcatga

SEQ ID NO: 134258 - DNA, 234 bp, Enterobacter cloacae; identical to SEQ ID NO: 85322

SEQ ID NO: 134259 - DNA, 873 bp, Enterobacter cloacae
  misc_feature (84)..(93): n is a, c, g, or t
atgaataaagttacgttaatttcaactgtcttcaatgaagctgcatcaatcaagcgattttgtgattccattcttaatcagacnnnnnnnnnnaatcagaccgatattcctgatgaaattgtcattgtcgatggaggttccagcgacaatacagttgaacttatcaaagaagctttctctggtctggctggtcaatgtgagttaaatgttattgtggatcctgagtgttgcaaaaagtattcgaaggggccaatcgctcgcggtcgaaatgtggcaatccgcaatgcaaaatataatcatattttagtcactgatgcaggttgtattgttgacaaagactgggttaaaaacatgaaggcatgcttcgatgaaggggcggagattgtttctggaacatacaaggctcgagtaacaaacaaattccaggaatacacagctgacattttttgtccagcgctaccaccagatacgccagctaaaagctttttaccaagttctcgttcactgggttttgaaaaacatatttgggagcgcgcaggggggtatccggaagattcttatacggcagaagataccgtatttatcttgcgtgcttttgaacaaactgatcgcataattatagcctatgacgcatttgtttattgggatcttccagttgattttaaggaattaaaatctaagctaatcaactatgggataggggatggatatcaccgccttgataaaaagaaatatttagctcgcttcgttgcgttgatactcttcccgataacaatacctgttatgttgctgaaacataagaaattaatcgccttgccaatgtattattatatgttgagtggatatatcaaaggtctgcagcagaataagtga

SEQ ID NO: 134260 - DNA, 717 bp, Enterobacter cloacae
atgtggcaagcccgtttttatcagtccctgccgcgtattgttgcggattatccagatgcacgctggatgttcctgaccctcacagtgcgaaactgcgcgatcggggaattgggtgagacacttaaccgaatgaacatggccttccagcgacttaaggatcgcaaagagtttcgacctgttcagggctggatccgcaccacggaagttacacgtggaagtgacggtagtgcgcacccgcactttcacactctgatgatggttcctccctcaatgttcacgcgagattacgttaaacatgaccgctgggtagagctttggcgagagtgtttgcgtgtgaattacgatccgaatgttgatgttcgagcagtaaaaccccgcaagcctaaggacggagaatcattggcttctgcaactgcggaacttgtacggggcgcagtggctgaaaccctgaaatattccacgaagccggctgacatggttgctgatcctgaatggttcctcgaattgactaagcagacacataagcgccgatttgtggctaccggtggcgcactcaaagacatactgaaactcgatcaggaaactgatgccgatatggtaatcggggatgatattcccgaaggcgatgatgatggttcacgcattgcttttgagtggaaaaccgaatccaaaaagtaccgtcgctcaccgtcaaaagataaagctgaatcagactga

SEQ ID NO: 134261 - DNA, 501 bp, Enterobacter cloacae
atgcgtgtagacgtgattatcatcgatggaatgggatttaacgcagcaaattactttgtcgcaagcacactttgtatgctaataccgttacttaactcatcggtgatggccgtgttggtaaaagttggtattcaaaatgtgcaaaaaaaacaaaaaatatttttcatcgcttttatcatattagggtatctcatatgttcgaagtgggtgctttcattattatatggtaacacctacgagtcagcagcaaatatcatgtatattcttaccatagctttctctgtgggtctgtactttactgacaaggaaagtgttctctaccatcagtctaacaaccgattactttatctgaagatcacccagttactggtgatgattgtttcatcgtaccctttgataacctacctcggtgaaatcgggatggcatatgctgtactgctgtcacgcttggttggctggctatatcttattacgatctgtgaaaatgaaaaaaaaatctga

SEQ ID NO: 134262 - DNA, 261 bp, Enterobacter cloacae
gtgattgtgattggcctggtggataacattctgcgtccactgctggtgggcaaggataccaggatgccggactatctgatccttatcgccactctgggcggcatggagatctacggtatcaacggcttcgtgatcgggccgctgatcgccgccctgtttatcgcctgctggaacctgctgtcgggacgagaacatgccggcaataccgatgaaatcgatgaagagtttattgaggaagcgaaaaatagccgtaatgaatag

SEQ ID NO: 134263 - DNA, 204 bp, Enterobacter cloacae
atgcgaacggatatagcgaccggcagcctgattaatttcccattttttcacgtcgataatctcgcgcagggtttgcaggctccggccgctgtggccgttaccggcaagctgttcgcggtatgtctgttcggcctgcttcagttcatcccggcgttgcaaccaggcggatttatttgcctgacaggcctcaaaggctttctgtag

SEQ ID NO: 134264 - DNA, 1014 bp, Enterobacter cloacae
atggccggtaaacgaaaaaatccttctgatgcaattctccccccgcgtgtctaccgggggaaatcaaaatacgaattccacccggcaacgggtggatccataaacttgtgtcctctagattcaccagtatctttaatttgggccaagtatgaggcagcgcttaaagttatcgaagagaaaaagaatctgtctggactaatcgatgatttttttgccagcgccgattatcacaaattaggcaatgaaacccgtaaagattataaaaaatactcacgcaaactgatcccggtgtttgggaaaatggatccagatagcgttaagccccagcacatcaggcaatacatggataaacgaggcgtggccgcacccgtgcaggcgaacagggaaaaagcgtttctaagcagggtctacggatgggcttacgaaagaggcatggtgaaaggcaacccatgtaagggagtaaggcaattcaaagaggaagaacgtgaaagatacgttaccgatgaagaatactatgcgctttatgaagtatcgccgacggtcgtcaaagtagccatggaattggcttatctttgccttgcacgtcagggggatgtactcgctgtgcaaaaaacccaactattacaagaagggatttttatccgccagggtaaaaccgcagcaaagcagatcaaagcctggtctgaacgtttgttagcagctgtagagcttgcaaaaacattaccgcttaaaaatggaatttccagcgtttacttgatacatcagtttaatggtcgccgctacacacgtgacggctttaatagtcgctggcaacaagcgaaagaagaagctcaaaaaaaacatcctcacatgctttttgattttacgttccacgatctaaaggccaagggtgtatcggatctggaaggaagcctacaggagaaacagcaaatttccggacacaaaactatcacgcaaacggcgcgttacgatcgaaaagtaaaaattgtgccagtggtaggcgggcaaaaataa

SEQ ID NO: 134265 - DNA, 222 bp, Enterobacter cloacae
atgactgatgacattttaactaacgatgcaattcgtaagctgaccgggtacaaacaacccaagaaacaatgcgcatggcttgcctcagccgggatctggtttaaagaagatcgcaacggttatcccagaaccacctggaaccatgtgaacaatccgatcgcattgaggatggtacctgacgtaaaaactgagttaaatactccaaactttgatgcaatgtaa

SEQ ID NO: 134266 - DNA, 1905 bp, Enterobacter cloacae
atgtctgttgagttaaaagtatttggtggtgcttacttcccaaaagataaagcattaaaaaaacaccctaatttaaaaccacttgccatcgcggtaaacgcgtccacaaaagccatcgctgaagctgttattttcggtaagctggcggctgaacatccagaacatattgatgatttctttaaggtgaaaatctgggagcaccacgaaggtattccctgccctgatcttgatgttttctcacctgagtttttcgacagcgtggcagtatggaatgtgaacgctggcgaaccagctgcggcgccacagccagaagctgacgcaaacgaagaatgggaggacaacaagactcaggaagaaattaaaatcgttgcgcggctcgaccagacatcccgggcagcttgcctggcactgttcggcccggttcctggaatcactgaggcgcagtacggccagattgtagacctggttaatgatgatgctggcagctttacccgtgaactgacagaagcactgacgaaagaaccccgtgctctgtcgctggcgccggaacgccaggagcaattactggcctgggtacgcgagaacacaaaagaatcatcacaatggcctgacattaaaaagcagatcgccaagtggctcgacacgccagtagataagcgcccacaagctaccaccatcaccgaagaaagccacacagactcgggcgccactcttggaggcggcaataagaccgaccgtagccctgatctggttcataacctttccactctgcgtatcgaagtagcggttgcaattctgagcatgtacgacgagatcgacatttactggatccctaacagattcatgatggccgcgaaaggaatggcagaagcagcgcaggatccccagttcactgcatggtgggcacaactgcgtggcacgcctggcattctgggctattcccgcgcggccatcatcgcgttgatcaaatctgcgcctgaagacctctggctaaacccgatcaaattacgtgagtacatcaatcgcgaactggttgaatcgaatcatgcgaagccagatcagaaaaccatagatattgcatgcaaagcgaaaccccgcgttatcccagaggaaaagacagatgataaaacccaaccctcgatacagagcgaaactctgccaccagcagtttgcccgggaaaagctgcgcagttcgataaagagcttaaagaggcattcacacagaatgcaaagccagcgccgcaggccaatgagcagccgcgcgtagagaacctgggcgatggtatattctcagtagatactttgatcaacaacacctcaaatgaagtcgaaaaagaggaagtacaaccagcattaagtggccgcgaaactgaaattgctcaggcgattgatgatctgatttccgggcgtaccaatatcatgggaaaagaagaagcagaaggcgtagtgaagtgcaccggccatagtgtttccgacgtaataccattattgatgactgatatagcgacaactgaatattgcctctcacctgatttctctgacgaagaaattcacgatgtggcaacgacgctgctcgatagttggtctgacgatattagcgtgcgtcagaaaatcgcgcttgatgcgatcgtggaataccgtcgccctgaacagccaaaaccggtagtgctcaatccaccggttgttactgcaaaacctcaacagacacctgaacagcagcctgaagcaaacagtcagcagacatccctctcctaccagcaacagctaacgattgcagctcttcagggcctgtgtgctaaccccgcttactgcaatcagtacgatgatttgccgatcatggcaacagagcttgcgcgaagtgttgaaagcatcattcagcaggaaggttcaggtgctactgattaa

SEQ ID NO: 134267 - DNA, 273 bp, Enterobacter cloacae
atgaaacaaactattactaccgtagaattgagcctggcaatcgtaaataaagaccttgccacatttaatgttaacggtgctatttcaggcgtggttcatttgcctacctctggccctgtaaccgttgtgcttgacggtgggtacgtgctcggagagtttcattgtccagcttgtgccgtaaaggatattagcttgctgtctgcgagttttgcagaagcacagaacgcctgcggcatgtcttattacgaccataagcgccaacaacttaattga

SEQ ID NO: 134268 - DNA, 171 bp, Enterobacter cloacae
atgaaatattacatagcaacaataaacgaaggttctgaggtggtgattatccatgctcggaatcagttcgttgccaaagccctgattaataatgatgcagaaacgataaagttaattagtgcattggaagcaaagaagctgattaagcgtggtttcaggttagtcagctaa

SEQ ID NO: 134269 - DNA, 492 bp, Enterobacter cloacae
atgactatgaacgcgccgtgtcttactcttctacctatggtagaaaaagcgaataaacatcaggatttcgcgaaccggctgacagaagaaatgcgcaaacagcgccgttctgtgaaggatttaagccaggcttgcgatgtcacatacgaaatggctcgtcgttatacgctgggcacggctaagccacgcgatgagaaactgcaaaagatagctgactggctaaatgtccaagcggcatggcttgactacggggaaggtgaaagtgcgcctactaagcttccagaaactgagtttatgggcttccctgcgacagaatccgacactggcagcgatggggaattcagtgatttaagcgaagacgaaaagcggctggtccgagtctatcggcagttcccaagtgctgaagccaagaacatgctactggctttcgaaatgcggtataaacagctatatgatttctttctgaagtacgccaacaccccgcagaagtaa

SEQ ID NO: 134270 - DNA, 270 bp, Enterobacter cloacae
atgactacttcatacaagaacattacggagaaggctgtgaggtcgattggttctgtttcggccgtcgcccgtaaattcaactttaagtcctcacagtcagtagcaaactggattatccgaaaccgagttccaagtgagcgagtgattaagctctgtgaatttggcggctggactgtcaccccgcatgagttacgtccggatttgcatccaacccctaccagcggaattcctgttcaggatatcccacgtgcgcagagggagtctgaatga

SEQ ID NO: 134271 - DNA, 456 bp, Enterobacter cloacae
atgatggaaatcaaaaaactggcatgtgagctggagtcctgggcgcaggaaaagggctggaagacagttacgcagctgataaccccgcatcactttggcgatctgcttcagtcactggatgacgtttcggatccggacgagtacgcacgcaggctgcacaacaacaagcagattattcagcgtgcattccgtaacgatacgcctaactacctgaaacaggcggaagccctgagctacgcaatccgtaccgccattgataacgaactggcacagaaagactgcatgcattaccgggcggccagggttaacaaagagtgcatcgaagccaccaatgcggtcttcacgggcaaaccgaaaccggtaatccggcgagagacactggaagcgatcgacgcgctggcgcagctggtaggcgtcaaagtgaagctggtttcgacttgttcgaacgcagcttag

SEQ ID NO: 134272 - DNA, 918 bp, Enterobacter cloacae
atgagcatggagctgatggtccaagcgatgaaggtcaaggtaggcaacccgcttcgcaagctggtcctgcttaaactggccgataacgcaagtgaccagggcgagtgctggccgagctatcagcatatcgctgatcagtgtgagatcagccgtcgttccgtcatgaatcatgttgccgcgctttgcgagtctggactgatgcgaaaagagaccagatcggggccgaaaggcaatggcagcaatttctatcgattaaccctgaccggtgcaaacgccagttcgagggtagtgaatgagattcaccagggtagtgaagcaagttcaccaggggctggtgcaggagattcaccagatggtgcaccacattcaccagggggtagtgaaggagattcacccagaatcagtcactcttttgaaccagtcaaagaaccagaaaatctttcttgtccggacgcttcgccgtcggacggaaaattgacaaaaaccgagtttttgaagcgccacccggaagcagtggtttgcagccctgcgaaacgtcagtgggggagccaggaagatttgacctgtgcgcaatggatttggaagcgcgtgctgaaactctacgaggaggccgcaacctttgacggcgaaatcgttcgcccgaaagagccgaactggaccgtctgggcgaatgacgtgcgtctgatgcgcacccttgatggccgtagccacaagcaaatttgtgaaatgttcaagcgcgttcagagcgatacgttctgggttcgccaggttaaatgtccggccaaactccgcgaaaaatgggatgacctgattatccgcctgtcggcgccgggcacagggcattaccaggctggtggacgggatatcaatcagatcccccgtcccgataacaccgttccgccaggattcagggggtaa

SEQ ID NO: 134273 - DNA, 741 bp, Enterobacter cloacae
atgcaaaacgcaggttctattttcgatcgccttcgccgtgttattccggctggcattgaacccaaatttaaaagcgccgaagagttgatggcctggcagcgtgaggaagggcaaaaacgcgctgcggaggtagacaagctcaaccagcaggcgcgtgcagagaaaattttcgggcgatccgggatccagaacctgcaccgcagctgtagcttcgcgaattacaccgtgaacagcgacgaacagcgtcatgctctgagtatggcaaagagctatgcgcagaattttggctcgggctttgccagttttgtcttcgccggaaaaccgggcaccggcaaaaaccacctttcagcggccatcggcaattatctgctgaagcaggggcgaacggttctgatcgtgacggtgcccgatctgaccctgcgcgcccgggcctgctacgacgaaggacagtccgaagccgcgctgctggatgacctctgcaaagtggatttattggtgcttgatgaagttggtattcagcgagacagccgcggcgagaaagttttattgaaccagattatcgatcgccgtctggcggccatgcggcctgtgggtgtgctgaccaatctgaattacgacgcgctggtagagacccttggcgcaagggttatcgatcgcctgcgcatggacaacggcatttgggtgaattttgactgggagagctatcgcggaaacgttagccacctgagacctgttaagtga

SEQ ID NO: 134274 - DNA, 657 bp, Enterobacter cloacae
atggaatcagtaatcgacgcattgaaagcaatgggcaaagcaacctatctcgatgtagcagcacgcctggatatcgaacccgtagaggctctgaaaatgctgcgcgaacagaaggaggaagggttgtgcgatttctacgatggatcatggtcggtcggtactgcaaaggagcagaagccgaagcgcatcagaccaaagcagttatcaccgctggttgagagagtgctgtcagcaatgcaggggcagggggccatgagctccattcaggtcgctgagaagctgggtaaaagcccgcgagccctgaatgcatcgctgggtgcaatgtgcaaagacggtctggttatgcgccatgtggacgggaaaaatatcacctggagcctggcgggtgaatcgaaaattaaaccagagcagccggatgccgctgcactcgacgtcaagttagcatcagcgccggacaacaaatccctggatgaaattattggggacatcccggcgttcgttagtcgtcctgatgacctgattattccgtcgtcccgttatatctcgaacgagatccgccgcacaaaagcgaagctgtcgaaccttcaacgacttcaggctgccgttcgcgagttgcgtcgccacaaacatcttctggaaggtatgagccatgagtaa

SEQ ID NO: 134275 - DNA, 234 bp, Enterobacter cloacae
atgagcaatttgttatttctcaaatgcatcaaagacactgaaggctggtggactgagggcgaaatgtacccagcccgtgttgttgccggaggttttgttctgatcggggatgatgatgaactggacggagaggaatggagcgccgcgccgatagaataccgtgaagatgggtcagtgctttatcaggtcggcggagttgatggtgatgttttgtttgaggagtcggcacaatga

SEQ ID NO: 134276 - DNA, 324 bp, Enterobacter cloacae
atgggttttccatcaccagcaaaagactatgcagaatcaacgctcaccgtcggcagactttgcggctacgacggtaattgccggactatcgaaacttcagccggctacgcaattataaatgttgccaaaagaccgaaggcgggtgacacggttttgatctctttctgcggaagttgggacttcgcttctgttcagggaaaagcactcatcacacaggatggggaggccatcgaaggcgattcactggatgacgcgaatgtgcttggggtagtgacgttcttcctgaaccgtgtagccgataatgacctcttgccggtgatatga

SEQ ID NO: 134277 - DNA, 168 bp, Enterobacter cloacae
atgaatgagcaagaattaatcgctgccgttcgccctgctggacgttatgaggtagtgagccaggaggatggctcctttattgtgatcccggtgcctgctgaagcaatactcattacccgagaagcactgcgacaatgccttgagcgcttccgcaaccctgacaactga

SEQ ID NO: 134278 - DNA, 297 bp, Enterobacter cloacae
atgaaaaaagcagaccgcatccatcttgcgcgtgtggccgagctcggctgcatcgtttgtaaaaatctaaacctcggcgaaacgcctgcggaaatccaccatatccggacagggcagggcacaagccaacgtgctgatcatcggaaatcaattcccctttgccatacacaccatcgcaatggcggttacggtgtggcgattcatgctggccgccgcgcctgggaaatgaagtacggcactgaagctgagcttctggtgcaggtgctctatctgctgggggagtatgccaatgcataa

SEQ ID NO: 134279 - DNA, 1824 bp, Enterobacter cloacae
atgcataacccagtcagttacggctcagtgtgcagcggcatcgaggccgccagtgtggcgtggcattgtcttggctggcagccagcatggttcgcagagatagagaaattcccctccgctgtgctggcgtttcgctggccggacgtcaccaatctgggtgacatgaccaaaatcgccgcggcaatccgcgccggaaaaattgaagcgcccgatgtactggtggggggaaccccttgccaagcgttcagcgttgcgggtttacgtaatgggctggctgacgaacgcggccagttaactttggcttttgttgaactggtaaatgctatcgatgaaaaacgcacagagcagggaaaaccacccgtcatcgtcgtctgggaaaatgtacccggcgtattcagcagcaaagataatgctttcggatgttttcttggagggcttgccggtgaaagctgctcgctggaatcaccagggaagcgatggtcaaacgctggttatgtgctgggaccagaaagagctattgcctggcgagtgctcgacgctcaatttttcggagtggcccaacgacgcagacgtgtgtttgttgtcgcaacagctcgaggggatatcgatcccgcaaaaattctttttgagtccgaaggcatgcgccggaattctccgccgagcagaaaaacgaggcaaatcgttgccccggatgctggctatcgccttactaacggtagtcactgggatggagaacataatccacatccaacgctgaatcagtcattcaatactggcgggatcggagcgagtaatcaggaattattcagtcagcgcggcagtgggattgttggggcattccgtatgcgagctttcggcgattacgtaagcgacgagacagcatcaacagtaaaagctcgcgatcacaaagatgcgaccgatttagctgtgacttattcagacgtcagcaggacgctgctggcgaaatccaatgacagcatggatgagactcttcaaacctacgctattcatggcactcaggatccagacacgctcgcaaatattgctcacactctgggccgtaatcatgggcaagaaaacgcggttatcgcgttcagctcaaaggattgcggtcatgatgcctcagcagaaatttcgccgaccttaagggctggtaatagcgggggcagcaaccaaaatgctggctcaccacctgcggtggcttattgcattcccggaaactggatcgggcgctccccaaaaaatggcggcaatgcaacagaacctatgcaagatatttcaccatgcctaactgtcgctgatcgtcatggtgtcgcctatgcatttgcagaaaatacacaagcccaagtgaggcttcagaacggggatggacaaattacagggccgctatcaactggtggcggcaagcctgggcagggttatccggctgttgttgcatttcaggagcgcggacgagctgacggtcgacatctggaattaaatggcgaactggcctatgcgcttactgcaccgagtggaggagggcgctcacaggaacgaaatatttttgactctcgaaccatggccgttcgtcgactcaccccagtagagtgcgaacgcttgcagggattccccgataaccacactctaatcccgacacaaaaacgcaagcggatcacggctgaagaatatgcttatctgcgccaccaccaaccagaactgacagcagaacaggcttaccgcctcgctgccgatggcccgcgttataaagcaatcggcaattcaatggctgtaccggttatgcgctggattggttcccgcatagaggaggcgctgcatgcctaa

SEQ ID NO: 134280 - DNA, 357 bp, Enterobacter cloacae
atgcctaaatacatcatcacccctgttggaaaaccccgcatgacacgccgtgataaatggaaacagcggccgccagtgatgcgatatcgcatgttttgtgacgaggcccgcctgcatgacattcaggtgccggagaacggtgcccatatcacttttgttttaccgatgcctaagagctggagtaagacaaaacgcgcagctatggacgggcagccgcaccaggtaaagccagatctggacaatctcacaaaatcgcttctggacgcactgttcgaggatgactcccatatttgggacgcccggacatcaaaagtatggggcgaaaccggcatgataattatcgaggacatgaaatga

SEQ ID NO: 134281 - DNA, 606 bp, Enterobacter cloacae
atgacgccacgccagaaacgccagtatttagaagggctgggtaaaaccgcaatggcaccacgcaagagctggctggggaaaagcattttgcttacagatgttcagtcggggtggattaaatctctacttacggtctggggcgaaaatgttcgcggaggcacagccccggcaaaaccttgcgggcattcatgctggaatgtcctcaggggaaagaactggtctgataaagcgctcgagcgttttaccacagcgttgaaccaggcaagggaagaagggttccgtggtgagcaggcgttgagacgtgctcgttcgatcctgtggcccgaaccgcctgtcagtgtaattgccgaggcgatgaatagcgatgacgccgagtttgtggaaggagctgtgcttcaggcgttcgatatgaaggatccagtttacattgtagggaaccagtattacaccacccgaaaaaaaatctctgatataaccagggatcttcagaatctcgcgccatggctgactgaatcagaggccagaaagcgggtgcgctggtgcctggaaatattcagggcaaaggtttttttgtcagcacggaatgccctgaaagaaatttcatga

SEQ ID NO: 134282 - DNA, 204 bp, Enterobacter cloacae
atgaagatcctctgggctatttgtgttgtattcggggctattggctttgttcaaggtatcgttggggttttcggcgctgtcagcgcgcctcagcaagcagcaggagcagccatgggagttgcctgggcggtaattccttactgtatcgtccgggcgatacagcagatgcgaccgcaggaagtggtgatcaaaaaagaagattga

SEQ ID NO: 134283 - DNA, 228 bp, Enterobacter cloacae
atgttaacagtaaaagtaatctcgccaggtggcggtgaagagattcattgcgggttgagcgtagggtttaatccggggcagcagagcatcgcggtatctggaatggacaaaaatgtattactgaaacctggcgaggtcgcctacgtgatgaaccagaacgggaagacggtatctcgttacgagcatattgcccgtcaggaagtactgcataacgcggtgggatcgtag

SEQ ID NO: 134284 - DNA, 261 bp, Enterobacter cloacae
atggaatcactcatcgccaatcttattgaagagctatccaaagaaggtaaaacacagaagcaggcttatcttcagataagtgccatgagagttgttatttatgcgatgtgtactgggctggatgacataaaacgtcaggccatacacaaccaaatctttgaggcatttgatcagctggaattaactgaccgcacgtcaactgagagtgaagagctgcgtaatgccactttaaaactactgggaacagacattctgcggtaa

SEQ ID NO: 134285 - DNA, 1275 bp, Enterobacter cloacae
atgggaaacgcaatactgtggtatgagatcaagaacatcggtagttttgaggaggaagggggttttgttgaccttaccaccactgctaaggacaaaaaaaaggagttatgggttgatgttgatggccataaagtaaatctgattacagctatcatgggggcgaacggatccggtaaaactacgctgctgaagccaatgtccttcttgagctggtttttttggtctatacccgcaaaagtaacagactatttatatcttaatattaatcgtccgtttgtacatcctgggatgataaaaatctgtttcgtcatggatggaaaagtttatacgtatgttatcgtcgcctgcgatcagtttataattaaagaagaattatatgttaaaaatgaaaataacaagaacatatacgtatttaagaggaagttgaataaaaataattacaaactcgaaattgataaacagaaagaagattttagttctaaggagatagaggcttttttaaaaaaaatatcttatgattatattgaaaaacctgagctatttccattgggtgaattagaaggtaaaagaaccccatctaatacgagtattatttccgcagctcgtagggttaatgtaccattagcagttgaaatagctgatacgatgagcagcactaccaacgttaatgcaatggggcgctacagctacgactacgaagatttaggtgcaacagcagaagacttatatgaagacccagtggcctttaataatgttaaaaacattctaaggaaatgggatctcggtttagacgatataaccattgaaaaagaagaaaaagttgatgtcaatggagagaaggaaacatactatcttctaaatggaattcacattaaggaggatggtactaaatttgctttgccatttgcttttgaatctgcgggtactcagagtgcttttatcagactacataatataatgcaatgcttaaaaaaaggaaatgcttgctttattgatgagcttggagatgatctgcatccacatatggttaaacctatacttgagctatttattagtaaagagacaaaccctttacatgctcaattggtgtttacttgccataaacctgaactaataaattatttagggaagtatcgggtgttaatcactgagaaaaaatataacaaaagcgtttgttatcgcctggatgacttcccatctagcgaagctagagttgacgataatattgctgcaaaatatcttgctggggcttttggaggagtgccagatttatga

SEQ ID NO: 134286 - DNA, 534 bp, Enterobacter cloacae
atgagaaagcccaagcgcatgaaacgcggtgttgaacgaactaagcttctgatgtgtgaaggtattactgataaacgattcgcagaatgtatcaagaggcttcattcttctcgagatgcaggatttagtgtaaaacttgatgaggctggtggaggtggaccaaaatcagctatattagctgcaatcaatcatgcaggaggttttgataaaagagttgtttttatcgactctgacctagtaataccaaaagatgcattagcggctgctaataatcacaatattaagattattcagtcctcaccattatgtctggaagggtttttaatgcggttaatggggcataatcagcagtttataagctcggaagaagcaaagatgtgcttccataaatgttttaaccttgatggcgttgtaactcaggagtggtatgaaaagaacataacgcttcttcatatcaatactatcataggaaatgagaaacatccatgcaaaaaaataatgagcgatttacgtgacgtctttaccgtgttctaa

SEQ ID NO: 134287 - DNA, 1515 bp, Enterobacter cloacae
atgcaacagtctgatccgtatctctctttccgcggcatcggtaaaacgttccccggtgtaaacgcgctgaccgatatcagcttcgactgctatgccggccaggttcacgccctgatgggggagaatggcgcgggaaaatccacgctgctaaaaattctcagcggcaactacacacccaccaccggcacgctggctattcgcggcgaagaggtggcctttgccgacaccacggcagcgttaaatgcgggcgtcgctatcatctatcaggagctgcatctcattcctgaaatgaccgtggcggagaacatctatctgggccagcttccgcataaaagcggcgtggtcaaccgctcgctgctcaactatgaagcgggcttgcagctcaagcaccttgggctggatgtcgatccgcaaacgccccttaagtatctctccatcggccagtggcagatggtggaaattgccaaagcgctggcgcgtaacgccaaaattatcgcttttgacgagccaaccagctcgctctcggcgcgtgaaatagaaaatctctttcgcgtgatccgcgagctgcgcaaagagggccgcatcattctgtacgtttctcaccgaatggaagagatttttgccttaagcgatgccatcaccgtgtttaaagatggccgctacgtgcgcaccttcaccgatatgcagcaggtcaatcatgaccaactggtgcaggcgatggtcggacgcgatctgggggatatttaccactggaaaccgcgcgagtatggcccggagcgtctgcgtctggataacgtcaaagccccgggcgtgcgcacgcccatttcactctcggtgcgcagcggcgaaatcgtcgggctgtttggccttgtgggggcagggcgcagcgagctgatgaaagggctgtttggcggcacccgaataacccagggccaggttttcgtcgacgggaaaaaggtcgatattcagaagcctgcgcaggcgattaacgcggggattatgctctgcccggaggatcgaaaggccgagggcattattccggtgcactcggtgcgcgacaacatcaacatctctgcccggcgcaagttcatccgcgcgggatgtctgattaacgacggctgggaggcgagcaacgcggatcaccatatccgttcgctgaacatcaaaacccccggggctgaacagctgatcatgaacctgtccggcggcaatcagcaaaaagccattctggggcgctggctgtcggaagatatgaaggtcattttgctggatgagccaacgcgcggtatcgacgtgggggcgaaacacgaaatctataacgtcatctatgaactggcaaaacgcggtgtggcggtcctgttcgcctccagcgatctgcctgaggtgctgggcgtcgccgaccgcattgttgtgatgcgtgaaggtgaaattgccggtgaattgctgcatgaacaggcgaatgaacaacaggcgttgagtctcgccatgcctaaagttagccaggctgtcgcctga

SEQ ID NO: 134288 - DNA, 267 bp, Enterobacter cloacae
atgccgaagctgactataagccagccgggggcacgcactgccctgaaagttatcagcgatcgccgtgaccacgcgctaatcgaaaaggtcgcgttactcgttatcgaacacgggcgatgcagggacatgaccgatcaggcgctggcaatgcaggcgattctcgacaccctccgacctgggtggagccgcgagcactttgtcgagacgctgaacggcttacctacttcggttatgggcgaaaaactttttataactaaacgatcttaa

SEQ ID NO: 134289 - DNA, 186 bp, Enterobacter cloacae
atgatcacagctgacgagtggctggcgctgcacgacgtgcaggtctaccacgagggcatgacgttgaccgtaggcgctggcgtactggcaagtgaggcggcgagagagttcgcacgaatatcggggtttactcaccaacagatactcgatgcgctataccgccgcgcgcggagaaaaccagcatga

SEQ ID NO: 134290 - DNA, 294 bp, Enterobacter cloacae
atgggggtgagcgtggctatttatcgcagcaaaaaatggctcgccgccgtcgggcagatcgagcgttgtgttctttgtggagcatgggggacgcaggtggcacaccggaacgaagggaaaggcatgggattaaaaaccgatgattgtgcgacagctgcgctctgcatttgctgtcatgacagcattgataacgggaataagctgaacagggaggagcgtcggcagcttatggaccgcgcgattgttctgacagtgattgaagttgcccgccgcgggctggtggtgcccgcatga

SEQ ID NO: 134291 - DNA, 366 bp, Enterobacter cloacae
atggccggattaaccagagaacagcgcgctcagcgtgacgcggaaaagcttgcagctcagcaggctgctgataataaccctgcccagcaggaacagcagcaggaacagcagcaggaacagcagcaggtacagcagcaggaacagcagcaggaacagcagcaggaacagcagcaggaacagcagcaggaacagcagcaggaacagcagcaggaacagcagcaggaacagcagcaggaacagccagatattgagctggtggtcatggtgcgttatatcccagagttccccggcggtccgctgcgcgctgatgttcaccctgatgaagtggataactggctggcgctggactggcgtctggaggaataa

SEQ ID NO: 134292 - DNA, 243 bp, Enterobacter cloacae
atgagtgaagaaaaacagaagatgattgcaggtgaatattaccgccctggcgatgacacgctgagggctgaccgtttacgcgcgcgtcatcttgttcaccgctataaccataccgcacccgatgagaaggccgaacgtcgcgccttattagctgacctgctgggtcaaagcgaaggtgcctatatagagccaagcttccgctgcgactacgggtataacatctatctgggcaacaatttttaa

SEQ ID NO: 134293 - DNA, 1536 bp, Enterobacter cloacae
atgggtgatgaaagtcagaaaaatcataaaattagagtcgctcagtatctgaggatgtccacagaccatcaacaattctcaatcgacaatcaggctctttatctaaaaaaatatgcagaagatcacaatatggtgattgtagaaacttatgatgatgaaggtaaaagcggagtctccgcttcaggtagaaaaaacttcaacagactaatagaagatgtcgttacaggaagagtaaaaatagaagctgttcttgtttatgatgtcagtcggtttggtcgatggcaagataatgatgaggcagggcattatagttatctactaaaatatcatggggttaggattatttattgtgctgagaacttaccagatgaatcgcctgaaatccaaatgcttacacttcctgctcttagatatgctgctggtgctttcagtaggaatctttcagtaaaagtttttgcgggacacgtaaaccttgttaaaaggggatactatcagggaggaataccaggatatggattaagaagaaagttaattgataataacaatagaccaaaaatgatactttgtcctggtgaaagaaagagcctgcaaactgaccgagtagttcttacccctggtacaaaaaaagaaataaagctggtaaaaaagatatttaatatgtttatttttgatggattaaatgaatatcttatcgcaacaaaactaaacagagaggggtatacatatagtgataaaacagaatggaacaggagcagaatacattcaattctaattaatattcgctacacagggagatacacttataatcgtacttcacagaaattgaacgcccaaagaattcagaatccacaagaagaatggatcgaatatgattcatttttcaagcctataatttcaccagagaaatttagattagctaaagaaatcattgacaatcgttcaaaaaaaatgaccaatgaagaaatacttaattttttgaaaaaagttctcattaaacatggtaaaatttcaggttttattatcgatgaagatgataatggtccgtcgagtagtgtcgtagcaagtcgttttggtgggcttttgaatgcctataaactcatcaattacacaccagaaagagattatcgatttatagaaataaactcagccttaagggttagacatgccgacactattaagacaatatgcaaggaaattacaaatagtgaagtaacaatatctgaaaataaactcattacgatcaataaaagcttaacctttaccataatacttgcacgctgtagaaaaacctctacagataaatgcagatggattgtgagattagacagaagcattaattctgacatcaacataattgtaaggatgaatagccttaatagcgtcccccttgattactatatcctaccttctattgattcatttgaaaataaattaaacctaaaagaaaataacagccttctctttgagatgtatcgattcgacgatatcaacatattttttaaaatgctttcgaccaataaaaaggaagtagcttaa

SEQ ID NO: 134294 - DNA, 873 bp, Enterobacter cloacae
atgaaagatgatcaaatccacatgattaagatatccgacataaaaatagtcatcccacgttcacgaaataaacttcgacattcggaaattactgaaagtatcgacgcaagtggactgagaaagccaataaccgtacgtcgaatcgtggacaaaaagtatcaattcgctttaatttgtggtcaaggaaggctcgaatcattgacagctctaggagaagaattaacaccagcaatcgtacttgatatagatgaaaacaaagcctacataatgagtctggttgaaaatatggcaagagtagttcctcgtgctggtgaacagttccaacgtataaaggaaatgacagagcaaggattaaccaataaggaaatatctaactcgactggattatcattacactggataacaagtctgacaatgcttatcagtaaaggtgaaaataaattattatccgctgtagaatcaggaagcatacctatctcgcttgctgttgagattgcaagagtcgattttgaaggtggtcaggaattgttaattaaagcatttgataaaggtctaataaaacacaaagatgtaggaaaaatacgtgagatacttgactcacgagatgaaggcttgaaaggatacctaaataataactttgggataacaaagaaaaagaaaaaaatgactacagatgaattaaaaaaaatctatcaagataacatttctcagcacagaaagattaaaaacaaagcagaatacgttgagatgaatttgttgatagcaaatcaaatctttaaagaacttgtcaatgatgaagagtttttacggatattagatgaagaaagcctaaatgaagtagtaaatattatagttaaaaacacgaccaattga

SEQ ID NO: 134295 - DNA, 519 bp, Enterobacter cloacae; identical to SEQ ID NO: 120062

SEQ ID NO: 134296 - DNA, 189 bp, Enterobacter cloacae
atggttgccgtaaatatcctcgccggtattatccgtttcaacccagtagacttcgtcatcgcgaacgtgcatccgcagggcgcagcggctaccgcagttcaccgagcaggcgccccagacgactttgtcttctgcgggctgaatagcggtctgcacagcggcggcggcgcttttcagaccaaaaggtaa

SEQ ID NO: 134297 - DNA, 948 bp, Enterobacter cloacae
atggagaatgcaattctggagaaggcgagtgaattgataaaaaaagacatgggcatcaaccccctcgaactgacaagccgagaaaaaacgaaggtggttgatgccctcagagtcacgtttccattagccaatctgttgtgcggcctgaagctggcgcgcagcacatacttctatcaacgcctgcggcagacgcggcccgacaagtacacgcaggtgcgtgaggtcattcggactatcttcgaggacaactaccgctgctatggctatcgacgcattgatagtgccttgcgccttggtggcatgcgtgtgtccgagaaggtcgtgcgtcgcttgatggcgcaagagcgtctggtcgtgagaacaccgcgccgccggcgcttctcggcgtatgctggcgacccgacaccagcggtcccgaatctgctgaatcgcgactttcacgcgtcggcgccgaatacgaaatggttgaccgatctgacggaaatacacattccggcagggaaggtctacgtctcgccgatcgtcgattgcttcgatgggctggtggtggcctggaatatcggcaccagcccggatgcgaacctggtcaataccatgctggatcacgcggtacggacactgcgacccggtgagcatccggttatccattcggacaggggctcgcattatcgctggcctgcgtggatccgccgcactgaaaatgcccaattaacgcggtcgatgtccaaaaagggctgctcgccagacaatgctgcatgcgagggctttttcggacgattgaagaccgaactaatctacccgaggaattggcagcacgtgacgctgaaagacctcatgacgcgaatcgatgcctatatccactggtacaacgagcgccgcatcaaagtgtcgcttggcgggcgtagtcccatcgagtatcgtcatgcggtcggattgatgtccgtataa

SEQ ID NO: 134298 - DNA, 423 bp, Enterobacter cloacae; identical to SEQ ID NO: 10327

SEQ ID NO: 134299 - DNA, 276 bp, Enterobacter cloacae; identical to SEQ ID NO: 10326

SEQ ID NO: 134300 - DNA, 1086 bp, Enterobacter cloacae
gtgaagcgctacctctctcttctgcctgctgttttattgctgctgacggcgtgcgatccgaaacccgaccgcgccgcgcccctgccgaaaatggtaaaagtcgcagaggtggtcaaggccggcaacgcgcagcagcgcgtgtttcccgcccgtattgaatccggcgacgccacggatctcgcgttcaaacgagccgggcagattgagaccctggacattcgccagggtgccgttgtcaaacaggggcaacgactcgccagcctcaacgcccgtgaagcccggcagcgcctgaacgacaggcaaacggcggcgaccctggctcagcggcaattcgaccgcttccagaccctggcgggacgccaggccgtgtcgaaagccgagatggatgtccagcgcgccaaccgcgattcagcaaacgccgcgctacagattgcgcgcgaagaattaagccagatgacgctcgtcgccccctttagcgggacagcggccagcgtccatgtgcgaaatcatcaggtcgtctccgccggccagcccgtcgtcactttgacccgtaccgatctgctggacgtggtgttcagccttccagagaacctgtttaacaccttcgatattcgcaatgcgcagtacaaaccggtagtgaggatcaacgccctgcccggtcgcgagtttaccgctgtgtacaaagagcactcaggcagtagcgacagcaacacattgacctggcaggtgattttaaccatgccccgcccggatgattttcccgtcgtgggcggcgtcagcggaacggtcaccatcaatttaaccaaccttccggctggtgtgggcagtgaggcgctggtagtgccggttgaagcggtctttaacccggataaccgcccgcgcaatgagccacatgtctgggtggtgacgggcgaaggcgatacgttgcaccttgaagatcgtaaggtcagcgtggggcaagtcagcgctgagggggtcgtcatcgtcggtgggcttaaggccggtgaacgcgtggtggccgcaggcgttggggagctacatcccaaccagccggtacgtatctggacgcgtgaacggggactgtaa

SEQ ID NO: 134301 - DNA, 576 bp, Enterobacter cloacae
atgcaacgcctctttcctgcactgtgggtagtcctggttttagtcgtatctccgctgcatgcggagccgaaagtctatggcgaacagcgtattcaccgctggtgggatgcagtaacggacgatattgcgcaaacctgggaacagccggatcgttacgatctctaccttccgtttctgagctggcatgcacgcttcatgtatgacaaagagaaaacggacaactacaacgaaatgccgtggggcggggggctgggcgtgtcccgctacaatgacgagggcaactggagcgcgctctttgccatgatgttcaaagattcacataacgagtggcagcccgcgatgggctacggctgggagaagggctggtatctggataacgcaaaagatttccgtctggggctgggggccgctgcggggatcacggcacgcgacgactttgccaactatgtcccgctgccgtttatcttcccgcttttctctgccggatataagcgcgtcaccgtccagttcacctatattcccggaacctacaacaacggcaacgtgctgtttgcctggctgcgcctgggcttttag

SEQ ID NO: 134302 - DNA, 621 bp, Enterobacter cloacae
atgaataaatttgcaaaagataagaagaagcttcttgtagccatggtgtcatgtgctttgttaagtggttgtgtatcttaccagcgctcggcagctataaattccattcctggagttgagttccagcagaaaaatggtaacgaaatcataaaatcttatgaagtgaagaaggagatcgttaactcctctaaggatgctttaaagtcctgcatccttagtaatgtaaccaataatcaagttcagcttactgatggttctaaaagcttcacaggggcttacacagggaattattacaacgtgcagacctcatctagtgttcagggaggttctgttattcaggctgaaaccgagaaaggaattatcttcgctggtactggtgagtatgtaacccctactatgggtgtaaaaagaacagtccggtttaccagtgaagttgtaccagagggcaaacaagcccagttcatattttctaatatacagcaggtccaaaacgacagtggtgccatatcaaacaatggtttttttgatgttggatcatgggatgctgcaagccccgaagctgtcatagccgttttaaatgagaaggcgaatgcaatctcatcctgtcttgcgaaaaaatag

SEQ ID NO: 134303 - DNA, 186 bp, Enterobacter cloacae; identical to SEQ ID NO: 129314

SEQ ID NO: 134304 - DNA, 693 bp, Enterobacter cloacae
atgcatctcgagccattaacaaagcaagtcggcgtattgaagactatggatgttccagccgactttagaatggaagggtgggtatacgtgttaagcaatccatgtatgcctggcatctacaaaattggaatgaccacaacaagcccggaagttcgagcgcgagagctttcatcagctactggtgttcctgctccattcaaggttgaagcggctttctacagccattctccgctcgatgctgaaaaagagattcacgatgctttgtcggaatggagagtaagcgagtctcgcgaattttttcagcttgatttgaaagaaataattcatgcgtgctcgtgcagctgtgaatgccaggttggtgaaaaagcagaatatatagctatttaccacgacttcatcatttttgagagcctcagcaaaatcaatatacctgaactttttaatgagattgggattagcgtcttcggcgacaagcttgcagctgctgagcgattaattcgaatcggtgcggaaacaattttcaatatccgtagaaaaagcggcgttgttatcgctgtgcacgattcaaatgcgtatgcgatcgaaccggctgatgaacaggcgctaaaagaagccatgaatgaatatcaggctcatagagaagagcttgagagacgtggaatttacggcccagaacaaccagtggagttttaa

SEQ ID NO: 134305 - DNA, 480 bp, Enterobacter cloacae
atggcgacactgaaaggtgaggtcaaagccttcatcgttcagtcccttgcctgcttcgatacaccatcccaggtggttgagctggtcaaaaaagaatttggcctgagcatcacacgtcagcaggtcgaatcacacgacccgacgaaagcaaacggcagggggctggcgcagaaatgggtggacatgttcaatgccacccgcgaacgcttccagaatgaaatctcagacataccgatcgctaacaaggcgtaccgacttcgcgttctcgaccgcatggcaacgcgtgccgagggcatgaagaacctcgcgcttactgccgagattatcgaacaggcggcgaaggaatgcggcgatgcctacaccaataagcacaagtttgaacattccggcccgaatggtggcgccatccagacgatcaccatgagcaaagaggaatacaaatccgcacggcaggagatgatggaggatgacgactgctga

SEQ ID NO: 134306 - DNA, 1479 bp, Enterobacter cloacae
atgacgactgctgagcaaaaggcttttgcccgtaaggttgaatgcgaagaggacgggctttactacgctcgatacttcttcaagcaacgtactggcggcaagatgattgtcgcgccgcaccacaaggtgattcagcagacgctggaccgcgtcattgatggtgagattcagcgcctgatcatcaacgtcccgcctgggtacacgaaaacggagctggctaccatcaacatgatgggccgcggactggcactgaactgccgggctcgctttatgcacctgtcctactcgcacaacctggcgctgctgaactcctcaaccgcgcgcggcatgattaagtcgcaggcctaccagtcaatgtggccgatggcgctgcgcgatgacgctgacagtaaggcgatgtggtggaccgaacacggtggcggcgtctacgcgtcgtcagctgccgggcaggttaccggctttcgtgccggccatatggaaccgggctggcagggcgcgctgattatcgatgacccggttaagccagatgacgcttactcagagatcgtccgcgacggggtaaacaatcgctttaacgagacaattaaatcacgactggcgatcgagacgacgccgatgattgtcatcatgcagcgaatccattaccacgacctgagcggctatctgctgagaggcgggagtggagagaaatggcatcacctgaatctgccggtgattatcgacaatagtcagccatacgcagcgcagtaccctgaaaactcacacgctataccgattgaccacggactgcctgatggctggctgtggccgttcaagcacaatgaatcgcaccgtatatccctgttctctcaccggcgcaccgccgaagcgcagtacatgcagaagcctcgcaggtttaatgctgaaggagccctgtggacagaagttatgatcagcgcggcacgcgaactgcaaattcatcacgataaggttcgcactgtcgtagccattgacccgcaggcaacaaacagcgacgaaagcgatgaaacaggtattgtcgctgccagctcatatggtgctggtgataaaaagcagttctctgtggatggcgattacagcggtaaattttcacctgctggatgggccaagaaagccatatcggcttatgagcaacacgaagctgacgcgatagttattgagacgaaccagggcggagatatggcggaggagacactacgcaacgccgggttcaagggtcgcatcattcgtgtccatgccagcaaaggtaagtatgcccgcgcggagccgatatcggcgctctacgaacaggggcgagtggcaaatcacggcaatctctacgtattggagaaccagctgatggaatacatccccgccaccgcgaagaaatcacctgaccgcctcgatgcgatggtttacgcactgactgaactgaatggatcgcaacctgtggggatgatgattccgaaacgccttcgctaa

SEQ ID NO: 134307 - DNA, 513 bp, Enterobacter cloacae
atgcactatccagccgtatctgtaaacggagtttccgttcgcgttgatgacgaagggcgctacaacctcaatgatcttcacgctgccgcagtggctgagggcaaagccacggaatcacagaggccaagtaacttcatcaaaagtgggcaaattaaaaagtttgcgcaagaactgaccaaagctacaaaaatagcttcggtcaagattatcaagggtggtgctcagcctggtatatgggggttagagttggtggcgattcgctatgccgcatggcttagtgttgaattcgaaataaaagtgtaccaaacctttcagttggtgatccgaaatggcatcagtgccatgtcccgcctgaacaaaattgaccacatcatcaatactgaaaccaagcagatcagccaatgcgccagccagatggccagatggggttccggcggccgcaagcaactactgaacgcagcacgggatcgtgttgctgatgaagttcaaatgtatttgcctggcattatgtag

SEQ ID NO: 134308 - DNA, 1455 bp, Enterobacter cloacae; identical to SEQ ID NO: 104938

SEQ ID NO: 134309 - DNA, 1551 bp, Enterobacter cloacae; identical to SEQ ID NO: 104937

SEQ ID NO: 134310 - DNA, 2367 bp, Enterobacter cloacae; identical to SEQ ID NO: 104936

SEQ ID NO: 134311 - DNA, 435 bp, Enterobacter cloacae; identical to SEQ ID NO: 104935

SEQ ID NO: 134312 - DNA, 300 bp, Enterobacter cloacae; identical to SEQ ID NO: 104948

SEQ ID NO: 134313 - DNA, 231 bp, Enterobacter cloacae
atgggcgcgttcgccgagttcgagcgcgccctgatccgcgagcgtcagcgcgagggtattgcgctcgccaagcaacgcggggcttaccgtggcaggaagaaatccctgtcgtctgagcgtattgccgaactgcgccaacgtgtcgaggctggcgagcaaaagaccaagcttgctcgtgaattcggaatcagtcgcgaaaccctgtatcaatacttgagaacggatcagtaa

SEQ ID NO: 134314 - DNA, 210 bp, Enterobacter cloacae; identical to SEQ ID NO: 103435

SEQ ID NO: 134315 - DNA, 1215 bp, Enterobacter cloacae
atgaagctcaatgccagacaggtcgagactgccaagcctaaagataaaccctataagttagcagatggtgggggcatgtatctggaggtgttccctaacggcaccaaaagctggcgcatgaaataccgtatcgcaggtaaagaaaaacgtgtggtgtttggtgtttacccgaccattaccttagcggatgccagaagcaaaagagatgatgctaaaaagctgctggttaatggcgttgatccgagtgcgtttaagaaagaaagcaaactagcccaaatcgaagaagtaaaaaacacctttcagcaaattgcgctcgaatggcacaacatgaaagtgaagaaatggtctgcgggatatgcctctgacattcttgaagccttcaacaaagatgtcttcccgttcatcggtcaacgtcctgttgcagacatcaagccgttggaattgcttaacgtgctcaaaaagatggaagagcgaggtgcgactgagaaagctaagaaagtacgtcagcggtgtggtgaagtgtttcgctacgccatagttacaggcagagccgagtataaccccgcaccagatctcaccagtgctatgcaggggcatgagtctaaacattatccattcctgaccattgaggagcttccagccttttttaaagcccttgctggctactctggtagtgagttggtagtgttagccgcccgactaatgatcatcactggtgttcgaacgggtgaattacgtggtgcgttatggtctgaaatttatactgataaagggttatgggaaatttctgccgaacgcatgaaaatgcggcgtcctcatattgttccgttatccgtgcaggcattggaaattattgaaaaaatcagggcaatgactggtaattttcatctaatgttccccggtcgtaatgatccaagtaaaacaatgagcgaagccagtatcaatcaggtgtttaagcgaattggctataccggccgcgttacgggtcatggattccgtcataccatgagcaccgttcttcatgaacaaggctacaacaccgcatggattgaaacccagcttgcgcatcttgataagaatgctatccgtggtacctataaccatgcgcaatatcttgatggcagacgtgagatgctgcaatggtatgctgactatatggatagccttgagaatggtggcaatgtgatgcatgggacgtttaatcgacgtgcatag

SEQ ID NO: 134316 - DNA, 342 bp, Enterobacter cloacae
gtgatcggaatactcaagccggtaccggaatggcagtggccggtacgatgccacgaccccaagcggagctacgtgtgggctaactcttactttcttgttcaggaatttcaggaagagaacggcgtcattcgcctgacggtgaacaccaccagtattggcagttcaggtcggtggaaggacggcatcagctgggatgcgttgcaggagataaagtcagcggttggctacggggatcgggatgccgtggagatttacccgcgggattctgatgtggtgaacgtggcgaacatgcgccacctgtggattacgccggagccgattagcttcgcctggcgtaagtaa

SEQ ID NO: 134317 - DNA, 231 bp, Enterobacter cloacae
atgaccaaatacgcgaaactggatagcgaagtgttaagcgctatcggcgctcagccaacctctttttctgaactatttagcccttccgtcagacaggagtgcctcgtcattgctgaagcagaaggaaagcacccgatggacgtcttccgcatccttgaccgccgcctccagtcgctcaggaagcttggtgtcatccagcacgtcaaaggcaaggggtggacacagccatga

SEQ ID NO: 134318 - DNA, 351 bp, Enterobacter cloacae
atgtcatcggtagcgaactggtcatacacagccacggcgaccatctggcgaaagttggaaggtaatgacgaatacggcgatccgcttggctatgccgagcctgagcaaatcctctgcgattacgagggcgggctcagcaagaagttagccagcctgggtgccgaaatcgtcgtgaagaataccgtctggacggagtttgcgctggcggccgcgggtgattatctgctgattggcgtgtctaccgaacccgacccgattgtggccggtgccgacgaggtgaggcaggtcattcgctacgccgacacgttcgagcgccttgcggatgattacgccatcctgactggagtgtag

SEQ ID NO: 134319 - DNA, 498 bp, Enterobacter cloacae
atgccaattatcgactatcccgactggctgccgctggcgcagaaggccagcaaaaacatgacgctcgataccgggttccagaccgatcagccagcggtcggcccggccatatttgagaaccagaccgacgacctgaaagtgacctggtcactgacgtggatcttcactctggctgaggaacgagcattccagcagtggctacgcagtccaaactatctcaaccggggcctgaactggttccggatgaatatcaatctgggtggtagtggcctgcaactccaggagcttcatttcacccagatgccggtgcaaaccagtatcgatggcggagtggtgacctggacgggaaccgttattgccaaccacctgtacaacgccgatgacgagtttgacgacatcattgttgaactgccgccgccgtgggattcgtgtctggatatcgttgtcacgggttatccggacgggcgcgatccggaatcactgccgagagtgccgtaa

SEQ ID NO: 134320 - DNA, 1530 bp, Enterobacter cloacae
atggcaagactgagaacgcggatgagtaaaattaaagaactgttgcgccttaaatttgactgtcacctgcccaacaggaatatctcagcctgtctgaatatcgggtgcagcactgtatctgatgtggtcacccgcttcaggggaagccagctggcgtggcccctgccggaggagatgacggaatcacaactcgaagcgttgctctataccggacgcgccagcgacagccataaacggatgccggacttcccgctatgccatcaggaactgaagcgtaaggggatgaccaaaatcctgctctggcaggaatatcaacgggaagccggtgaaaatgcctacggatacagccagttctgtaacctctatggtgaatggctgaagctacagaagcgcagcatgcgtcagcatcatgtcgccggagagaagctgttcctcgacttctgcgggccgacgatcccggttatcaacccggatacgggcgaggtccggcaggcacagatcttcgtcgccacgctcggagcctcgaactacacctatgttgaagcctgtgaaaaccagcggcaggaaagctggctgatggcccacgtcagggcgttcgagttcttcggcggtgttcctcagcttctggtgccggataacctgaaagcggcagtcagccgcgcagaccgctatgagccggtactgaacgaaaactaccgtaagctggcccggcactacaacacggcggtgatcccggcccgaccgcgcaaaccaaaagataaacccaaagtcgaaaatgccgttctggtcgtggagcgctggatcctgatgcggctgcggcatgaggtgttccatacgctggccgcgctgaatctggccatcagcgagctgctgcaggagctgaatgagcggccgttccgtcggttaccgggttgccggaaaagcctgtacgaacagctggacaaacccgcactgaaggcgctcccgccataccggtatgaatacgttgatatccgccgggcgaaggtcggcccggactatcacgtgctgtacggcaaacatgcgtactccgtccctcatccgctggttggcagccatatcgatatcgaggcaggcgcccgactggttcgcctctatcaccggggagcactggttgcccagcatccgcgggcacagcaacagggcggcttcaccacgcaggcagaacatatgccggaatcacaccgccagcaacgatggagcccggaccggctgctgtcctggggagagagcatcggcagcgcgacccgtgccgtggtggcctggcatctgcaccaccgggcacatccggaacaggcttaccggacctgcctggggctgctcaatctcagtcgcgaatatggtgatgcccggctggagaatgcctgccagcaggcgctgttactggagcgaccatggcggcaggtgatcctgaatctgctgaccaaccaccgggaccggctgaaagacgaagcgccggatgaatcccctgtcgagcacagcaatgtacgcggtgccgggtactaccactga

SEQ ID NO: 134321 - DNA, 744 bp, Enterobacter cloacae
atgcacaataacctgctggaacagatacgggccctgcggctggggcatatgagtaacgcgctggaactgcaatggtcacagcccatgacctacacctcgctgagcttcgaggagcgtctggggctcctgctggagcacgaactgctgcagcgggaggtctcgaaggtcaatcgcctgcgacgacagtcgaagctgaggctggatgcgcagccttcacagcttgactaccggccggaacggggactgaaccggcagttgctggtacagctgctgaccggcgcttatgtccaccgtcatgaaaatgtgctgatcaccgggccaacagggtgcgggaaaacgtatgttgcctgtgccctgggtgagcaggcctgccagcagcatatccaggtggtgtactaccggctgacgcgactgcttgatgacctgaatatcggccatgccgacgggagttaccagaaacagctgctacaactgtcgaaaaaggagctgctgatccttgacgactggggtcttgaaaagctgaacacccggcagtcctcagacctgctggaagtgatggaagacagataccagcggggaagcaccatcatcatcagccagctaccggtgagtgaatggtacaaactggtgggtaacccgacggttgccgatgcgctgatggaccgtcttctgcataacggacatcgtgttgagctcaggggagagtcaatgcgtaaactggcgcaaaccgatcagacgagttaa

SEQ ID NO: 134322 - DNA, 3639 bp, Enterobacter cloacae
atgcgcaggtattggtttgatgatacgttgctgacagcagctcaaattcaacaatgtctggatgacgccattgcttttgccgggccaagatatacttcaatgctggatgtggtgacgaatgctcatgtcggcctggatttctttggtgggactggtgacttttgcgagtggtacgaaacatcattaacaccaatcgttcgagagttccgttcactgaatggatacggacgcaaatcgctggatatactcggcgaaacccgtgctacatccgccacggcattgattgaagaaataattgcctactgtgagagcatgagagataacaatgtcacggccacatcggttacagatctttgcgtcgctctgtcatccctattgacacttttcgctgatgcccgccatgctcaagaagataaattttatgaaaagcatggcaagcatagtgatacagaatcgttccgacagttccacgcagagtatatgtgtgcatttcctgccggagatatggatgcggcgagaaaatgggaagagcaggcgcagcaactgcaaaatttgctgacttctcaggtcattggtgccgcaacagcacattccttactgctggttgggccagcgggtatcggcaaaacccacgcgattgtcagcgcagcattgcgtcgactggaacatggtggtttttccctggtcgtctttggagacgactttggcaaagcagagccctgggaagtgctacacagtaaaatagggctgggtgccgccatcgatcgttcgacattatttgaatgcatacaggcctgcgccgaacatactggcttaccttttgtcatttatatcgatgccttgaacgaaagcccgcgagaagtgcgctggaaggacaagcttcccgaattgctcgctcaatgcaagtcttatccagacatcaaaatctgcgtttcaacccgagatacctatcgcaatcttgtggtcgattcacgctttccagggtttgctttcgaacacatcggtttttcaggacatcaattcgaagcggtacaagctttcgcagcctactatgggctggatgcagagattacaccacttttttcacccgaactcagtaatcctttatttttacacttggcctgtaaaacgctaaagggcgaaggccgtgacagcctggatatttctttgccgggttttacctctctgtttcaaggacatctcaaacattgcgatgttttaattcgagaacgcctccactacgcaaaccctcgcaatctggtaagggctgcaatgatggcactcgcgaataccctgacacatgagttgccgcagaaccgaacctgggaaacctgttgcgaagcactgagcaaaatagtgggaactgagaccacacctgaatcctttttaaatgcattggcacatgaaggcctcattatcctttctgttgtagatgaggataccttcctgatccgtctgggttatcaacgctacggtgacatattccgtgctatcagccttgtggaagctcttgattcggatacagcaaaactagcggagaaaattgcagcgttaacagaagaagatgctggattgctggaagctcttgccgccgtgctgccagagaaaactgctcttgaaattactgctgaagaagtaggattaccatccgaacaagcccataagctgttcatccagtcattggtttggcgctcccgacaaagtgtagtggaagaaattgatgaacacatccatgcagcactgcatacacctggattatgggagtcggtttatgaagcgctgttttcacttagtctggttcctgaccatcgtctaaacgcaactaactggctggggccatttttacggcagtcatccttagctgaacgtgacacctacttgtcattagctgcgctgggatcatttgataacaagactgctgtctattcactcatccatgcagcactatttgctgacataacccattggcctgctgaaagccggaggctggccagtctaacacttgcctggctcacttcgtgtgctgaccgccgaatcagggatttatcctcaaaagggctaagcagaattctggcaaactacccggaaaactgccaaaccgtaatcagtgaatttgcatattgtgatgatgattacgtattagagcgtattagccttgctatctacagtgcatgcttattgtcacgccaacgcagaaatgcgtttatgccagcgctccctggtctattaagcattgcgtccgatagcgagaatattctgctccgggatacggttcagctattagtaaacttgttgaaaacaggagaatttcccacagccgtaacaagccaattacagcattaccagacaaacgtatcattaccatcacgatggcctgtactggcggatgtcaaacccctcctagatctggaacatttaccatcaaacatggtgctctggggagagtccatggccccggatttctggcgttatcaggtggtatcgaagatttccggctttgacttggagagcgccaatatcagccatgaaaacattgcctgttggttaatgcgagaagctcttaatttaggatatcccggttataaccactgcgcgctcaattatgatcgccatatcgggagtcagtatggctcgggacggggtagaaaagggtatgctgaccgactcggtaaaaaatattactggatcgccttacatcgactactgggcattctggccagtaatgttcccgcactggaagacccatattccgactacgaacctacaagtgatcatctatggtcagtcgacgtccgtaaagtcgacctgaccgatgtacgcgacatcaccgcagaaagtgtctatccagtactgatggaagaaacaaattatgcattccctgaccgcaattcagatatcaaaggttgggttcggaccgatgatttgtcaccttatgaagcttgtctgattcgaactgacaaggaaggggaacagtgggtagcgctttcacacagctattgggacgaggataaagcgccgaatgaaaatagctggaattcaccttacctggcagtgcgtgcttattattcaagcgcactcataaatgaaagcatccagaacttcaaacagaaaagtgcgcgcgatattttccaatataatcaggggaatagctgttatcgcggttatcttgctgaatatcctgacagcccagtgtataaacaacttcttaataatgaggaagatagtgaagcatttaattttacagaagtcagtttactacgcggaagcgaatgggaatatgactactcatataccacgcccgagcgccaggataacctcattgcgccatgccagggaatcattcaaaaactcgaacttttatgggattgtcaaagcggttgggttgatcgttctggcaaacttatcgccttccaccataaaggtgtaagacaaagcggacttttcattcatcgttcggcgttgaacgcctacctgttcataacaggtgaagaacttatatatcgccgttttgctaacaggggatattttgatttagctggccgtaacggctcgcaaatagacctgaaaacttggatccagtaccgggcagacaaggcgccagtagttttacgagaagaggaactgccgtttaactgctga

SEQ ID NO: 134323 - DNA, 606 bp, Enterobacter cloacae; identical to SEQ ID NO: 95473

SEQ ID NO: 134324 - DNA, 2478 bp, Enterobacter cloacae
atggcgctggttgagatatcgaactttcccggaacgcctaagctgcgttgcagggtgccaaacggcacccttttttatgactggctggcggccaatgacgctactttacaccgcgatctgctgatcgtccgcaatggtgtgaggctgggcgacgatgatgagctggcgtttgaactgagcgagctggacaacatccagattttcgaccagccgaaaggtattgtcggcgacatcctgagtccgatctttaaagtagttggccaggtattttcgttcctggcaccgaaaccggccattgcaaacagcggcggcaatacggtcgactcgcccaacaatagtttgaccggtcagacaaacaccgcgcgcgtctacaaagccaagccggatatctacggccaaatacgttcgttcccggatctgattcaggaatcggtattcgaatatgtacaccagacttccacggacggcggcctgaagtacgtcactgaatggatgtgcatcgggatcggcaaatacgattacgagtctgtgcgctactcagaatcgagcctgggctctctggccggtgctgaattccagtttttccagccaggagaagttatcccgcagatcgtcgagggatacgggttcgatgacgtcgacgggcaggaggtccccgggcagaacgaagccagcgacttccctatagaaacagcaacggcaaacacggtggtcagcggaacgtattccggcggccagatagcgatgaaaatcgtgaaacaagccgagttcgactatttcatggggctggtgctgccgcacgcggtgaccttcaccatcaatgtgacgtacagcacggcctccggcaacgtgactaccgatgctacattctccggcacgctgatctccgccgttgaaacaaacgacggcgcggttgttaacccggtgcgctggtacacgtttacgatgaaccagctggagggtccgcaggacatcccggcgaatgccacgatcaacaccacgaaattcgtcctcaacgataacgaggcgctggtggttgggccgttcttttccccggtcgagtcaacgcagctgtggctgcatactcagtccagcctcggcgggaagaaagagacaaactggaaggttgtcatctggaaaattgacgatgactacaaccaggttcccggcacacagcagacattcacgtaccggcagacgactccacaccagtcgacgagtgaggtattttatcgcactgacaaaatcacaccgtccggcggtttcgggaaatacgcggtcagcttccagcgcacggataactccggtgacgcgtcactgctgaaggtcgaagagatccacagcattaacatccgtacgaatgtcgtccacccgaccgacacgctggtgcgggtgaaggtgagggcgacagagaacgctctgggcagccgtgagcgcaaatataacgcgctggtgacgcgccacaccatcacttacgacctcgacacgcaaacggtggattacacgctgcggccgtcgcgctcgttcgctgatgcggtggcgcatacctggttgattatgggtgaacaaccggtaagcagtattgacctgtacggtctgtactctattgctgagagcctgcctgatgaacggctgggctacttcgactacacgttcgacgacgagaacgactcgcttggcgaccgggtgcaggcgatctgcaatgcggcgtcggtggtggcgtactgggatgacggcgtgctgaccttcactcgcgaccagaaggttgactatccggctgccgtattcaaccgggccaacatgaagacggacgagtacaaaatgacgtacgaagccacgttgcctggtggttatgacggtgtgcaggtttcctacgttcacccgaccacgaacaacaagacgtacatcaactaccgcgtgctgaacggtgccatcgttgagcaggaagcggaaaacccaaacaagctggagatcgtcggcttccgtaatgagtatcaggcccgggagcgagcattacgcgaaaccaagcgcctgatctactcgcgcgtgaagatgaacgccaaggtgtttgaggacggcattatccaggtgggtagcgtcatccagatgccagacatctacgacagcaaccagcaacagggttacatcaccgggcgcgccggtaataactttgataccagcgagccgatcacgtttaccggttcgatgtatgtgctggtgacagacagccttggtaacccgacgctgcgctatccagcggaggcgcgtggcgacacgaagtacggattcaccgcagcaatacccgatattcagctcaacatctggaacggagacactgtgcagctaccttcgcgctatctcattgcgacggttgaggagctggacagtcagctatggacggttaatagcatcaaaccgaacaccgataacacggtatctcttaccgtcgcggaatacagcgacgctatctacgaataa

SEQ ID NO: 134325 - DNA, 309 bp, Enterobacter cloacae
atgccacgcacagcagacattcatgccgcacccgttgcgcatgcagagcctttccttcctccttctgcaagcattgtcgaaacgcaggaaggctatgatgtcgttgataaggcagctctaatcagacggggagaaacattgctcatctggttttgcggacgccagcaacatgcgtactgggccggtgatgcactgatcactgatgatggtgaagccattgaaggcgaggcgctggatgacgttcgccttgttggcgtggtcacgcataccattagcccggtatgggtagacgacaatccggtgatgtga

SEQ ID NO: 134326 - DNA, 1206 bp, Enterobacter cloacae
atgtcatatcaaataaaaaaatttgtgatgagcaatggcgaacgaggatgtttggttctcgataaagaaacacagttgcctgtttattatcaaaatctctatcttacaaccaatgtcaggaataaaagtgcgaccgcatcaacgatggagatagttgcaacaaacttactaatactaagcaatttcctcaaaagcaggaaaataaatataattgataggattgaaattaaggagttcctaagtgtagcagaagtggatgacctgatccgttatgcaaggcagagatttgataagcaaaagattacaaatgtaagattaataaaagggtatcagattgcaagaagaactttcggctatagaattcatgttttttcgagctatcttaattggctgtgcggtttacttcattctattaagggaattcatgctagatatgaagtcgagagtttcatcgaaagtattagagcacatctcccgcgaaataaatcacttagcgtgaataacagaaaagataaatctctaagcgaagaacaaataaagacactatttaagctattggaagtcgaaggaagccaaaatccttttcagaaggatgttcaagtgagaaacagactcatttttaccttactattgaattgtggtttaagagcaggagagctattaaatctaaaagttaatgatttaaatcctagggattacacactaagtattttcagaagacatgattgcattgaagatcgaaggctgaatcaacctttagtcaaaactggtgaaagggaaattccattgtcggacgagttagcattggagattttggattacataaataactatagaaataaatacaccaaaaagaagaagcataacttcctgtttgttacacacagttcatgtaaaacagttggagaacctttgtctgtttcagcatatgaaaagataatttcgactattaaaaaatctagcccggaattaaagaatttatcaggtcataaattgagacattcttggaactatttctattcaagtgaaattgatgattcgaatttagatatcagccgaaaatcaggtttaaggtgctatctcatggggtggtcaaaagattcaaagatgtcagaaaattataacttcaaacacatatcaatgaaagaaaaggaagttattggaagagtttatgactctttgaggaaaataactaaaggggaatga

SEQ ID NO: 134327 - DNA, 1314 bp, Enterobacter cloacae
atgaaaacaagcactttaaaaaaagagaatgtagtttttgcaatgatgaaggggtatgggttcaggatttcagataataaatggcaattagatataaataattgtgtttgcccacataaggttgccgataaaatgccagagtcgatgcgtgttggttatcttaataccttggcatatttttcgtctgaatatagtgcaggctacataaagaatataaatcacatctttagccaatggctaagattgatggatcttgaaatgattaattccaaagcggtttatcaatttaatgttagcttaggccctgagaaaaactataagttaaattcaataaagaattttcttagtaaatggaaaaaactcggttatgaaggagttgataactcagctctaagaatgctggaaaaaataaccattaaacctaatttaacaggggaagccgttaaacgaagagatccgaatagtggaccactaacggaagaagagctgaaaatcatacttgaaagtatcaggaaattgttgaaagaagataaaatccctctgtttatgtattgctacgttattctattagcaacaacgggaaggaggccatcacagctaacttcgttgaaagcgaaagatctcatcagaacggaagagggttgttttctaaatataccgaaagtaaaacaaaggaagaacttcagaagtgagttcagcatgatgagaatcgacgatagcctgtatgaggaacttataaccttgattgacctgaaccagaaacatatcgaagatagggtcaagaggaatattagtcatttaaaaaatgaattacctatactcatggacattaaacaatatgtattaattgatactggacaaagtttagataccatcatgacaactgattttttacatatgaagaattcttttatctcaaacagactaaataatttgactactaaattcaacattggctcatcaagtaataacggccctatacggattaatgcaagacgatttaggtataccctgggaactcgtttagcaaaggaaggtgcatcagttgaagtaatagctaaagcattagaccataaatctataaactcatcagggatatacgtaaaaaattgtccagacaatgttcatgatatagacaagatgcttaatcctttttttgaaccgctatcaaagatatttcttggagaagaacagtcaaaaaacaagaagctctttactgaatatattttaaattcgttcggattttttaatgataaaaatgaccaaattgaatgtttcacttgtaaaaactttagagcctggagttcccaatga

SEQ ID NO: 134328 - DNA, 1632 bp, Enterobacter cloacae
atgaccaatatcatactattcgagccagccaatgctaataatccgagtttaaatgttgatgaatttattgaattttgtaagagtaatattttcaactcgaagttagcgatttcatggaaaagcaatgtatggaagagatattatagattcaataaatttgacatgaataataatcgaaatagcaaagatagattagatggtagtttcattgatttcgctaaagcttatatgtttcatattcactcgtttaacaggtcaaagtcaaaccaaaatactttgtcaatgttgaaaattattgagtttgttttattgaaattatacggagaagctaatattattaagtgcaataatatcatatttgatgaatgtgcaaggttagcatctgccaaatattcaaaagtacaagcagttggaattggtaaagaacttgagaaactatgttcattcttaacaggaaacagaatgacgacttcatcatactttttctgggtaaatccattaagacataaaataactcagagctggaaaggttatgaaccttcactcgaaggacactcaaaactaccagacataaaatccgtaatagctattgctgagattttctcaaaagatgaaagccaattgtctacaagggacattttcactacttctgttcttgcactactcatgtgtgctccaggaagaatttcagaaattttaagtcttccagcggattgtgagattattgaaaaagatgacaaaggcattgaacgatatggtttaagatttttttcagcaaagggttatgctggggatatcaaatggattcctacagtaatggtccctatagctcaaaaggcgatagcccgattaaaaaaactgtccagcaatgcaaggtttgcctcaaggacaatggaaggccaaggcactgatccatccaaatttgcactcgttaccacaaagcctcagaattttccttggtatgatgaagaaaaaagaattaaatattcaaatgctttatgtcttttatttgacaggcaactgtgtcagaagacaagaaaagattttacatcttttttcaaacccacggctgagttttttaggatggatattaatgcttttgcaagtattaaaggcacaacaaacctgttcaaaagacacggctatatcaatgaggatggtattccatattctattagaactcatcaattaaggcatctgctgaatactttttctcaaattaatggcatggatgagttcagcatcgctcgatggtctggaagaaagttggtctcacaaaatgtttcctatgatcaccgatcacacttacaaatgactaagctcataagagaaaaaacgacaatcgaggcaagtaataggcatagaaaaaaagaaatagctatcatggatataactgatttcgattcattgaatgatggagctgtgctcgttactaagcacggttactgcaagcactcatatgcttttgacatatgtggttattatccaatacaagactctggaaaggatgatgaccgactattggtaattcataataaaattattgaaaaaacgtatcatgataaaaatgatgggaatgtcaatgctgaaaaatggtatgagtttcaaaataaaattataaaaggagagtag

SEQ ID NO: 134329 - DNA, 405 bp, Enterobacter cloacae
atggctaaacatattactggttatgatgaaaaaagcataataaatgttataaataactggaataaagatgagaagctaacctgggatgctttatgcgacaagttagtaaagatcattggtaagagaccttcaagacaatctttaagtagtcatgtcaaggtttcggattgttttaattcaaaaaagaagattctcaagcttggtattaaaaaaacatgttctattaaacctgccaatttagaaatcgcttgtcagagaataaaaaggctcgaaactgaaaacgaagctttgatagcattaaataacagatatttagagcagttcaagatatggctttataattctcatttgaagcaaataactgttgaagagcttaatagacccttacctgtaaaagatatttaa

SEQ ID NO: 134330 - DNA, 414 bp, Enterobacter cloacae
atgaaaaaaataaatattaatctcatggaaaggtatcttcttctgcttgatcgattcgttgataaacttacggaatcaggctttgaagaacaggaaattatagagcaatcatatctgttttgtgccgggttttacattaaataccagcctgaaatagaaaagctaactttttcaaacagggaggtcgttttaacctttctgctactttcatattatagtcgtataaataaactggatgataatttgatcaacaaagagcgtatgaagcatgtatgttcttcattgattaactttatagtcagtaatggtagccgaacagagaaagtctatgctaatgagaaaaagaaatatgaggcttcgaccctaaaaagaggattatccatcaaagagaagaaaagaaaatatggattgtga

SEQ ID NO: 134331 - DNA, 666 bp, Enterobacter cloacae
atgagtatctccaccacgaaacaccgcaatgaagaagtcaacgttagtctttctgatcgtcggaaagcagagattacggcccccaggtttgaactttttggtgaaacttacacgtttgttgagactttctctggcactgtcattgattcaaacccaggcaataaccagatctgggtaaaaagcaacgctggggatgagaagcagattcccgactacggtatcccgttcagaagttcacacactatccataaatacgagcttcgtcagtatggtaaaaatagctcatgttatgttcataataatgccctaattattaataagaacacaggtgaaaacgaggtaaacttaaaaaggaaaaccattattatccccgcttttctgacaatgctatttcataatgcttcgacgacatctttcttcagagcaatgcctgttccgaagtggttttatattctcttcactttgctctgcatggcttcattcattgcattttgttcattgctcgtaggattcaaagacggatatgtgtgggatgagcacaagtatatgtggtttacatatttcctctcaaggatcggaagtttcgtttgtattaaatggattaaaagaagaagcgagaggtttgatcatgaactcagaaatcttatcgatttagtaaaaagctaa

SEQ ID NO: 134332 - DNA, 2133 bp, Enterobacter cloacae
atgccgttggcgacccggttaaactcaatcagcgttacgccaaacttctcagcgatttcgctaccggttaaccaggcgctcctggagtacaacgaggcgatcaacaaaataccgaaagccatcagcgacgcatcaagttctctactgtctttcggtgataaagcgttgtcggcgttctctggcggctatgcatcggtagatggatttaatgaccgtctggctactctggaaattaccaccgataactatgccgaggcagttaagcaggcatacggcgcaggtcaggcgttccaggctactgcgaacagcatcggcaataccgttggagccgtagcggacaagttcggcatcaccgagcagaaagcatttgagctgagcaagcagctttcagatattgccaaaaacccatcgccagaggctttacagcgtttagctacagagttgcagaacacgcagagctctactgaaaaggggcaaactgcgctcacagcgttcgttggtaagttggtagaactttcacgtgaggcggtaatcgccaaagggaacgtcgcggcgctcaagcaagagaccgacaacttaacaagcggccagaagaacctgatcaagcagtctgagcgtaatttggcactttctaagttgcagggtgaggctcgcgcgcggttgcaggcacaatacgctgccgaagatgcaggttttgcgaaggatgatccgcatgccaagcaaatggaggatgacgctgccgctacgtacaaaaatacgcaggcgcagaagacacttcagtccgagcagaagaaaggcgcttcccaggctgattctattgctcagaaactggcaaacctgaaacagcagtcagaacttgctgccgactcaacaaacaagctgagccgcgaacaagcgatcctgaatgctcagcagtcacttggtaaaggcgccacgaaggagcagatcgcgctggctgggcagtacgccgcaacaaaatgggacactgccaacgccattaaggcgcaggccgcggccgagaaactcctgccagaagctcgcgaaaacgccagctataagcaggatgttaaggatctgaataccgcactggctgcgaagaaaatcagtcaggagcagttcaatcagacatccgagcggctggaggccactcaccaggcaaacctcgcaaaaatccgcgcccagcaggcggtgacgccacagcaggatgcagtcggtggagttgatcctgttcagcaactggctaacgagaatgctcgcaagctagcactcattcaggcattcgagcagcaggggcttatcactcatcagaatgcgctcatgctgcgcgctacagctgacagagagtacgagcaggctcgcatcgctgcccaatgggagatcttccgtaatcagagcgcaggcaatgaagcgttggcggcgtcatttgatgcactggctggtaatgcgtccaacgccttaaccggcatcattaccggtagcatgtcagcttccgatgctctgcgctcgatcgggaacaccgtcctgaacagcctcataaacaccttcgttcagatgggcgttgagtgggtgaagtcggccatcatgggacagacggccaccacggctgcggttgcagcgtccactacggcacaggcggcaggcattgccaccacgaccgcgacatctaccgcggcggcagcggctactactgcggcatggactccggcggccatcatgtcctccgtggcttcattcggtggcgctgttgctattggtcttggcgcgatggctggcatcctggcactgtcaggcaaacgcaaaaacggcggccctgtatcggctggcgggatgtatcaggtcggcgaaggcgggatgcctgagatttaccaggccagtaccggaaagcagtacatgataccgggcgacaacggcaaggtaattagcaacaaggatatgcagagcgggagtggtgtaataatcaacaatatcgtgcagaattacacctctgctactgttgattctcagggaactgtgaactcagatggtagtattaccctgactacgattatcgcggatttgaataatggaggcccgataagtcagggtataaccagcaacttcaacgttaaaagaaccccgaacggtcagggataa

SEQ ID NO: 134333 - DNA, 168 bp, Enterobacter cloacae
atgaaagcatggtcactcgaagagctggcgctgctgtggcgacactcaaacgctgaagtcgcagatattaccggccgcagcattgaagaggtcggagataagcggctgcaaaccaatattgagcgtaatggctgggatgttaacgatccggagcgggaggcggcatga

SEQ ID NO: 134334 - DNA, 192 bp, Enterobacter cloacae
atggctcaggttcattttgacacgcaatcaatacaagagagttatggctcaaatagcttgaaactgacaattctcatttctcacattaaaaaacttcttgagaaccctaaaatatttcactggctccttaggaacaaaaatgaataccttaatgaactgactaaaatctctgacattgataaattaaattga

SEQ ID NO: 134335 - DNA, 1605 bp, Enterobacter cloacae
atgaagattaaactctcaatatataaagcaaaaagattcaatgatgatattgaaaaagttttgaatttggagagagtgagaaatccgattgagttcaacatagatgaggctagggtgtatttgtatgcaaaacaattcttagatcccaagcctcctgagtggacaactttatttacaagccaaaagccagaattggatcataatttcttcgggaaaaatagtagcactggtgcagtcttggttgttgaaatgaataactcaagatatctaattcctttcgggacagggcatcacttaattaatgataatagtattgtcaaaggttttggtcttaaaactacacttaattgtattgaacataacaaaattcgtagtttggataaaggcagccataatgaaacaaatctattaactcgtagtcaaagtagtaaagaggttgatatttttaaccttaaaattgattccgagatggatatacttaccactctgacagggacttccactgaagatgttttaggtaataaaataacgggtaaagatgcatttgtaattatgcctgatattgacctgaaatccatcccggagttgttaaataaaatagactccatttattcgcagcctctccctgaagagtttgaatgggttaataatataaaagaggcagatgaagcagaagttgagatacttgattcaattctggtcgatttaataaaagcaaaagattttaatgacatatggctgggtgaacctgaaattgtagattgggagaatcagataggctattgttttgagaagcggcaaagaagcatgatttatgaaagtttgtcggttagtcatatttgtgagtattttgaaagtaaaaagattgaaattactttaaatgatctcaaaggaagcagtttgcatgttttagatgcagattatcagtctttaaaaaaatggtctctttatagatgtctgtatgctgagataaaggaaggtgatcaaaactatatcctgagagattcaatttggtacgtggctgatagaaagtttgtttccaccattgataatgaaattaaacgaattaagctgtatgaggaagccgacaaattcccgatttattcttataaaagagaagagcaatacaataaagaaacttgtcttgctgatcaaagctttactcatatggatcaaaagttcatatatcatggtggtgggcgaagtaaaattgaattttgcgatattattagaggtgcaactgattttattcatgtgaaatattatagcggtgcgcaaagcatgagccatctattttcacaaggatttataagctctgaacttttcataagcgattctgaatttcgatggaagcttaatgaaaaattgccagcgcatataaaattagctgaccatacattaaggccagaggctcagaaatacaaaatagttttcgcgattgccacaagtaaaaacctcccagatgacttgcctttgttttctaagataaatttgaagaattttaataaaactatttctaatttcggatacgaagttaggatctgcaagatagatgtagaccccacaatttataaaaagaaaatttgtaaaccccaaaaaaaataa

SEQ ID NO: 134336 - DNA, 636 bp, Enterobacter cloacae
atgaaaaaatttaattttgctgctctacttccgggatttttagcactcaataattctgtatgggcaagtgattcatctaccggagcaagtgatttgcctggtatgactcttaatgaacatgatttagtgatcgcaccacttaacaccgaagttccattctacattgcagggcatcgcagtcatagctcccatcggagccatagttctcaccgttcatcatcaggtggcgggtactatggtggcagcactccttattatccaaaaacatacagctcaccaagttcatctgggtcttcaagttcaggaacaagttcctcatcgtcctcttcctctgtgcgttcgcttcgttctaacgacaatattaactctactactacgaattcagttggaactacagaagctaaccgtgcaagtaatgagcttacttctggtacagagaagcgtaagcgcttaatcatgcgggttcaattcgctttgctggacaacggttattacaacgggaatattgacggcataatggggccctccacaaggcagtctataaaaaattaccgaattgcgaagggactaccaacgcctgcaactgaaacactggatactcaattattgaactcgttaaatattctggcccgctaa

SEQ ID NO: 134337 - DNA, 1569 bp, Enterobacter cloacae
gtgaaaaatagcgaacttaaaacaaccttagttgagatcttcaaacaacgcagcgctggtccctttctttttgtagggtcgggtttttcaagaagatatgttggtctacctgattgggcctctctgctatctattttctgtgcatcaaaaaaacctttcgaatattatctgtcaataggtgatggtacttatcctactgccgcacggctcattgcagaggatttcaataatgagtggtggacagatgaactatattcttcaagtcgtgataagtttagtaagaaggttacggataaaacctctgctatgcgatttgagatatgtgatattttgactaaagcaattcaaaagccttttaatgaaagccagtatttacaggaaataaatctactatctaaccttaatgtagacgggttaataacaacaaattgggattgttttttagagcaacttttccctgactataaagtctatactggtcagaatgagttgcttttttctaacccccaatctattgccgaaatatataagatacatggtagcgcacataaacccaaatcattagttttaactgactatgattatgcggattttaatttaaaaaatccttatcttgcagcaaaactgataacgatttttgtcgagcaccctgtagtatttcttggttattctctttctgataaaaatattagtgatttacttagtgcaatttctgtatgtattggcagcgagaacctacatcaacttagaaataatttgatatttgttcagcgtgaagaaggtatcgacgaaccaactgtctctgatacttatactacgattgatggtgtgcagattcctattacgttaatccgaacggatgattttttaccaatttatgaggccatagacgaaaataaaaggaaaatacctgcaagaatactaaggtattgtaaggaagaactttataatttagttcaatctaatgaacctgagaaaaagatctatgtagtagatattgatgaggtcgaaaaacatgaagatgttgaatttgttgttggtgtgggagtggcagccgcaaagaaaaaagaagacgaagtagggatgatcgggtacacgcaaataaaaaatttggatttattcgaagatttgttgagggataataaacgttataacgccagtagtatcattgaaaacgttatccctaatgcaggcaagcactctccaaatatccccatctttaaatatttaaaagaaataggcattacaaatttagatgaatacaaaaggtcatcattaaaacttgataaatgggttttaagatttgacaaaaattatcaatgctctaattattttagatcatatgttagaaagttcaaaggtaaggatgctaaatatataattgaacattgtacccctgaatctgctgcaatctatcttccgttcctctgggataaacttgatcacgatgttacttatgagtttcttttaggtaatattgaaaaaataaaccctgataattcaagttatgcaacatattttaaaaaattggcttgcttgtatgacagattaaagtatggctggttatag

SEQ ID NO: 134338 - DNA, 615 bp, Enterobacter cloacae
atgaaaataaaagatgtcagcaaagaaaaatgccaaccaaacggtgaaagcgttccccaccatgttggaatagctcagttgaaaggaaaaatagaaggcattgaattaaaatgcgatattgaaataacgttaaaagatgctattaaaagtaaatctgatatatcaaagcttccaaggaaaataacccaatggcaaatgtgtttgtacttttacttgccatttataactcttctgacagcaataatgattgacttaatttttgactctaactttcattttatcctttttctgacacctattattttcggtttaatacttaatactatggttgttaaaagcggcacagttgatttagattactttaaaaagttcgtcgatacaattacttttgcttcatctggattgactgcatgtatacttatatttaaaactattgattctgaaaatccttacatagaaagaatatatgagctacataatgggaacttaatttctcaatttttctttgcagctatctttacgcttgtatattcaataattactacattcgctatatctgccgttctgaaatttcttatttctttacgtgatttaagaaactataaagacaaataa

SEQ ID NO: 134339 - DNA, 228 bp, Enterobacter cloacae
atgaaaaaaataaatttccaaatgatgaattatttaatattctctgtgttagtattaattagtgccatgtcctttctttacgtatatttcagacatagcgaatgggaaggggtattatcaattttaaccagttttagtgggtgtgcaattggtggctggttagcattcacaatgatttttttaccaacattctcttcctttaaaatttttgaaataaaaggcaggtaa

SEQ ID NO: 134340 - DNA, 414 bp, Enterobacter cloacae
atggtcgaaaataatacttttaataagatcgttgtgagtatgcattcccgtaatagaagcgttaacgaagcgaagctctcacacaaccagcttcgttctcattgcgtcagtgtcagattaaatgatgaagagctaacgcttctcaatgagagacgtggccgtcatcgtaaaggcgagtggcttcgcttatctttacttaataaacttcctgctgtcgttccagctatcaatattgaagcctggaaaatccttggtgagatttcgcagaagctgaacaaacttgtcgctcatctggataacaaaagccagggaagctctctgacgcaaacagaactattcgcagtgaagcgccagatctctgagcttcgcataaatcttgttggtgcagatctatggggagaaagaaatgaatga

SEQ ID NO: 134341 - DNA, 1023 bp, Enterobacter cloacae
atgaaagggatgcaaaaaatcaaaagaggaaaaacctttaacgggctaatttcttatttattaaaacccgcttcgcaccataaatcagctccatatgtgatcggcggcaatgtcatagaaagcttcgcagaagcgttaagtgcagagttcaacacaacgaagcttctacgttctgatgtcagtaaacccgtatggcataattctttgcgtcttcctgcgggtgagcatctaactactgaacaatgggttgaggtcgcagatgactacatgaagcgtatgggcttctctgagacgcatctacgagcttatatacttcatgacgataaggccggtcagcacatccatatcatcgccagtcgcatcgaactcagttcggggaagctctaccttggaaaaaatgaaaatctcatcagcacccgcatcatccagcagctagaactcgactattcactgaccagaaccaagggtaagggtctggaattcttagtatcaccatccacagcttcgccctcacctgaaccgaaacgcaaaaaatcacgtaatgaagcgatgatggagaaaaggactggtgagctatgccctaaaaccatcatccagaacgctctggaagtattccttgccgataaaccgtcaaccactgagtttgtgcatcagcttaacgcacaaaacatcagagcaatcccgaacatcgcttctactggacgcatgaacggcttctcattcgaatacaacgggattgctttcaaagcatctcagcttggcaaaagctattcctggacagctttacaggacaaactcgattatcagccggaacgcgataatgctttcctgtttaaactgagagcatctgtcagtgaagcgccttgtatgttcatgactcctgatgctcctgaaatcacaacagcagccgttaacagccccatagaagcgcttatccatgataaccataaccgtgctggtcaggacgaatacactaacgctttgaatcgccacgggtttaacagacacctcagagtcatttaa

SEQ ID NO: 134342 - DNA, 657 bp, Enterobacter cloacae; identical to SEQ ID NO: 9983

SEQ ID NO: 134343 - DNA, 510 bp, Enterobacter cloacae; identical to SEQ ID NO: 9982

SEQ ID NO: 134344 - DNA, 264 bp, Enterobacter cloacae
atgactatccctgcactgggtctgggcactttccgcctgaaagacgacgttgttatcgcatctgttaaaaccgcactcgagttgggctatcgtgctattgatacggcgcagatttatgataacgaagctgccgtaggccaggccatcgaagagagtggcgtaccgcgcgacgaacttttcatcaccactaaaatctggattgagaatctcagccaagacaagctgatcccaagcctgaaggaaagtctgaatcgccacggataa

SEQ ID NO: 134345 - DNA, 267 bp, Enterobacter cloacae
gtgaagttagggcgtctgtcgtctgacatcaaagcgctgatgaaacagtggaagggtgcggccaggctgactgccatcacggccacgcggcagatcttcgacagcggcgatgtgtcggtgccgattaagtcgtggcagctctacgtcaagacggtggatattgatgccgacgccgcatcggtcactctgtctgttaccaacccgctaaacaacaacatcggaaggctctatgacccaacggaatacacgggacttcagtacctctga

SEQ ID NO: 134346 - DNA, 390 bp, Enterobacter cloacae
atgggaaacgcaatactgtggtatgagatcaagaacatcggtagttttgaggaggaagggggttttgttgaccttaccaccactgctaaggacaaaaaaaaggagttatgggttgatgttgatggccataaagtaaatctgattacagctatcatgggggcgaacggatccggtaaaactacgctgctgaagccaatgtccttcttgagctggtttttttggtctatacccgcaaaagtaacagactatttatatcttaatattaatcgtccgtttgtacatcctgggatgataaaaatctgtttcgtcatggatggaaaagtttatacgtatgttatcgtcgcctgcgatcagtttataattaaagaagaattatatatacgtatttaa

SEQ ID NO: 134347 - DNA, 1266 bp, Enterobacter cloacae
atgattcagcatgagaaagaagatttcgttggattctctggataccctgcagagagagggctttatgatacgctcatacaccaaactggcttacaccgtaaaaataaagatggagagttatcgtttctttctccggaaaaaggctcagctagtaatttgaatggtttgtgggatgcaacacaagctttattcaccgatgttgatagcaaaatttcgatagataaaatttatgagttttggtcattacctcctttcggcattaaacaagggttattaccagtcattttaattgcatttgtattagctcataaatctacggttgcaatatataaagatggcatgtttatgccatatcttgaagatgtagatatggacgagtgtttacaagcaccagctcggttctcattgcgatgggttgctctcgataagaacaagaacgagattttagaaggtatatcaagcctattgagtgaagtatgtgaaaataggactagcatcgaccctcttgatgcagcaagaggcttggttggcatggtttataacttacctgattggactagaaaaacacagaaaattagctctgttgcaaaatctgttcgcgatatgcttttgaaagctaatgatccacacaaggtactttttgttgatttggtcaccttactcaaggtttcggatggaaaaagttatatagaagttttaaggccaataattaaagaattattgtatgcctatgaaaaacagttatcaaaagtaaaagagaaacttttcttggccttagatgttaaccctaatgatatccagtctctcaagattagggctagtgctgtatctggtattttaggggatataagactagatgcctttgctggacgtttagccaattttgagaatgatgtagtatctatcgaaggtttggttagttttgctgttgagacgccaccaaaagggtgggttgatcgtcatattgatgctgcaatattagagctaagtaaattagctcgacgttttcgagaggcagaagcatttgcatctgtccaagggagagaatcacatagtgaagcaattgcattggttctgggaaccggttccgaaactgtaactgtttctcgttccttcgcaatttcggaacaccatcaggacactataaaatcaaaatttaaagagattgtttcaatattacaaaaccagaatctaaacactgaggtagctttggctattattgccaaggttggaatggagcttgttgtcagtgaaaagggggagtag

SEQ ID NO: 134348 - DNA, 207 bp, Enterobacter cloacae
atgaatcagccatgcacacgtcttatccgcctgtcagaagtgatgaataaaaccggatttggtaaggcttggatttatcgtcttatcagccaaaatcggtttccacagcctgtaaagatcggtattcgtgctattgcttttatcgaaagcgaaatcgatgaatggattcaattaactatagagaattcaagaaagcatgttgcttaa

SEQ ID NO: 134349 - DNA, 867 bp, Enterobacter cloacae
atggcaatcatgagaaactggtcaacggaacacaccaaagaagttaaaaaatggttggatatcaatacctatcgaggatttgaagatctgactctcatacagctttaccatgagctgcttgcaaggacactgttctttaagccttatcatgaggaattcgaagcgaaagccgtgaacctctatattgaccgaattttcagcggaaaaccgtttcttattacagagcaacatctcggatacctcacgagagaggacaccctttaccaacccccacatttctttttgaccacgacagaacggctggctcagctcagcatcgttggattacggaattcattatttttctgggatggaagtgatgagtactcggttaaccgtgaatttctcgatagccctgtatccgaagctctccctaagctgttcagagatactgtcatggtcgaaatagaccttgcgaatggaactgatgaggaaatagctgaatctttgaaagccgcgctacctcaatggcgtaaagtacggggcattgaagccgatacatctgattcgatcaggtttggctatggaaccatcaagaaaatcatcaactacagactcatacccatgattgacatccttgtatggtctactctgcacaaggttcgcatatcagaagatcgactttcacgcctcctttacaccgacgatgatgatgaagaacagacccgcctcaatcaccaaattcgggacacagacagaccactggcgataaaagcagccagtatacctttcatccgtcagttccatctgttcatcaacaaaaacagtcatctcaaaaacatcagagtttcagacgtgatgaaaatcgcggattctgataaagactga

SEQ ID NO: 134350 - DNA, 498 bp, Enterobacter cloacae
atgcagaaggcaattttagacatgtgctgcggttcgcgcatgttctggctcgacaagcaggacgagcgcgccgtgttcagtgatatccgcgccgagcagcatgaactttgcgacggacgccagttggttattagcccggaccttattgccgatttccgcgccctcccttttggcgataacactttccctgtcgtcgtgttcgatccgccgcaccttgagcgtgtcggtgataatgcatggatggggaaaaagtacggccggctcaacaaagaaacatggtgcgacgatttgcgtgcaggcttcgccgaagcgttcagggtgttgtggccacacggtgtgctcatcttcaaatggaacgaaacgcagatcccggtaagcaatatcctggcgcttaccgacgagaagccgatcatctggcagcgcaccggcaagtcagacaaaacccactgggtgatcttcgtcaaaggtggtcccaatgttcaggataatccagcctaa

SEQ ID NO: 134351 - DNA, 345 bp, Enterobacter cloacae
gtgtacatattcgaataccgattcctgaatcagatccgggaacgaacgtatttggccgtagatatccggcttggctttgtagacgcgcgcggtgtttgtctgaccggtcaaactattgttgggcgagtcgaccgtattgccgccgctgtttgcaatggccggtttcggtgccaggaacgaaaatacctggccaactactttaaagatcggactcaggatgtcgccgacaatacctttcggctggtcgaaaatctggatgttgtccagctcgctcagttcaaacgccagctcatcatcgtcgcccagcctcacaccattgcggacgatcagcagatcgcggtgtaa

SEQ ID NO: 134352 - DNA, 867 bp, Enterobacter cloacae; identical to SEQ ID NO: 36225

SEQ ID NO: 134353 - DNA, 1200 bp, Enterobacter cloacae; identical to SEQ ID NO: 36224

SEQ ID NO: 134354 - DNA, 249 bp, Enterobacter cloacae; identical to SEQ ID NO: 36223

SEQ ID NO: 134355 - DNA, 180 bp, Enterobacter cloacae
atgaggaacttgttcctgaacttgaagacccagatgaacttggtgagctgtatgtttttggataataaggagtgctgccaccatagtacccgccacctgatgatgaacggtgagaactatggctccgatgggagctatgactgcgatgccctgcaatgtagaatggaacttcggtgttaa

SEQ ID NO: 134356 - DNA, 2553 bp, Enterobacter cloacae
atgataaattcttttgaaaaatccaacctttggcaattaactttgggcttggccgacaatgaagatattgaaagattgaggaatagttattttgactttagaagaaaaattgaacctttagtaaaaaacattgaatttgaaattcctgggctgaccatccatgatatatctcacatagattcactttgggaagtagccgatcaaataattggtgaaaattattatttaaaccccattgaagcatatgttttaggaggctcgtttctgttacacgatgcagctcatgtaagtgcagcatacaatggtggtttcactgctttaaaagagagagatgaatggaaagatcttatctcactaaaatacaacaatattgagccagaaaaaaactctgaattagaaaaaagagctttatttgaaattgttaggcaattacatgcaaaacaagcaagaaatttaattcaacaatcttggaagtctgaaacaaatcagaactattactttcttatagctgatgaagagattagagactattactcagaaataattggggaaatagctgaaagtcaccattggtcagcaaaaaaagttaatgatagtttctcaaatagagtaattaatccccctgcatttttcaaaagtacaaattgggaagtcgaccctctcaaaattgcatttattttgcgtacaactgatgcatcgcatatagattcgagaagagcgcctacttatgctttcaatattcttaccccgcaaggtctttccaaggaccattggcatttccaaaataaacttggtagagctaaactggttgatggagaaaacctgagagtatcatcgggatcctcatttaacgagaatgaacgtaatgcatggtggttagcattcgatacagcacgaatgataaatagagaacttaaagatgctaatagttttttaatcgaatcaggccgccctcctttatcagctaaatcagtattaggtgcagaatcaccaaagtctttttcaaaatatgtacttgcaaataattgggaacctgaagatatttcagttcatgtgagcaatcttccaagactaatttcaacattaggaggaaaagcactatatggggaaaataaatacgtagctctcagagaattaatccagaatggatttgacgctatcattgcagctcgaaatctcggctatcttgaaagctttgaaggtcacataaccatccaactaaataaaattgataacgaaagttggatgttaaatatatctgataatggtttgggaatgagtagatatgtgttatctgatgtcctcctcgattttggtaaatcattatggaaccatgatactgtcaggtatgaacacccaaaacttgcgcagactggttttagttccattggtcaatttggaattggtttttactcagctttcatgatatctaaccatgtgaaaatcataacacatcgatataagctgaaatctgatgaatccaattcccattggaaattaactttccctaacggccttgaagaaagaccatttatttcaaaaccaaatgaacaagaagaattaaaaaaacatggcactaccatatcacttcgtattgaaaatgaaactctaaatgatttattgataccagaggaagaggaagaggaagaggaagaggaaataattagtgaagagaaaatgcagggtaaacttaaaaaaatcatcaaatggatatttcctgcatgtgaaatagacatttatttgatcacaaaagaaaaaactgaaaaaataataagcgcaaacgattggttggaaatatctgacatagatctacttagaagaatacacaataaaagtaaagaaaaaaaactttatccattaaaagttaatgggcgtactgttggacgtttaagaatcactagccactattattttctaattaatgagtacccacctttaattgtatcctacaaaggggctcgtgcagggcaaatttatggccttgatggtttatgcttatcattcgaaaataatgaaaaagcagagagaaatgatgctttaccaaactatcctcttgaaagctggattgattgggctagggaaattgtcagttcagaatcaatgctctcgattgatcttttacttaaacttcacattctcttgccaaatgacgatctaaatgtttggtttataagcaataaaagatgttcattatccgatattaaaaatcttctgatttcctcagatgaaattctctttcatatcggcgatctggaatacgatgacgatgatagtgtaagaaaaacagatttcgaacgtgatttaatgctcgagaataatgtcatagttagccattcaaatagtgtttatcatttccacgaagcattcacatttgataaggtaattgaaaaatacaatctccctagagtcagttatgcagaaaaacttgaagatctaattaaagagatttggggagattttgaagagaaagaggaatacgaagtcattgggttagtaaacaacaccgaaataatgagaagggtgacaaaatactctaaagttacttttaagtaa

SEQ ID NO: 134357 - DNA, 1362 bp, Enterobacter cloacae
atggctaagtataaggcgtatccggagtataaggattctggggttgagtgggtagattcaataccttcgtactgggatgtgaaacccacgttcgctttatgtgacgcatccactcagaaaaatattgatggcgctgagagcaatgttctttcattaagttacggaaatattatccccagggacgttgaaacgaactttggtcttcttcctgagtcgtttaatacatatcagatcattagttgtggagatgtgattttaaggctaacagacttacaaaatgataaaaatagtttgcgggttggtttggcaaaacagaagggaatcattacttctgcatatttaaaactgaaagctaatagtgatataaatccaaaatttttgtatcgactactacactcatacgatactacaaaggtgttttatggtatgggcggtggtttgcggcaatcaatgaagtttgaggactttagaagattaccactgctattacccccatatgaggagcaggttaagatatctgttttcctcgatcacgaaaccgcaaaaatcgataacctaatcgagaagcaacagcaactgattgaacttctgaaagaaaaacgtcaggcagtgattagtcatgccgtcaccaaagggctaaaccctgatgtgccgatgaaagattctggtgtggagtggttgggtgaagtgccggagcattggattatcgctcaattaaagttcaatactcttgaaatgcaaactggcccgtttggtagtcaattacatgctgaggattatgtgatagatggtattccattaataaaccctgcgcatatgaatgcagggatgattatacctgatccgaaagttactgttgatgaagcgacccaagaaagactagggcgacataaactatcagaaggtgaaattattttctctagacgtggcgaattaggtcggtgcgctgttgtaaagaaaaataacgaaggttggttatgtggcacaggtagtttgaaagctaagcttacaaaaaaaataattccagactacgcttatactctgatttcttctgagggcgttgtttccgaactgacattggaatctaaaggttcgacaatggcaaatttgaataccgagactttgggtagaattcgattgccagttcctccgattagtgagcaagaggcaatattggattatattaagataatttcagataaatatgattatctaattcgatctgcagacactgcaatcagacttatgcaggaacgtcgcaccgccctgatttccgccgcagtcaccggaaaaatcgacgtccgcgactgggatgcgcctgacacgcaagacattgaggagtcacaggaggccattgcatga

SEQ ID NO: 134358 - DNA, 1620 bp, Enterobacter cloacae
atgattgaagccactgaaagcaattgtgttctgctgggatacgacaagtttggtcatcccctctacaaggccattgccacgccgaaagacaaggagcaatggctcaaactttataagatgccggacagagtcatcccggttgtatttttaccgggggtgatggggagtaatttgatgagtcctgacggcaagtctatctggaaagtagatggaacatggagcatgaaatcctggttagtgcggggcgccgaggaaagaaaaaaattactggatcccaccaaaactgtggttgatcccagcgggaaaatagagcctgaaagtccggaagagcggctgttattttcatcgcgtcgggagagaggctggggggaggtgggggcaatgagctacggcactttccttccctggcttcaggaagcgctgaacgataaccagacaatgttaaaaaacaagaccagcaaaaatggcagcctgactctgcgtgagaggctgatggataaaccattgggggccgaaattggcgagagtaacctgacctctgacgaagtggcgctgagctatcagtacctctttccggtccatgcggtgggctataactggctacagtcgaatgtggattcagctaaaatgctggccaagcgtattgaaaagattattggcgattacaaagccagcggacgcaaatgcgaaaaggtgatcctggtgacccactcaatgggagggctggttgcccgttactattcggaattgttggacggagatttcggacagaaaaatatcctaggtattgtacacggggtgatgccggatcgtggtgccccgatggcctataagcggatgaaagcgggtgaggcagggccggttggtttagtgattggaagtagcggcgctgaaatgacccctgtactggcacaatcaccgggtcctctacagctcctgccaggctatggatatggtatgggctggtttcatgttgagggccttaagcagtctttgccccagacaaatccgtatacggaaatctacactcgaagatcggtgtggtggggattatgcgaggaacgccttattaatccagagaataaagatatggataaaattcgactggagaaggactggcaatcatatgtggataatattgataataaagtaagaaagtttatagaaggacttaatgggcgctaccatgaacatacctatgccttttatggcaatgacgggaagaattacccctcttatgctgaactacactggaaggacgtaagtggaaaacatactccggaagcccaccgctcgctggtcagcgaacagggggagatattctacccggtggacaaatttaaccagaccattcgctatgcaacgctggaaacacctgaccaggggtatgttagccgtaaatatgaattattacctcctgtggacgacggtgacggcactgtaccggtcagagcggcagtgattaattctccgaagttaaaggcccagctcggtgtgggcgttgaccacgagggggcatacaaacctgacaacaccatggatgcgcgctggtttactcttcgctcaattataagaattgcacagcaggtgaaaaatacagggcttgcttaccatgaataa

SEQ ID NO: 134359 - DNA, 1125 bp, Enterobacter cloacae
atgaataagataaaacaaaaagcaatgatcctggtcgccttcatcgttgtgggatatgggttgtatcagtattctcgcccttacaatccatcaccgcagacactgacgtcatcacagcaggtagccatgaacaagataaacgctgaaatgaaaccttattgcgtcgggcgctatatgctcgacctgccatcatcctttacggcttataatgacgctgcaccgctggatgacaatatctgggcggcggtgatttcaaggcccgaggatacgtataaaacctacctggcgacaaagaaaatgtaccacccagcttttgtgcagttaatcgcattacgtgaaaaggctctgcgagaaagtaaaactattgacgctcaggatatgccgtttttaaaaaaagtctggccgttacccactggtatggatggtgtgatttttgaacggaatgaaaacgagagtgttgcggacgcaatgcgcatactggaaggctatttatatactaatggcgtagttattaaatttcagaaacagaccattaatgattcgagctctatatataatgagcaacgaagaggacgcccagccagaaattatgtcgcaaatgatatcagccagatgcagtcgctaatggcgagaattagcggcagggatcatgacgtcattccgacgaagccaggttcctgtatcacccatgcatttattgccaccgacccgacggcaagggaacgggaagatatctccgttgggcttgaaagtaagacactggaacatatcagagttattctttctactgataatttcacccgagaaaaagacacggtgctggagagagcaggtgagatagagagtaatttgtaccgtggccatgtggaaagaaaaggggccttcagtgttaacgggcttcaggcccaggagtttctggcaacgggtttacaggcatctcaggacgagccgcgttacggctttgatatgttcatcaatgaaatgacagccagctacaagactcccaattttattctgaccctggagaatgattccatgccgccaacctcctacagcaaggaggaaattattgccttctgggacacgatcagccgtagcgtacgcgtgcgccccggcgcattttga

SEQ ID NO: 134360 - DNA, 1170 bp, Enterobacter cloacae
atgattacgggaatggatattcaggccggggcgaagatagccccggcgtttatgctcaagctggataacgaggatatcacgcaggattttagcgaccgccttatcagcctgaccatgaccgacaatcgaggatttgaggccgaccagctcgatatcgagctcgatgatactgacggccagatagcaatgccgccgcgcggcgcaaccttgacgctgtggttaggctggcagggagcagcgctgataaaaaaagggacgttcacggtcgacgaaatcgagcacaggggcgcgcctgatacgctgaccatccgggggcgaagcgccgattttcgcgggacgctgaactctcgccgggaacagtcatggcatgacaccacgctcgggaaaattgttgaaacgattgcggcacgcaataagctggccgccagcgtggccgacacgctgaaagccgtcgcagtgcctcacattgaccagtcgcaggaatccgacgcagtgtttctgtcccgcctggctgaccggaacggggcgtcggtttcggtaaaagcgggaaaactgttattcctgaaagcggggagcggtaagacggccagcggtaagcctattccgcagatgacgcttgagcgcggggacggcgatcgtcatcagtttgccattgctgaccgggaagcctataccggcgtgtcggcaaaatggctgcacaccaaagacccgaagccgcaaaagcaaaaggtgaagctcaagcgtaagccaaaagagaagcacctccgcgcgctgcagcacccaaaggctaccaaagccccggcgaatgccaaagccaaaaaagagcaggaagcgcgcgagggtgagtatatggccggtgaggctgacaacgtgctggagctgacgaccatttacgcgacaaaggcccaggccatgcgcgccgctcaggcgaagtgggacaagctgcagcgaggcgttgcggagttttcaatctcgctggcgattggccgggcagatttatttcctgaaacgccaatttcggtgaaaggctttaagcgcgtcatagacgagcaggcgtggataatcagccgggtggtgcataacctcaacgggagcggctacacgacgggcttagagcttgaagtgaaggtttcggatgtggagtacgaaagcgaagaattaacgcagtga

SEQ ID NO: 134361 - DNA, 897 bp, Enterobacter cloacae
atgacaaaaatatattctgataatgccttgatatcggcattgttgcgatctccaaaacctttaactattttaatcggctctgcgctttcccttccagatgaaaattcaattggtgttcccggcgtttcgggtattgtcgaaagaattaaaaaacatgtcgaatcagttggtctgattgacgaatttaatcaagagatgaaaggcgttaccgatacccaattatatcaaaaaggtcttgagtttgtcgcgggctggcaatctcaggatgctgttaaccaaattataattgacgcggtgaaagaggcatacgacccgttaaatgaggagtggggagctccaaatgctattgttgagctttgcgattttattaaagaaagcgatggtttagttagaactatactaacaactaattttgaccccttaattcaaaaaagattaaagaagattggtgtcgattacttacagattaatctagatagtgatggttcattagctaacataagctcaagtaatgataaagatttaaaaattgtacatttgcatggtttttgggataaaactaatagcctacatactcaggcgcaattacaagcggagcgcccacaactcaaggcatctctgaaagatatcctttttgataccactatgttaataataggatacggtggttgggatgacgtctttataaatgcattgggtgacgcgacttatgagaataataaagaagttaatattctttgggcgttttatgaaaaagatgagttgcgtatcattaataataataaacatttgttcaccaaactccaaaaattcataactcaaggtcgttttaaaccctatgccggtattgattgcaaaaacttttttggttcggttttaaaaaaaaagaacatgtaa

SEQ ID NO: 134362 - DNA, 2235 bp, Enterobacter cloacae
atggaggggcaacctaatcaagataatgatcatttttcttatgtggttgagaaaagaataacaaaggttactcaaagtaaagattcgaaagatgtttctttaaaaactgatgtcctaatatttagtaatgcacataaaaatataagaggccgcgagtccaatcaatttattcattggattcgtatgcattctgtgattttgatagatcaaaagatagggttagggggggagtattttctttcatcaatattacatggtaacccagagctatttaatgattatgatatatataaagtagatttagatggtgttaatacaattgatggactgaatgaaagatttattctctcaactggtgtgtctgtagaagtatttatagtcatttgttcgaataaaaaatatggctcacttcttttcatggataatatctcctttttaaatgacgataaatggcgtggagatttttctagagtaattaatacactccaacaaattggcgggaatgttcttattgtcccatgtggtaatatacaaacagactctcttgggtataataaaattgagttgagtactttggatgagtcagaagcaaaatgctatattagagatcatgttttcggaaaggaatccctgttaggtaaggatatattttattcgcttttaaggctttcatcaggaaatcctataaagcttgatcaattattagatagattaagatttcacagtttagatgaaatcacaaaacaagaatttcaacaagtttcagcaggtggtgataataataagagcatcacccagcattttgagtatttaattaaagatattattgattcaaagaatgattttgattcggattcactgaagattttaaaatgcctttgttttttgactttaggggagacgataagaaatataaacagaattaatcctaaagttaaaaatttagctggtattttatctaggttaacattggatggtatagtcaatgttaaaaaagagactccgatttttctatcatcctcggaagacgaggttaatatttttgagctgaatgctctgattgcaacacatatcaaagctgtgattactcctaataatgccaatcaaatattaaaaacatgtattgatttttactttggtaaggattggtttagtggtaagcctaagttaaataaagaatcaaaagaaatatttagatttaattatgttggggctcaatcaaatgcccatgtggttttaatgttatttataaatctaaatattgggttgggtgtaaaattaaataatgacacactccgagtggtgaaagtagcactgtattattctcgtgtactttataaccatagtagatatagagatgcaataatattttgtgaagagcttattacccttttacaggggtatgaagaggttcctataaataggctttattttgttttgtcagaatcataccgtatggttagtgacagagaagaagcagttttaaatatggagaaagttcttgaggatgtaaaaggattagatacgtccgaaattgctgacgcacaccttgagttagctttagcatactataaaataggcaacttcccaaaagcgcaagtacatgctaaaaaagcaatagtattatcgccaaaagggagcgcgctaagcctccagtgtcaggcaattttagcatcggaacttgtagatagtgaatgcaagaaaaaattatatagaatcgaaaagaaagctagaaggcaaaaatatacgtgggttgcgaataatatacttctgacgtttgcagatcaagaagatttaaatgaaaataaaataaaactctatgataaagtaattgaaacttcatcaagagggtataaccatataagggcaacgatttataaagctcataccttaatggaaatgaataaacttcacttgctatctcccacggaaaagatttatttatatgacctttatggctacttgtttactcaacgtattcagtcaatgtttataaaactacatggggttttatggacaatgtttaagcgcgatgggaatgtttcgtcattagctagtttattgagatatagctctacaatatggcgtattgaaggtgacgttaaaaatgaaataaaatatctgaaagactgtagaggattcttgggcgacaagacaagtattaataacacattaatagttacagactatattgatgcgcgtcttgaagatttggaatcgttagataatgtttaa

SEQ ID NO: 134363 - DNA, 213 bp, Enterobacter cloacae
atgtcgaataaaatgactggtttagtaaaatggtttaactctgacaaaggtttcggcttcattacgccagctgacggcagcaaagatgtttttgttcatttctctgccattcagagcaacgattacaaaacgctcgacgaaggccagaaggttgagttctcgattgagaatggtgccaaaggtccggctgccggaaatgttgtcgggctttaa

SEQ ID NO: 134364 - DNA, 1128 bp, Enterobacter cloacae
atgacgataacagcctattctagaaaatttaagcgtgaactggatgctaagcagttggaaaaccttttcgaacgtagcaactcagatccttctttaagttttagagattttgttaaagaggatgttgaatgcccggcatgcaatgtttctggtggttattacgtttcggaaggaagatctctcagtaacggcaaagttgtaaagcaagcacactttgcatttcgagacaatctaggtaaagactctcacctcccattttgtgatttttatactggagatgataagttgaacgttgtttcaaatgaaggccgaattgattttatgcgctcgggttctgaagcgacacgcttaataggtcttatggtctgcgcgggaattcaggagaagatttttacgcaagaagatatacgtaacatgcgccaatggttcttagatttaagagaaaaaggcacttttacatttaatttaagccctcacataatttaccttgcaaaggcctcattgattagatacaagagaaaccatgataattatgttgtcgatctcagcgccacaaacaaaagttggttcgacatcaatgaggaagtatatcaatccctttatttcaagtaccctcaattctatctaaaccgtaatgagaatcctgaactttggaatgtaaggcttaaatcagtagtcaaaaaagcaagaactatattaattaaagactctggaacatcaacatttgacagatcaattctcaacgaaaaatatgagttagctactcaaatggcaagactgattcgagactaccaccctcgactccgtatgattattagttacacacctacatctatcaaagcaaacaacccactcatggctttatctgcattattattacatgtttcggattggaatattcaggaaagctgtaaaaaaatccaatcaattttagcagttgagaaagttgacgatatttctgcaggaaacattataggattaaacccattcattcaccatagcgcttggattcttgttaaagctttaaacgacttacattctaatttagacaaagaaattgattttgataaagcattcaacgatgaaaaagagaggcttatgaaaatttactatccaaatggtcaataa

SEQ ID NO: 134365 - DNA, 1077 bp, Enterobacter cloacae
atgaatataacggattttctaaaaggctacagaaaccatccaatattatttgttggagcaggtttcagcatgagatacttatcaatttcttatagctggccggcactcttagagaaaattagtattgacctgacaaactctaatgaactatataaagatcttgtcagagaaaacagtaataaagatggcattatagaccttccaaaagtggcaacgcaactagagcaaatatttgatgcaacacttaaagcagataggaatggaaagttcaaagatatcaatgatttatactacaactcggaagatacctcatcaaatattagcagatttaaaatctatctttcacagttagtgaatatcacagatttaaaattaggagttcaagatgaaatatctgaattagtaaaagcctccaaaaacattgcctctgtgattacaacaaactatgataattttatcgaaagtgcaattggttataaccctgtaattgggaatgatatacttttaagcaatccttatggctctgtttataaaattcacggatgcgttagcaaaccagaatccataataataactggtgatgactatgttcattttgataaaaaatatgaattgattcgagctcaactcctatccttatttatacataacccgattatatttatggggtatagaataggtgatcctaatataaaaaaagtattaaaaacaatattttcatacataccacctcgttctaaaattgcagaaaaaataaaaaacaacttccttctcattgaaagagaagaaggcattgataatttaaacgttgtctctcacgatctcgaagtagaagatgctgggttaattagcattaataaaatcgttacagataacttctcagacatatataaagaacttgctcaactgcacttaccagtttcggtaatggatatacgcagagcagagagtgtctttggtaaaataaaggaaggcggagacataaaagtaaaacttgttggggatttggatacactcagaaatgatgaacttgttctagccgtcggttctgttaatgaatcgccacggataatctag

SEQ ID NO: 134366 - DNA, 1236 bp, Enterobacter cloacae
atgacaatcaagggccaggagtatctttatctttcaccggacggtgtatggcagtttcaaatctacatcccgtcttatatgcgtcacatgttcggcgggaagcgcctgtatcggaaaagtacagggacaagagatatctacaaggcgcgtcacttccgtaaccacatgctggtagagtggaacaaccttaaagaacagttcaagcctgatactgaggataagcgtattcagcttgcgatcacttccctgcactctcaaatcaggaagaacaagaataaaccattgattgaagagcgagccagttcgattcctcacctgtgcttcttacgagatgaatacgctactgcctaccaggatcggagatcattctccacactgagcaaatcggcgcgagccgttgaggtgtttctccagagtattgggaaagttgatatcagcctggatcagattggacgccgattagttacagacttcatagaagagcagcagaaacgcgatgtagcgccccagacggtgcaaaactggcttacatcgttaggtagcctctacgagttcgccaaacgtcgctatgacgctatagcgcccctaaatccgttccatggtcacaaccttgaagcgcggcgcacaattgaaagctatcagccgtttgaatggcatcagctatctacactactcaacgaagcagacgaagagctacgagcagttattctgatcggtttgttctctggtgcaaggctggacgaaatagccagcttgaagaaagaagagatcgttatggtggaagggatacggacattctacattagcaaatccaagacgaaggcagggattagacacattcctatccatgcttttctgatcggcatggtggattattatctgagtttgaacactggagattacctgttaccacaggctaacaagattgaacgcaaagacggtaagaaaggaccattctattcccaggcattcacccgcttacggcgtcgcgtagtgcctatggctacagaccgtcagtgctttcacagtttgagggggcattttatcacgtgtctcgaccgtgccggagtacccgaacaacggatcggatatatcacggggcactcttcacaagccgcttctacagaagcattcaagacctacagcgcggggtgttccatgaaagagctatccgactatgtggaaatggtggattatccagaaatcatctttccagaaacgaaaaaaggggcgtaa

SEQ ID NO: 134367 - DNA, 558 bp, Enterobacter cloacae
atggatatcgaaaaaaataaagaaaaaatcaagttgcaatttgatattataaagaggactgatggctatattgccaccaccaataataaagcagctttactccttgctgtgaacggagcaactgcaacaataatatctaacaaagtgggtgcatttgctggattgtttcagaaaaatggattatatacgattgttttttttctattgttgttcatgatcgctgtttttatttttatgtcagtcttacgttctctcggaagcattatgccaaatatgaacggcagaaaaggaaaaggtgattctactgaatctaatgtttcgtttgtttatatctccagtaataataacggcaaagaatattacaaaaaatatttaggcgaatctgaagatggattgctactggatatgtgcgagcaaagttttattttagcatatattgctaaacaaaaattcttatgttttagttcagctgtgagttggattaaacgagcatatatatgcatcatacttcttgttatatttaaatttattgactacgtaaacggagttttattatga

SEQ ID NO: 134368 - DNA, 1344 bp, Enterobacter cloacae
atgagctttaaagaggttactgctaagaacttcaagggattgaggagtgtaactttaaagaagaaaatggcaatggatggatatcttcgcgtaggtacggaggcccgtttaggtgatgagttatcagagtctttttcaacaagtcctagtaacttcatagagtatgactatcagaaagaagtaaggcctttctttcaaaagccaggtcttaatgaacatagtattggtacccaccccgaattgactggtttaaatggtgtaggggcaatccatagccaatatatagtgactatgtttattgacatacgtaaaagttcaaggttgtctctgctacttccgttagaacaggcatatgtagttaaaaataggatattacaagcatgcatagatattgttagagcgctcgatggttatcctcatcgccttatgggggatgcattgatggccttctttggacgttctgatataagcaaagaagatgcaattgcagatgcaataaatgcagcttcaaccttgagacttatattgatggactacatattcccttcgctaaatgaagacattggagagaagattgatttgggagtaagaattggattggattatgggtctgaagaagaggttatttgggggaattttggcttaggtgagtcttgcgaagtgactgctttgggactacctgttgatatgacagcaaaactacagcaattggctgataaaaatacagcaatgctagggcaagggatattagattatattgacttccccgaggaatatacaaagcccaaaataaaagccggagaagagttaaagtatattatcccaaatataacaaataaagaaggaaaaccaataaatcgacgtattagattgttgaatatggctaattatcaagacctattaccatttaaactgaatgataaaaaaatggcttctgcagtattacatccaaatcattttacatttgaatgttttgttgttgaagatgatagggaggttctctatagctctgtttcacgctttttaccaaaggaacgtagcttaaaatttaaattaaaaatatatcccgggcttggtaagctaaatatcattttctgtaaaagaaatcatgggcaagaagctaaagacgatctttctgaagattattctattcgtatagttgatgatgaattggttaaagtaaaaaatgcttcgcatttatctctattaaaagaaaatgaatgtcttgaagtatctttgcctgaagggacttcatttagagggcttcataccatggaagtgattgtaaagggcgaaaatgacacgctgtattatcgtaatataattggtgtttatataaaatga

SEQ ID NO: 134369 - DNA, 1194 bp, Enterobacter cloacae
atggcgcgcatcacacgccctctcactaacaacgaaatcctcaaagctaaaccccgtgaaaaagacttcacccttcatgatggtgatggcctgttcttgctcgtcaaaacaaccggtaaaaaactctggcgcttccgctatcaacgcccagccagtggcagtcgaaccaatttgagcctcggctcatatcctgcccttacactcgcagcagctcgccagatacgtgaccaacatttggctacactcgcgcaggggatggatccacaacagcagcaagagcaagcatcagagcaacgtcagattgagctggatagcattttctcaactgtggccgccaactggttcaaaatgaagagcaaaagcgtcacagaggactacgcgaaagatatttggcgttctctagataaagacgtattcccagtaataggcgcgatacctgttcaggagattaaggccagaacgatagttgaagcattggaaccaatcaaagcacgcggcgcattagagactgttcgtcgcttggtccagcgcattaacgaaataatgatttacgcagttaacaccggcctgattgatgctaacccggcatcaggggttggaatggcatttgagaaacccaaaaagcagaacatgcccacactacgaccagaagaattacctaagctgatgcgttctctggtcatgtcgaatctgtctgttccgactcgctgccttattgagtggcaactcctgacccttgttcgcccttcagaagcttctggcgctcgatgggcggagatagatgtcgatgcaaagttatggacaattccagcagagcggatgaaagctaagcgcgagcacattgttcccctttcacctcaggctttagagattttggaagtgatggagcctattagcgcaaatcgagaacatgttttcccaagtaggaacgatccgaaacaaccgatgaacagccaaacagctaatgccgcactcaaacgcatcggttacgggggaaaacttgtcgctcatggattacgttctatagcaagcaccgcgctaaatgaagcaggttttaatcctgacgttatcgaagcagcacttgctcacagtgataaaaatgaagttcgtagagcatacaatcgttcaacttatattgaacagcgaatagacttgatgatttggtggggaaaggtcgtcaaagtaaaaatgtaa

SEQ ID NO: 134370 - DNA, 1059 bp, Enterobacter cloacae
ttgttaaccctcgccttcctttttgctacggtgcccggttttatcggcagcctgattggtgaaaagctgtgccagcggttttcacctctctacctgctgatgctgaccgaatggctgggcttgctcgccctgctctttcccctttcaggcgcacattaccacagcataccggcgctgcttgcggtgcaatccacagaagcattgctgagcgggatgagctggcctgcgttaacgctgctgtttaaacgcggactgcatgaggcagaactgcctgcggcaacgtgtctggaaaatgtgatttttgcctctcaggttttgttaggaaccgggctgggtgtggtgttgttccagcgcatcccggtcttcgccttactggtcatcgacgccgccagttttatgggatcgctggtcatgctgtttctcgctgaacgccagtatgtagcgcgtacagcaccgttgcctgtcggggatcctcaacctgtggcattgcgctggcaaactctgacccttcgacaaaaacgcagtttgctgattttgcctgcccttgccgctgtaggctcgcctgcaatggcgttgctgccagcactggcgcagcagatcaaccccgagaatgccgccgggcttgcgctgcccttgctttttgccagaagcctggggcagctttgtggtcccttgctgctcagaaaagagagtctgacgcgctttgcagcaagaacacctttgctacttagctgtcttgcccttttcctggcagcctatggtttgcttccgtttttatccgcatgggtggtgcttgcgctggggatgatctttatcgcgcatctggcgtcgaatatcgtttttgcggcgggtacgtttggagtactgagtaattttcaggctatacaaatatccgctgccagcggtaaggcctggcgctggcaaacgttgagcgcttccctttttacgggcctcgccgcaatgacggcgacgataatgggagcggctcagacgctatatgctgtctctgctatcgctctgctgttagtggcgctggtactggcccgttatcgtgaataa

SEQ ID NO: 134371 - DNA, 1581 bp, Enterobacter cloacae
atgtccacactgtattcacagaagttggttgcaacaaattccagatttaccgcttattttacggtggttatttctctttttattatttttggtgtgaatattatacatgccaaatataatacagtgattaaccgaacgctgatttttgcgctagtattgctgacattaaaatgtatagacaataaattacttagaaatgtactggcgtttattatattaatcccgattgcaatagatattactttgcagttatacgcatggaataatttcaattctgcttttagttatggatttgcgcagagtgtactcaatacgacgccgggtgaagccagttccatgcttggcttatattggcgcgatagcctgatttttatcgctctttccatattattcatttataccgctaataccgatacgtggactattgcgccgcgttttcggcgctggcccgcgattgcgcttgccgtcacgctgctggctttttatggtcaggctttacagcatcaactcaggaagagcaatgttgaaagtctggcgcagcgtgtggtttatgcaatgcccgtcagtacgtcaaaagtcttcatgcaagccattgaagataatgcgatggtggccaacattggcaacaacattcctgattataaaatcaccctctccgataccggcatcgacaattatgtgctgatcattggtgagtccgagcgtacagcaagtatggggatctatggttatcaccgaaataccacaccagaactccagaaacagaagtcacagcttttactttttcgtaatgctgtggcgcctgcaccggtcacgattatgtccgtaccgctagcgatgaccgcggacactgtagacgcgcgtgatccgcacaaatatggcgataacgtcatcaatattgctaataaagcgggctatgatacgtactggtttagtcgtcagggaaaaggaggggctcataacaacgtcattaccgggattgctctgaatgcgaaacagcataaatggattgagggtggctatgatgaggatcttctgccgctgttgcaggatgcgctaaaaaagccgggcaaaaaaatgatcgttctgcacttgtacggaagtcatgaaccttcctgccaacgctatccgatcacacaaacggtactgcgcggcgataataaagccgacgactgttatgacaactcgatacgatataccgataccttaacaggcaagatatttagcctgttggaaaattcacgctcttccgttttatatttttccgatcatggcctgatacgcgatccgaagcgtgctgtaacttactcccacggtaacgttaatcctccacgcgaggcgctacaaatcccggtgtttatctggtacgcccatcaggttgattccgataagaagtacattgcggattacaataccgcctggtctgctgaggatcttaatacactggctgagctgtggcttgggatccatcgtcagggagagcctgtccagtcggtacaatcatggcttgctgattataataagcaagttactgtgctggacacgaccggtgagatttatgactggcgtaatattcgttaa

SEQ ID NO: 134372 - DNA, 1467 bp, Enterobacter cloacae
atgagcgtattttgtttgaaaggtcgcgaaaaggagatttcctttaacgttatctcatcagtgatttacatattgccgcttctatttgcatccctattttacagggatgatttaggacgtgcgatatggggcggcggctgggaccatgacggcaggtacatcaccacgtggattatggaagcgttgtcaactggaaaaccaattactgatatattcccatatgggacgatagcctctgctatattttttggtatttcagggttgattatcacaaacattttaggaatagaaaaatcatcaacctataaaataagctcgttgtatgtggtaacatacccgttcatcattgaaaatttagcatatagatatgatgcacttagcatgggtttatctttccttgcatgctgcattccttttttgatgcgagaaagaagctacacatttatttttgcttctgtagcatgtatttatttctctctactgacataccaatcaagtttgttcgtttatattttgatttgcatggcgctatgtgcaaaatcaataattgacgaaaataaagtgccttttaagcacataattgagtgtataatttcagtagttttagcgatggtattggcgaaaattacatggcatttaaaagacgcgaatttccacggaagagatgccttgtttgtgtctacacaatatccaattcaagctcttgaggtgaatttcagatctttttacgaccttctaacaagagtttatggtcactcttatttgaaattaatatttccaatcatattgtctgcggtatgttttattatctttggggcaataaacttaatttgcaacaaacactataaaagactttccttggctattttgctgattccaatatttgggttaatggttcttctatctccaggtctaaacctcttcctggccaagccgttctggaccgcaagaaccatgatgtgcctggtggtaattttctatctaatgacaatgttagctgatagattattttccaagcaccacaaaatcaaaaagataatttttattttacctttaatctactcatttgcattgatatctgcattctgccagtcacaacagtcaaataataatttttatgacaaggtagaatctatagtttaccaatacacctcagtagttgataaagcgtctgtagttatagttggaaagcctgaattacctcatgaaaacaaggtgttgtcggggaaattcccaatactatctgctctttctccactttattacaatggacagtgggtttgggggccggtatctatgatgaaatctggaatagctacagataccactgtaaaatatggagataaatgggattcgattatatcaaacggttgctcctataatgttgtatatagcaattcaatcatgaaattatatcaaaacgacaagcagttcatattaagtttcgacaaaacctattgtcattag

SEQ ID NO: 134373 - DNA, 2097 bp, Enterobacter cloacae
atggctaccacacctacccaaaaaccggtcccgagcgaatcaccgattgacctgaaatacaacgccgggaaaattgacgagttcgttacctcgatgggatggacttacactgaccgtttcggcaataagcattatacgatcgagggcctgcgctggctggcacagcaggccatctcccagttcgggtatattactctggacagctttgaagacggaaatacccttacacttccaaatcaagttctgcgcctcgatgcaactggagagtattatcgctgggatggtccattgccaaaaatggtgccagagggctcaactccggaaagcactggtggggttggtataggcaaatggctgtctgttggcgacgcatcactgagatctcaactagcctccgtaaccggatttaatcttgtaggtcaggtgccagatgtaactacattacgcaataccgaaccgacaacagccagccagagaatcctccttcgcgaatacacagcaggtacaggatacggtggtggtcagttacgcgccgtgcttgatggtagctcttacaccgacaacggcgttaccgtgtttaaaactactggcggcgctgcgtggattagagttaatgctgatgttatcacctcatttatggcagggactgtccctgacaatggagtgacggacaacactgatgctatcaacaggttcctgcaatccggaaagaatctcgtcatgggtgacggggtttttagtcactctgggcaaatatctttgcaaacaggtatatcccttgatctgtcaggagctacgttaaaaccatcatcatctctactcatcgcggcttggcgcggtgatagtttaagtgacgttaaaataaagggtggtttttttgaagggacaggtcttgacaatacaactggcaatggacagttgctgttattggtaggatgtcaaagatgcattatagacgggacaacattgacaaaatctcctaatgatggtttgaggtttacatcttgttctcaatgcattgcaatcaacgtaagttcttataataacttctcagttggcatacaagaccgcgatggcaatcacaatatcattacaaattgttattgtaataacaacggcaacacaggaagcgccacgagtagcttcgggcgaggtattttaacatggaggagtttcggaactactatacacgcatgccatgcattcaataatgctgaatataacataagagcatattcgcaggctggagattctagatcctctactcaaataaccatatcagattgccatgcaggtgatgcaggtaaaattgatatatatatttacaacgagataggaagcctctctgatatagttgtttcaaacccaatgattcggagaaccacaaatccagaagtggcaatgatagcacttcagggggtgagggtaagttgtaacggtggaagccttgtaaagtctggggatcgcatgactgcaccctgtttctcccttttccaaactgatagtgcggcagttcggggtgttactgttggaaatgttggaccgttaataagtttttcttcagccaacaattctttaattacaggaataataggaaattgctcaactgtatgcagcaataatacagggaatggaaccatgtacaagggtaacgttttcatccatggtggttctggaagccaagacgtgggaataactgctggagatgatatttgctctattataggcaatacatttaatggattttatagggatatcacctggaactcccaaaaaattaccattatggataacgaaagctcaaatacgacagatgtttctttgcgcatgttcggtgatggcattgggaatctatacattggagggaaccgctggggcgcagcaacaaaccctgcattgttagcctcattaaccaagcagggagggccatcagcagtcccgacgtactatgataactcacctccatccggaacaaatttaactttccctattggctcaagaatcctcagagctaacccagttgtgggacaaccaaaaggttggctttgcacatcatctggtgcgcctgggacatgggtggctgaaggaaacctttaa

SEQ ID NO: 134374 - DNA, 273 bp, Enterobacter cloacae
atggcagttgctcaagagtccggcatgaaagttaagtggcgcagcgtctactggccgattggcgagtgggtaaatgaagatggtgatgttgtagaaatcactaaaaacttcagagcgaaaagcgaggagggtgaaatcttggttgtcatgaataacgaaacatccggcggtggacatggcgagcctgcgattacatcaccaacgccatcattcattcatgctgacacgttagattcgctgccacatccgccaggttttattgaaatcaaataa

SEQ ID NO: 134375 - DNA, 1473 bp, Enterobacter cloacae
atgacgactgctgagcaaagggcatttgcccgtaaggttgaatgcgaagaggacgggctctattacgctcgctacttcttcaagcagcgcaccggcggaaagatgattgtcgcgcctcaccacaaggtgattcagcaaacgctggaccgcgtcattgatggtgagattcaacgcctgatcatcaatgttccgcctggctacacgaaaacggaactggcgaccatcaatatgatgggtcgagggctggcgctgaactgccgggcccgcttcatgcacctgtcttattcgcacaacctggcgctgctaaactcttccaccgcgcgtggaatgattaagtcgcaggcgtatcagtcgatgtggcccatgtcgctacgcgatgacgctgacagcaaggctatgtggtggaccgaacacggcggcggcgtttatgcgtcgtcagctgccgggcaggttaccggctttcgtgctggacacatggagccgggctggcagggcgcgctgattatcgatgatccggtaaagcctgatgacgcttactctgagatcgtccgcgacggggtcaacaaccgttttaacgagacaatcaaatcacgactggcgatcgagacgacgccgatgattgtcatcatgcagcggatccactaccacgacctgagcggctatctgctgcgtggcgggagtggtgagaaatggcatcacctgaatctgcctgttctcatcgatagcagccgcagttacgaagaaacatatccggaaaacactcacgctatcccgattgaccacggcttgcctgatggatggctgtggcctttcaagcataacgaatcgcaccgcgtatccctgttctctcaccggcgcaccgccgaagcgcagtacatgcagaacccgaaacgcttcaacgcggagggggcgctgtggagcgaggagatgatcagcgccgcacacgcgatgcggatcacccaggaactgtcccgtacggtcgtggcgatagacccgcaagcgaccaacagcgaagagagtgacgaatcaggcattgccgtcgccagtgtttacggtaccggcgatgagcggcaatacagcctcgatgcagattacagcgggaagtattcacccaacggctgggctaccaaagccattgagggctacgagcaacatgaagctgatgcgatcgtcatcgaaaccaaccagggcggcgatatggcggaagatacgctgcgcaatgccgggttcggaggacgcattattcgcgtgcacgccagtaagggcaaatacgcacgtgcagaacctatctccgcgctgtatgcgcagggccgagtcgctcacaggggaagcctctacgaggtagagaaccagcttatggaatacgtaccatcgactgcgaagaagtcacctgaccgtcttgatgccgcggtatacgcgctcaccgaattatctgaaccacaatcaaccggcatgttggtgcgctcgcgctga

SEQ ID NO: 134376 - DNA, 480 bp, Enterobacter cloacae
atggcgacactgaaaggtgaggtcaaagccttcatcgttcagtcccttgcctgtttcgatactccatcccaggtggtagagctggtcaaaaaagaatttggcctgagcatcactcggcagcaggtcgaatctcacgacccgacgaaagcaaacggcagggggctggcgcagaaatgggttgacatgttcaatgccacccgcgaacgcttccagaatgaaatctccgatattccgatcgccaacaaggcgtaccgccttcgagttctcgaccgtatggcaacgcgcgccgagggcatgaagaacctcgcgcttacggcagagatcatcgagcaggcggcgaaggaatgcggcgatgcctacaccaacaagcacaagtttgaacattccggcccgaatggtggcgccatccagacgatcaccatgagcaaagaggaatacaaatccgcacggcaggagatgatggaggatgacgactgctga

SEQ ID NO: 134377 - DNA, 639 bp, Enterobacter cloacae
atggttaacgatgacgagcgcaggccatatcccccagttaacttcatcgactccgataactggcagccatataccaggctgatcccagccaatgaagtgcatgagtggataaaccgccaaatcatcagtgatgctggaagcatccataaccctgaccacgaacacctgcttgaagctgatctctgcttcatgtgggcgtctgattcgttcgcgaagaaagggcgctacgttctcggtcaggctgaacaggtaatgttacgcgccggtggctggcagaaagccagaatggaacagcagatgcatgaatggttcgggcgcatcccgaagttcatcatcacgctggcagctgattactgctcacaatgcagtgacctcgaattctgcgctctggtagagcatgagctttaccacatagcccaggccaccgacgatttcggcgcgcctaagttcaacaaagagaccgggcagccagtgcttacactgcgcggccacgacgtcgaagaattcactggtgtcgtacgtcgatacggtgccagcaaagaagtacaggagctcgttgatgcggccaattcgccagcagaagtggctcacatcgatatagccaggtcatgcggcacatgcatgttaaagctggcctaa

SEQ ID NO: 134378 - DNA, 225 bp, Enterobacter cloacae
atgagtaaaatccaatacccaatgaccacggcggctattttcgatgatgttgtttaccctgtgcgcttcgataatgccgacaaggttaagcaagaggtcgaaggtgctgttaactggttctgccggtggtgcaatgaagagaaagcagttgttaaagcacgggttctggtcagttgttgggggaagtatctgaactatgcacaagtcatggaggatggagtgtga

SEQ ID NO: 134379 - DNA, 180 bp, Enterobacter cloacae
atgcgcgcaaaaatccatcgttactgctcatggatattttttatcgtacttttcctgttcctgtttgctctctatcagaaagcgtacttgggtgtcgccctaaatcaaattatcattgcaacgcttgccgttactggtcttctcggttggattacgagagaaaagcatcccaagaaatga

SEQ ID NO: 134380 - DNA, 264 bp, Enterobacter cloacae
atgagcaacatcgacaaacaggcgctgcgagaagcggccgaaaatcatggagatgacgacattctggctctgctggatgagctggaagccgcagagaagcggattgctgaaatgcagtcgttagcgagtggcgtaaagcagttctcagagttccagatttgccattacggtgccaccgaggattatgcaaagggctatctcgactgtcagaacaattacaacaaagtgctgttcgccgcagccggtaaaggagaggcatcatga

SEQ ID NO: 134381 - DNA, 204 bp, Enterobacter cloacae; identical to SEQ ID NO: 127281

SEQ ID NO: 134382 - DNA, 627 bp, Enterobacter cloacae
atgatttttaacggcgagatggtgcgcgccatcctcgacgggcggaagacgcagacgcggcgggtcatgaaagttcagccgtctgatggcttccacccaacgcataacggttacgatctggatttaaacgcacactggtacacgcctggcgtggtcgataaaaacggatacttgcagcctgcaaagaaagatgtatttggcgttgccgatgagaatgaaggctacgcctgtccgttcggtgccgtcggcgatcgcatctgggtgcgtgaaacattcagcccggttcctgatcatgaagagcctgctggttgttcagccattctttacgcagctgacggaaacggtccgtatggtaaatgggttccttcgattcacatgccgcgctgggccagccgcatcacgttggagataaccggggtgcgggtagagaggttaaacagcataagcgattctgatgcatcgaaagaaggttgctgtattgctgatatggaaagtggtgactgcctaagcgatgtatttgctcgcctctggacatctatttacggcgatgagagttggaaggtcaacccttgggtctgggtaatcgaatttaaggtggtgcccaatgttcaggataatccaacctaa

SEQ ID NO: 134383 - DNA, 231 bp, Enterobacter cloacae
atgagcaccattcaggacatcagaaaccaactttcaaatctggtaaccgaggcgcacaaggttgcgtgctccctcgaaattggtgatgagagaacggaagcttttgagctttacgaagcgcttcgtcgacttcagaggcagggtgccgctggagagattctatcagcaactaacccgcttctcgcctcgccatattacgacgaggactgggacgaagatgaagacgactga

SEQ ID NO: 134384 - DNA, 1122 bp, Enterobacter cloacae
atgcaactcagacagcgaattaagaaaatggagctgggtgtagctcttgataaatattacggttgtgcatctgtgcaaaagcggggccatctgcaggagttttatcggataaatgttataaagcgttcagctcttgccaggcgatacatgcatgagattacttcggttgatattgcagaataccgtgatcagcgactctctgaagtaagtggtaaaacggggcgaactaatagccctgcaagtgtccgacttgaacttgcgttgctatctgccctttataaccttgctcgaattgaatggggaacatgtactcataaccctgttgagcatgtacgaaaaccaccggcctccaaagggcgaacccgaagattgacatctcaggaggagcgaaagattggcagggcgctggcaaaacgaaatatcgagttggcagccatttttcatttggcccttgaaacggctatgcgtcagggggagatcctctcacttcgctgggagaatatcgacctgcacattggcatcgctcatttgcctctcactaaaaatgggagcgtaagggatgttccgttgtcttttaaagccagaaaggtattaagagagtattccggccctctatccggacctgttttcagttatacatccaatgggtttaaaagcgcctggcgagaagttatacaggctttaggcattgtcgatttgcattttcatgatctacgacacgaagctataagccgtctctttgagctcggaacactgaatgttatggaaattgcagcgatatcaggacacaagagcctgacgatgctaaaacgctatacccaccttcgtgcgacgcagctggttagtaaactcgatatacgtaaacgacaggcgcagaaactggcggcgatctttgttccgtatcctgctgaacttgagagcagcaataacggtattgttttacgcttccctgatcttgaacatccttcacttgaagcgcaaacaaaggaagacgttatccagaaagcctcttttgagcttctcagaattcaggctcttgctgctcgttctggagaacgactccccccaccaggcaatatcaaagccaatgacccaactcgtgtgcttattaatccgctctga

SEQ ID NO: 134385 - DNA, 867 bp, Enterobacter cloacae
atgtcagtcagtcaagtcgtcccggaagaagttatacctgaaaatccagaggttacttcttcgaaagttgtgcctgctgagccagaggctcgccggttggttcccattaacctgaaaaaaatagtccggattggaggtctgggattcctcattgtttctcttgttggttctgtggccacgattgtgatcatggcacagcaaatctctgatctgagtattcgggtgaactccctggatgccgcttttcgcagcggtcagatgagccagttgtctggttcggttacttcgctcgaagctcaaagccggaaacacgagaagcagctcgagtctgtctcatcagggcttgaatcagtacaaaaccagttagctgatttccaggaggaacattcaaaattaacaggaagcattaacaaactttcctcagaagccctggcgcggcgtaccgcgatagacgaacactctgaacgtattgatgacattaactcacggttgtcacaggttgaatcgcgagttgccgggctgagcaaagctgaaagcaacacttctcagaaagaatcgaagcagaaccagcaaccagtcactaagagcaaaacatcttcaaaatccgggacaggccagatcgtaaaaaagcctgagcggtcagtcaggcgcgcagctgttgaagcaccgtttgtactgaccggcattgagcggcgcggcgggcagatgttcgcagtcgtcatcccccgtggaaattcccaaatatcagatatgcggttgctttcaccgggagacgggatgctggggtggacgcttcgttctatccaggacagtggtaccgctgttttcagcgtgaacggtgcccaacagagtttacaggttcaataa

SEQ ID NO: 134386 - DNA, 726 bp, Enterobacter cloacae
atgaagcatcagatgagaagaattttgatggcaggtgtactttccttgccgctgtgtgtggcggcatcaacagttaccactcaatcgaatcagagtcagcaaacatccctgcaggcatcatcagcaaaccaggttcagacgcagcaacagggtcaacaatgggggctttcagatgaggactggagtcgctatcagtcgttgatgaaaggagccagaggcattatgtcccctggtcttgatcctctcactgccctgggcgtcgagacagataattcatctgagcgccgtcggctggctgaattgtgggtaaaacacgaatacgcccgtaccgagaaagaactcgcatttcaacgagaaataaacactgcctggcttcgtctttatcctgaaacattggccgtgaatatggggaatgccgcgggtatcgctcatgacacacaaggaagactggcgttatttgtcaaagagtcatgttcacgctgtgatgctcggcttgctgctgttatcgccgacaacagaccggtagatatttaccttgtcggaaatgacgtgagcgacgaaaaaatcagatcatgggcaataagccatggcataccagtcgaaaaagtgcgtaatcggcaaattaccctaaatcatgatcgcggtttgtggcagcgctatgggcaaggtcagatgccagttattttgcagcagggagaagagggatggcaaattgccgcattctga

SEQ ID NO: 134387 - DNA, 624 bp, Enterobacter cloacae; identical to SEQ ID NO: 78775

SEQ ID NO: 134388 - DNA, 219 bp, Enterobacter cloacae
atgcgtcagtttcaatcgctgtgccaaatcaccgccgcgaacagggaccatctcagtacctggcaagagtcctctaagcgtgttgagcgcactttcagtcgtaacattcactaccattcctgtggcgcccatccctttcagttcagcaccacgctgccgcagccaggctcgggaaatatcatcatcgccaatcacaaaaacagggggcaaaccgggtaa

SEQ ID NO: 134389 - DNA, 549 bp, Enterobacter cloacae; identical to SEQ ID NO: 78777

SEQ ID NO: 134390 - DNA, 228 bp, Enterobacter cloacae; identical to SEQ ID NO: 78778

SEQ ID NO: 134391 - DNA, 2112 bp, Enterobacter cloacae
atgagcgacaagtacgtgatggaatccctccttcgcccggcggttgaactgtattccgctgcggcggcgggtagcgcaacctttatttgccttacggccccttgggctgtcgcgctcgcaccatcggtcagttgggtgaccgccgcggggtttggtgtactggcgctgaagcgtacatctgaggggatgaaaatactccgttaccgccaaaacattcgccgtttgccccgatatgtactgaccagcgagcagatccccgtcagccagcggcacttgttccttggcaagggcttccagtggtctccccgccatacgcagcgtcttctggaagcgaggcgtccggagtgtgaggtctacgtacaaccttctgttatttatcgcctggcacgcgatctggaaaaaaagatggagtacagcttgccgtggttgtgcaggctgacacgaactgattcggcgctcaacccgtttcgcccgttgcctcctgtaggaggaagccccatttaccatggtgtggaactggatgaaactacggtcacctatgatctcggagaacgtgtagggcatacactggttatcggcaccacacgagtcggtaaaacccggcttgctgagttacttatcacacaggatattcgccgtaaaaacgctgcaggcgagcatgaagttgtcatcgtgtttgacccgaaaggagatgccgatctgttgaggcgaatgtatgccgaggcacaccgtgctggtcgtcaggataacttctgggtgttccacctcggatggccagatataagcgctcgctacaatgccgttggacggttcagccgtatctcggaagtagcatcacgtgttgcaggacagctctccggagagggcaattctgctgcatttcgggaatttgcctggcgatttgtcaatattattacccgcgcgctggtcgcacttggccagcgtcctgattacggtctcatactgcgttacgtgacaaacataggtgaactgtacgaaacctatgttgagaatatgctgagtgaaaaggcaccacagttgctgagtacagtcgaagcgctgttaggtagcggtataagcgagaaggatctgccgcgtcacatgcagggcaggcctaatggcatgaatatctgggctattgagcaggtactggccagcgaagaaggaaaaaaactgtgggacccggtgctggatgggctacgtagcgctgtgcaatatgatcgaacgtatttcgacaaaattgttgcgtcactgctgccgctgcttgaaaagcttacaactggtaaaacggccgcattgctggcacctgactatacggacctgaacgatccgagaccgatcctggactggcataacattataaaatcgcgcggcgtggtttatatcggcctcgatgcactatccgaccctgttgtcgcagcagcagtcggcaacagcatgttcgctgatctcgtttccgaaggtggacacatctataaattcggtctcggtgatgaggatggcagaaaaagttcgaaagtggcgataaatcttcactgtgacgagtttaacgagttaatgggtgatgagtttattcctctcatcaacaaagggggtggtgcgggcttccaggtgactgcatatacgcagactctttcggacatcgaggcccgtataggcagcagtgctaaagcgaatcaggtagtggggaacttcaactcattgataatgctccgtgtgcgtgaaaaaaacactgccatgctcctgaccgaccaattaccggaagttgacgtctaccagaaaacccttacatcgggtgtcactgacgtatcccggccgggagagggtactgattttaacagtaacgttcaggaccaggtcagtctggttaaagtcccgatgctcaacccttcagacgttatcaacctgccgaaagggcaggcatttgccctgcttgaaggagggcgcctgtggaaaatcaggatgccgttgccggctgataacgacgatccttacatgcccgcgagcctgaagcagctggctgacaacatggagcagaattaccgaactggagaatcctggtggacaggcggtgatgcggcatattcgggggggcaaaatgtctcagcatga

SEQ ID NO: 134392 - DNA, 690 bp, Enterobacter cloacae
atgttgctctgggatttgcctgtcagtttaattggcattctgctggggtcgcttctggttagcctgctgatcgaatatgcctgcattgccatactctggcctgacgaaggtgcttcacacagctaccgggtgatggttgcagaaagccactggttgtcggaagggtacacgcggagtttactgatggcagcgccggttgagacgatttcgcggtgggtacataccgcctggaactggttgtttgtcgatagcggattcagccattggcttcaatcattcagggaaactggtcagaaggggactggagttatcccaacgataaaccggttcggtgactcactaatcggctggcttggggagtacctgcaagctacgctctgggtaactctgattttcttcatcagggtgatgatcctttttctgagtctgccgctgttcggcctggtgattatcaccggcatagttgaagggctggtccgtcgagatttgcgtcgttacggagctggatatgaatcgagctttgtctaccatcacgccaaacgttttattaaacccgcactttacggcccctgcatgttgtatctggcctggccgactgctgtctggccaaatctcctgttgctgccatcagcattattacttggcggtgttctggccatcgtcacggcgtcctttaaaaaatacctatag

SEQ ID NO: 134393 - DNA, 318 bp, Enterobacter cloacae; identical to SEQ ID NO: 78781

SEQ ID NO: 134394 - DNA, 246 bp, Enterobacter cloacae; identical to SEQ ID NO: 78782

SEQ ID NO: 134395 - DNA, 366 bp, Enterobacter cloacae; identical to SEQ ID NO: 78783

SEQ ID NO: 134396 - DNA, 381 bp, Enterobacter cloacae
atggccgtcattgatttcctccctgacagactgaacaacccccccgtggtctggaaagggttcacatccggggagtttgtgctggcggccgtcatcggtgttattgccggtatccctctggcaataccgttagctctggttccttttgtcggatggctggcttttccgacgtgcatgctgctgatgccgctgttggttattttttttggcggcaactggattgccagctacaagcgcggtaagccagaaaattatatctggcaacgtctggaggaattgcgctgccgtgcacgtatgtcccgaaccatgattctggatagcagggcgtgggaacttaaacgaacgaaacctgttccgttgatgcgcggagggaaagtatga

SEQ ID NO: 134397 - DNA, 660 bp, Enterobacter cloacae
atgagtcgttttcgtaacggtataaccgcccgcgataatcatattatttcgttacgtatcgcttgtgttttgctggctctggggctgttcgtcaccagtctgggatggatgcgagcgccctcggaactgacaattcacaacccacccgacctgcgttccggcagcacccgaaaatggtgggaggtcccgccatctacggtttacagttttgctttttacatttttcagcaactgaattcctggccgaaaaatggggaagctgactacacagccaaaattgcccaaatgagcccgtatttgacgccgtcctgtcaggattttctcaataaggacgccgagatgcgcaagaataatgacgagctgcgcgatcgtgtacgcgtggtatacgaaatcccccgtcgtggttacagcaaccgcagcgtgaccgtcattgatgaagatcattgggtggtacggctggacctggtagctgacgaatatttccataccgaacccgttaagcgtgccctggcgcgttatccaatgaaagtggttcgctgggaaggtgacccagagcgaaatccgtttggactggcactggattgctatgacagcgcgccacaaagacttgaggcgatctccttgcctgagccagaacaaaagtcgggagcattcaattga

SEQ ID NO: 134398 - DNA, 900 bp, Enterobacter cloacae
ttgaaaaaattctcagtgatcctgctgaccctggtactggtctcagccggagctcgtgctgttgagcttatgaaatgggaacggataccgttgcagattcccctgactgtagggcaggagcgaatcgtttttgtaaacaaaaacgtgcgagtggggtttccgcccgcactcaacgacaagctgcgtattcaaagctccggaggtgtagtttatctcgatgcgaaagaagcctttccggtgacgagactggaacttcagaacaaggaaaacggggaaatacttctacttgatgtttctgctgcccccggtaaaaccacgcgggaacctgtcaaaattgtctacgacggagaagtggctaccgcttcggcgaccgataaacagacggtcagcagtgatggggacagtgccggccgtcagtcgtcggcagaggcaaaggcagaaagccggaggcccgcaaaactcaatgcgccgctgcccgttgtcctgactcgttatgccgcacagaacatttatggaccgttgagaacggtagagcccgtaccgggagtaagtccggtttcactgaagcttcccccccggatcaccacacttatgccctctgagtccgtcagcgtcacgccgatggctgcctggagtctgcagggcagcagtgtaattgcgctgcaggtgcgtaaccgatcagcagtaaaggtcatcctcgaccctcgttcgctgcaaggtcagtttactactgcgactttccagcaccgttggctggggcgtgtcggtacaccggaagacacgacagttctatatctggttactacaggacgtcccgaaagtgcctttattgctgaacagcgtttacccgaatctgaaggaaaggagagtaagcggagtaaccgaggagcgcataaatga

SEQ ID NO: 134399 - DNA, 1527 bp, Enterobacter cloacae
atgaaaaagcctgcttcaaacctgcttgtgaaaattgcggttcccgtcgtagtggtgggcgccatcatgattggggttaaatcctgtacagataaaaacgataaaaatgaagcaggccagaaaacctctaatgtcgcccttaaggatctgacaccagaagatctcaaagcgctgggtgtggaaggtgacaccgcgcaggatactttgcgtaccctggttggtagttaccgtaaggttcaggggcggcttgacagccttgaaagcgataataaaacgcttgctgatgaaaataaggagctgaaaaaaaatagcaccaatgttgatcagcaaatcagccaggctgtggggcaagttcgttccgaagaggcccaaaaacgtgcacaactgagttctcaggttactgatctgagctcgcaggtgaaccaacttcttgatcaactcaaaaatgggtcctccggcttaacggcaggaaataaaggtaacgctgcaggcagcgatattcctgtgggactgggttatgacaatggtctgaccggaggcgcgggaaatatatctcaaacagatggaaacgggttgcaatgggttgaaccgaaagatggtattgccacggatgcgaacggtcgaccggtctcagataaaaacagtaataacgcgactggtttttcttttgccacctcctttggcgctgcaggtgatgcagccaggcaggctacgtcagcagtaagtacaacggtacagaacaacattcccggatctgaaaaaaatgccgcccctgtttatacccttccggaaaactccacgcttgtgggtagtcgggccatgaccgcgctgttgggacgtattcccattgatggcaaggtgactgacccttacccgttcaaagtgatgatcggaaaagacaacctgacggcaaatggcattgaattgcctgatgtacagggggcgatcgtttcgggaaccgctacgggggactggacgctttcctgcgtgcgtggcgccataaccagcatcacttttgtttttactgatggcactgttcgtacgcttccttcacctgaggggcaaggcagtaatggtggtaatcagaacagccagggtgggaataacagcagtattggctggttgtcagatgacaacggcattccatgcatttcgggtacccgaaaatcaaacgcttctacttatctgccaaccattgccgtacttgcagctgccagcgcagctggtgatgccgtggccgaaaaccagaataccagccagaccaatggctatggtggtgtgacgtcaacgctgacgggggatgccggtcaggcagtgttgggtaaggcgttatccggcggtatgcgtgagaccgttgactgggttaaagcgcgatatggtcagacgtttgacgcgatctatgtaccgcctggacaaaaagtggctttacatatcactcgtcagctggcgattgattatgaagaaaaaggccgcaaggtgaaatatgacaatttcagcctcgctggtagcagcacgggcatggactga

SEQ ID NO: 134400 - DNA, 264 bp, Enterobacter cloacae
atgcagaacaataaaaacctcgaatatcgggtggactatataccactgggtggccgtctctttgccggttttgtcaggtgtgataatggcaaatgggaaggtagcaggcatgaagtcaccgaacaggccctgctcgctgtcggaaagaagcttctgagcgagggtaatggaatgcagatgcaactgcctgatgggcgagtgtttcgtctgtcagctgtcatcagtgattcggatgaagcggaggtgcatgttgctcagttttaa

SEQ ID NO: 134401 - DNA, 417 bp, Enterobacter cloacae
atgttgctcagttttaatcatctggccaccattatgttggtcgttgtaccgcttgccctctcgggttgcagtacgtcaaaagaggaaatgttgccgcctggcgacagcaccatgcttgaattatggaacgatggtgcatcggcaactcatgctaccaacgagagcagaacaacacttcgccggccagttacagacagcgaacgtgagatcaatcagcaggtcagtaacagctacagccgcacccaggaaaatgaaattcagcagacgttcccgcgtctgccaaatcctgacatggtcatgtatgttttcccgcatctggctggcgggaacacgccggttccaggctacagcaccgtctttcctttctacagccaggtacagtatgcgttgcctggtgagcgaacggaggatctctga

SEQ ID NO: 134402 - DNA, 2817 bp, Enterobacter cloacae
atggctttccccctatttggccgacgtcgagcgtctcaggatgctcatcagtacggtaacggtccgttttccgtcagtgggtatgaaccgcttacccgggaagggcaactgactcattcagatgaagcgcgtctgtattccactgcaccttccattatcgatcatgttccatggggcgagtatttgccagagcatgaatgcattctgcttgacgatggtgtatccgttggggccgtatatgagattatcccggtgggcactgaagggcgcccggaaacacgtctggacgagatctgcaatatcgctgagaacgccctacaggacagtctccctgaactggatgatcatcaatgggtggtacagtttttctgccaggatgactctgatctctctacttatatggatactatcagaggctatgtcaggccaagagctcagggaaccgcattcactaaagcctggctggctgaacaggagcgccaccttgaaaatgtggcggtggaacaggggctttttgtagacgaggctgtcacaggggccgcctggagagggcaaattcgcagaacgcgcatggtggtttaccgttgggttgagacaccgtatcgtgaccccatgccaccggaggtgctgctgaaacaggtctgcgatcgcctgacagcagctctgagcggtgccggtatccggtgcgaaaagcagaacggcgagcaaatccatagttggctgttgcgctggttcaacccggcgccggcgtgggtcgataagaaaacattgtatcgttgcgcaaaacactccgatcatgcaccgggcgatctgcctcttctgaatgatttcagcgaaagcctctggtttacccgcccgcgaagtgatgccgaaagcggtgtgtggtggtttgatgatgtggcacataaagctgttccggttgcccgcctgcgtactgcaccttccactggtcatctgacgggggaggtaaaacgtggtgataatgtgaatgccattatggatctgcttccggaagggacagttctggccatgaccctggtggttcagcctcaggacaaacttgaagaaagttttgcgagcctgagccgcaattcaatgggggagaatgttgattccctgcgtgctcgtgaagacgctgctacagcgcgtaatttcctgggaaacaaacacaaactttaccgtgcggccatcacactgcttatcaaggctcaggacaaggaaacactcgataaacggtatcttgatctcagcagtaaattactgaactgtgggatggaaccgataaatccagaacacgatattggccctctcagcagttatatgcgtgcgttacccatgtgctttaaccctcaaatggataaacacaactggtacacgcgccttatgtttgtacagcattttgcatgtctcgcccctatttatggtcgtgacaccggtactggtcacccggggcttacgttctggaatcgtggtggtggccccctgtccgtagatccacttaataaaaatgaccgtacccagaatgcgcacctgctgcttttcgggccgacaggtgccggtaaatctgccactgcgctcgataaactggctcagatggtggcaatctaccgcccccgtatatttttgctggaagcgggtaacagcttcggtctgtttggagattactgtaattcgctggggctctcagtgcaccgtgtcagtatcaagcctggtaaggttatttcacttgctccgtttggcgattcacatctgctcatgcaggcgaaacctgagacgctagtgacaagcgaagaggccctccctgacattgatgaagatgatgaggacaaggacgaagaacgtgacattctgggtgaaatggagattgcagcgcggttgatgatcaccggtggtgaagcagcagaagaggagcgaatgacacgcgccgaccgcggtatgattcgtgaggcgatactcattgcggctcgtaaagcgtttgacgaaaaccgccagatgctaccggaagatttaatgttctcgcttgagaacattgcccgcgatgtcagcatgggagaagacggccgcgagaaacgcacgccagcgcgacgtgcgcgagctgaagagatggcagaagcattacgcatgtttaccgaaggttttgaaggggagttgtttaaccgtccgggcgcgcaatggccagaggcagacgtgactattgttgatttaggtacgctggcgcgtgaaggctatgaagctcagatggccgttgctgtcatctcgctgcttaatacgattaacaacatcgcagaaagggaacagttcagcgatcgggatatcattgtgccaatcgacgaagcgcatattgtaactgctaacccgctgttgggcccgtatgcaaccaaaattgtcaaaatgtggcgtaagctcggatcatggctgtggttgttcacacagaacctggaggatttccctgacactgcgaaaaaaatgctcaatatggcggagtggtggatctgcctcgttatgccacctgatgaagttgaacaaatagcgcgatttaagacgctcacagaagagcagaaggcgatgctgttgtccgcgacaaaacttccgagaaaatacacagagggagttattttgtcccgtaaggtacaggcgttgtttcgtgcggtcccccccagtttgtacctggcgctgggaatgactgaaaaagaggaaaaagccgaaagacgggccattatgaatgaattaaattgcccggagcttgaggccgcatttcacgttgcgcgccgcctcgatgagaaacgtggcattggtactattcaggggacaatatga

SEQ ID NO: 134403 - DNA, 408 bp, Enterobacter cloacae
atgaaaaaactgattatggcgacgccgatcgttgtaccggacaaggcttttattgcctctgttatttttaccgttccgccacagggttctgcctcagtcggtgtggctgacagtgagtcgattaagcatctgcaaggggagatcgttaagagactggagcagcctgtattgctgtcggtctatcctcaccgggttggccggcgcagctgcgttgcagtgcacctcagcgacgtgcatgagaaaaccctggatatcctgataactgttaccggcaatacactctggccagcagaacaggagtaccggtcgggtatccgatggaatatctgtgtacccgatgcaaccgatatgctctgggttcttaaggaaatcgacagggtgacctgtgacaccggatgtgacttataa

SEQ ID NO: 134404 - DNA, 408 bp, Enterobacter cloacae
atgaaaatgccattttgctgcctggcagcactgttcctttccgtcggtgccagtgccggcacagtgatatataccgactcctctcatgccatagcagcaaatcctggtccggatgtctccgttgttgagctcgatgcgcccgaacgtgcacaggctgacattttcggtcagttatctgccgatcccgttcttgcagaacaacgtgcccgggcagtgatctcttccccgaatttccggcagcagcaacaacaactggcggaagcttatgcgggtgtcactcatgcctggtccctcggcctggaaaaatacccggctgtggtttttgatgacgtctttgttgtctacggtacgactgatgtcaacgaggcgacccgtcagctcgctgcctggaaggagaagaaccgatga

SEQ ID NO: 134405 - DNA, 972 bp, Enterobacter cloacae
atgaaatctttctccttccgcccacgtcgactggcgatcgccacattgctggtttgttccggcaccatggccagcgtcaatacagcgaatcttctggccagcgcggcaagtacagactgtatcagctggcgtgtcagtggtatctgctactggttattgtgtactccatttggttgcacggtgaaaacctcggtaaaagtgacgcatttcattccggaggctgtggtatcggcttacctcaatcccggagataacccctggactgaaatggccacagttagtgacgccgccagcggtgctgaaggttccctgctggaaagtgtgacgggcgtgagtacggggggcggtcgtcaggagatgaaagctcccggggaacgtaagcagaacctgcatttctattacggcgacgcctggggccatccagctacgaaaatcattggcggtatggtgccgggctattcatgcgacagcgctgctactcctttcatgccctatttcaacagctcactggatgctctggtctggcgaacgggcgtcccggagaccctttatcccgaagcactcatccccgggcaacgagaaatcggggaaaccacatccggcaatatgtgggggaacgtttatccacgtagcgggtttgtcacccagacagacagttacaaatcagcagcggttgtagttcagcgtgtcgctgacgtcattacccgctccggccagctccatgtctacaacccccttacgggacagaagtccccgggttactggccccccgagccggtaaaagaaaataccggcacgaaaaaccacaaatggcagcgactttcgcctcagttgtcccagacctgtgcagtgtttcccgacaccaatggccagattgcccaggacggtaactatgcctgggcattgtggcaaccgtacagctgctgcaaacgtcgcggccagacgttcctttccagcaccgatttctcataa

SEQ ID NO: 134406 - DNA, 1395 bp, Enterobacter cloacae
atgaaaaaagcaggacttttactgatttttgcctcgctgccggcaatggcagctgatatctctttgtcttcatcgggggcgtcagttagcggtaacgctatcagcgatgggctcttttattctattggtggtggttcggttatttcacccccgcccagtcgtaacaatatgtccaggataggcattaatggtggccttagcagtgatctgatgtgtggcaatttcgacatcaaaacaaccgttggcaaccagctgaatggtattaccagcgggtttaaggatttgatggggaatgtgattcagggggcgaccggtgctgtcatgagtatgccggcaatggctattcagcgcgcaaaccccgggctgtatgaaatgctcaccaatggcgttctgcaggccggtttgagttttgataaagcgatgttgaactgtcagagcatgtcgaagaagctggctgattataccatcggcaataaatggcagcaggtagccgtctctgaagagtacaaagatattgtggccacaagtggtggcgatgcggtttccagcgaccagaaactgcaaaaagcaaccggagaggaaggcgtgacgtgggtcggtgggcagaaaaggggaggtaaggggcagcccgcaattcaacccactcgggatctggccaaagctggttataacatgatgaataatttgccagtgaccagtaacagcagcgtcggctcctcgagctgcaatggtaccgcatgccaacgttataaatcttctgaagaggccgcagcggccgttgttaaagtgcttggtgatcgctccatcaggacttgccgggaaaccagtgaatgtaccagtggtggaaccgataaccagccgggcagtgctgtcgctggtactggcttttctcccatccttgaggatgccacgaaagagaatctggagcagcttagtaagctggttagtggtgaactgcagcccaccactgataacctttccgcactgaaaaccggcagtctggttgtcacccgcggggtaattcaggcattacgtgacgatccagacaaagcggccctggttcaacggcttgccggcgaactggcgatgtccgataccgttgaaaccgcgctaacaatgcgcaggatgctcaccaccggtgaatccgaacctaatgctgcagagcagccggaagctattgccgagggtgatcgccgcatcgatgccctcgatcgcgagctgacggcgctgcgtaatgagatggagttacgcaaatctatcagcaataacagtctgcttacggcactggaacggcagggaacaaggaatcaggataaccgtctgcagcagaaagccggtaacgaggaccagggcttcagccagatgggccagtctcagtcttccggagcaaactga

SEQ ID NO: 134407 - DNA, 339 bp, Enterobacter cloacae
atgagacttaacccgctcagcggccatattggccgcattctccttatggtgctgctcattctgttgatgacggccagcatgtttgctatcgcagcggtatttatggcttacgaccctgatggccacatcacacggcgctggttgcatgacagccgatggggactgtttgcctggcgactggttctttatggctgccttattaccgcctggatactgaaggtacgcccacaggcattaatccgttggccggacggacgtccacgtcttgtgcgtatggaactgatgggggtgttgttcctggtagccacagaatatgtggcctggacaagcgctgtgtaa

SEQ ID NO: 134408 - DNA, 1542 bp, Enterobacter cloacae
atgacagcaaacagttttctggaatattttctcgttctctttggctgggtaatgaacaatgccatgtggagcattctcagcaatacgggactttttgcattgccactggtggtcagggttcttggcgtctggctgaaagtgagggaggagggggctgacgaggggaacaaagggctccttgcccttccgcgaatcgaacatgcactgtatgtgtcttatcttgtgatgctcttttgctgtattccgctgttgccggttgatatcagcacaatcaagttcgacagctcgcgcgctaaacagtgtggcgtcagtgtgccgacgccacagaattccggctacaagggactcgttaatgattttgacggtcgtacggccgaggttccagtatggtggtatctcctgcatatgatgtcgaagggtacaacgcaggcaatgattgcatcaatcccatgcggtacgaatttgcggcagatgcgttttgacgttcagaacacgaagctgcgtgatcctgtgttgctgcaggaggtccaggaatttgcagatcaatgttactcgagagcatatttcaggttgaaaaacagcaacagccagctcagtgatgccaccatcaactctgtgggctggataggtagcagctactttctgaatactaccggatattatgactactacacggctatgacgccacgtagccagtggccttacaacagcagccgggacagtggctatccagatactggcgcaggtggatatccaacatgtaagacgtggtggtccgatggtacttccgggcttcgcaaaagagttctggccagctttagtgataacacacgtaaggagatgcaacgccagttccccggacagcagtgggaagaaatcgccctacgctggcttgtcagcccacgtaacgcagatctgtccgggggcggtaccacttatgctgttggcagtagcgatacaaccaccggagtagttggtaatcttacacgccttacctcgtctattggtcttggactgaaacaggccgaagcgttacctggttttgatgcattgaaacaggcattgccaatgattcaggcattattgttgatgatggtaatcacggtcataccggcattactgatgttcagcgcctacgatccgaaaactatttttactatctccttcgcgttattcgctcttcagttcatcacgttttggtgggagctggcaggctggcttgatgacagattgatcaccatcctctatgacaatatggctgagcaggggattgcaaacagctcggtgcctttcgcggctttctttagttcaacggctgatggatggattatgaacctggttctggggatgatgtacttggtatttcccgcgttttgggtaggaatgcttagctggattggcgttaatttgggaacagcaataactactggattagaaaaaggtggttctcaaccacagcaggcgggagccgaggctggaagaggagctcagcagattgttacagataaagtcgggggagctataaaaggaagcttcaaatag

SEQ ID NO: 134409 - DNA, 291 bp, Enterobacter cloacae
atgagcgaagacggtttcaataaagatgacctaagcagcacctttgcgcgcttcaccacaaaacgccgcaatatcgtttgtgatgagtccaagttaaagcggaaaaaacctgagccaattgcactaaccagtgcaaccaatgcatgtggaacctccgtactcgatggtatagcaaatattctgaccataactcccgaacgtaaaaaacgaaatgacgaatggagagcacgttgggaagaagaaagggctgaatgggcagatcaagataggaaatggactgataatagatga

SEQ ID NO: 134410 - DNA, 3120 bp, Enterobacter cloacae
atgtttggaaaacttctaaaaagtgtctcatggcaggtcagagctgagctccgacggagcctgaagtcgaaccgggattacaaaaaactacgctggaacccggtggagagaatacttattgcctgcaccacccattacatccgggctatgctggttctctggtccgcagccttcgcggctgttggcgtggtcgaatattttcgccctgtactactacctttcgctctgcagcatttcaagggtattaccacgctttcaggttggatgtctaatttactgggtagccagttgactattatcggtatcgtttttccacttgtcgtgggccttataagtgttctgtttcaaaaaaaatcagcaaggatccatatccaatcagcatatcaacttcattccggatatttgtttgctggtctgagtggactgtcacttgccgcatttattgtgttgggcggtatgacgttatctgttggtgacagataccttaatacagctttcgccgttactgcttttgtgtggatgcttttcaatattattctgtctatctggttcttcgtctccagtctgaatgtcctggatgagagcaagcgcgatcgactaatgaataagttttttttgtctcagatagtggatgactacattcaaaaagcatatattctggcgtggctgcgctacccgggggctaacgtaggtgaaaattacctcggtaatattaaaacactgccttactcaatctctgagaaagacgacatgcttcatgttaaatctaatatcagtaaaggtgatgttgttacagatatttatgttaggccatttttatttctgctgagaaggctagaggcggtagatgggcaggatgcggaaattatcattttgccctcctttggtgttcgttctggtgaactgactttattgtcatcgagaaatatcaagcctgtttcaggattgtggcggtggttatttagccgttgtattgtaacagggcgccctgagaacaaaagggatctggatgatattacttttgatttctttggtgaggcttacgatgcacttaacgataaaaatattagcgtcttcagaacagggattgaacgattaacagatacctatacctctatcaaaagaagttacaattacggggtcgataaaaattatctggatgaagtaaaagaatcaggttttagccatactttcagtgattcattccattatgaattgagaaagttttttcgtgaatccgtaaaatcaacggaatattcaggcgaatatttccgtgaatcgatggccattccattgcaagtgtacagaaaaacacagagcacgtgttttaccgatttcagacagtttttactttcgcttttcagggtgtggcatgtgttaaacgagtggaaagcgggactggggggccccctctcggccagccaggagctgactcaccaggcccttatccgcgagtatatcggactgtgggaaggctggagtatgaccacgatcactggcaaacccgggagtgaagattcttctggccgcctgatgtatcatctgcataataccgccaggcttcttattccgtcagtggttgccgataatgcctcttccgtgcgatatgctcacgacgttctctgcctctggtttaatcagagccggtttacacggtactgggaggaagagtaccgctggcacagtttcttcctgactccggattatctgtcccagaaggagactgatccgcagtgggatatgttactcaggggcagcctgtataaaaaagatgcggccttgtccattatattttcaaatgccttatctgatttgcggttgttaatggcagggtatcttattgcgcattttgaaccgcaaaaaaatatagacttagccgatcttgtgaatcatctcattatgtctgaattatatgaagatagagatacacatgacacgctgacgcctgcattcagatgttctgtcgatatcattgacatgatactgagaattgagcactgtaatctgcatacgaatacaagctggtacagtgggttatccgaaaccattgaggttatgaactcatataatgaaaggccttacattcctgggcgtatgtatacaggagtatatgaagatttagggagtctctacggggcgtttgccttgctggctataaagctcgcaaggcctgcggaacaggttacacagcgtgttaatgaagccctggcgggagggttgttttcctacttcagtaaacacagaataatttctattcttgaacgactgaagcgagacccttcagtcccttatgaaggctatatcatttcagaagcagattatgtaacgaatgtggttttttttaatgatgttctggataaatacattgatgttttcagtcgtagtaaaatggcagatatccttgctgctgaagtagaccaggaacgactgcggaataccgatattcgtcttacaaaagaatccccagaaatattgactgaacatgctctacttaaacatttcagcttttctcaagatacagagtgtaatcgccactggcaggtcagatttatctcaggcaatgtttccaaagagtatgtttccagagagataaatcgtaatttctacggagattttccgtctgtatcagatgtaaggtcaaatattctcaacgaactgcattatttactgtggaaatcacaggccaaactaacgatgaaagttaaaagcctggatgttcttctaaaacaagtcgcgcgacggtccgctgatcaaaagaattacattctggtgatctatggttcttgcttcagtgaagaattgagagatctggcctatcagcgggaaagacatgcagcttttgacatacatgctgatgcgtcagccaggggtatccactctctgcccttcagggtaaataactgtattatttaccttgtccacaattccgaacaggagtattcacttatggtcagcacggaatcctttggtgaactcaggctgttcaggtatccggatggaacccttttcaacaccttctaccgcagcagcgacgatccacttgaaggtgtaatgaaaacgctctgggagatggagatggaaatcactgatacaccagtggcgcggtttgaacatcgctga

SEQ ID NO: 134411 - DNA, 285 bp, Enterobacter cloacae
atgacatttaaagagttaatcagtgtactgagactcatgcactataaactggagtggctgtggatcctgaattttggcaccggtacaccagaacttataacgggtgggcgttcacttgctggatttgatgcccagagcaaaacatggcgttttaatgctgccgaccggtgcattaaagaaagcgataaagtctggccacccctcaatcgccagtcagttatgcagctggatatgggagcagttaattatataaatcggatgtacggtggtgattctgacgattga

SEQ ID NO: 134412 - DNA, 819 bp, Enterobacter cloacae
atgggaagcctcaaagaccagttgatggatattgaagctgaacgatttgatgaatggcttgaggataattacccggatgtagtccccaattctgaagaatgggagcaggccgcgaacctgtactactgggaacaggaggcgcttgcagaccaagcacaatgggatcatgaacacgggctgtttgtggcttccctgaataatattcaggagcgctaccagcatgcaaaacaggaactgaagaagctagatgccctgctcgataaggagcagtctgaactggtgtacaggatgtctttcgtgcatacagttacagtgatggaggcatacctgatgtactgcgccagggcgctgcttgagcatgactggccactttgtcgttttcttgtggagtattacctgaagtccgaacgtgtcaaaaaaaacgaaaagcagtcagctcgtgagatggaacttcatatgttcagacctgctgcgcgcaattatgtttcccgaatgacgtttcataacgttaaaactattgagcgctatttcggtgccgtactccacatcccgcccgtctggcctgttaagccgctgggcatcattgcagactggcgaaacgatctggtacaccgcaacggcgtggatgaatacgatgtgccacgagtcatatcagcgcagcaactgcagaatgccctgcagaaagtatctgacctgatagaggccgctcatctgtccctgcgtctggaactggattatttcggtaactggcgcaccgaggaaaaccgggaaatcatttcatcagcactgtacatccctccagccggagaagaatcctga

SEQ ID NO: 134413 - DNA, 792 bp, Enterobacter cloacae
atgaccggactcgttacccctgggcagcatccggcaccttcagcgctgttaccggtagccatcgactacccggccgcgcttgcgctgcgccagatggctctggtgcacgacgaactgccgaaatacctgctggcaccggaagtcagcgccctgctccattacgtgccggatctgcaccgcaggatgctgctggccaccctctggaacaccggcgcacggattaacgaggcactggcgctgacgcggggggatttttcgctggcgccgccgtacccgttcgtgcagctggccacgctgaagcagcgcgcggaaaaagccgccagaacggcaggccgtgcgcccgccggcagtcaggcgcaccgtctggttccgctgtccgacagccagtacgtcagccagctggagatgatggtggccaccctgaaaattccgctggaacgtaaaaataaacataccggcagaatggaaaaggcacgcatctgggagatcaccgatcggacggtcaggacctggctgaatgaagcggtcgaagccgctgcggccgatgacattacattctccgtaccagtgacgccgcacacgttccgtcactcctatgccatgcacatgctttacgccggtattccgctgaaggtgctgcagagcctgatgggccataagtcagtaagctcgacggaggtgtacacgaaggtgtttgcccttgatgtcgctgccaggcaccgggttcagtttcagatgcctgcagatgaagcagtaagtttgatgaagcagattactcaacatgcgcggtaa

SEQ ID NO: 134414 - DNA, 1275 bp, Enterobacter cloacae
atgttcgccttagccgacgtgaacagcttttatgcgagctgtgagaaagtctttcgtcctgacctgcgtggcaaaccagtagtagtgcttagcaacaatgatggctgtgtgatcgcacgctcaaaggaagccaagattctgggtataaaaatgggcgtaccatggtttcagctcaaagcgatgtcatttccagaacccatcgtcacgttctccagtaattatgagctctatgccagcatgagcaaccgtgtaatgtcccacctggaagaactggcaccgcgcgtggaacagtacagcattgatgaaatgttcctcgacatccgtggcatcgatagctgcatgaattttgaggatttcggccggcaactacgcgagtatgtccagaacgggaccgggttaacaatcggtgtggggatggggccaaccaaaaccctcgctaaatctgcgcagtgggcatcaaaagaatgggcccagttcgggggcgtactggccctgacaccaggaaacctgaagcgaacggagaaactgctgtccctgcagccagtcgaagaaatctggggtgttggcagtcgcatcggcaaaaaactgaatacctacgggatcaccactgctctgcagttggcccgcatgaacccgacctttgtgcgcaagaatttcacggtagtactggaacgcacggtacgcgaactgaatggggaagcatgcatatcgcttgaagaggctcctccgtcgaaacagcagattgtctgtagccgctcctttggggaaaggatcacaacctatgaggcgctgcgtcaggctgtttgtcagtacgccgaacgggcagctgagaaattacggggagaacgacagtattgccggcacatctcggttttcgtcaaaacctcaccatttgcagtcaaggagacttattacggcaacgtggccagtgaaaagctgctccttcccacactcgatacacgggacatcatcaccgccgcagtaaaagctctggatcgtatttttatagatggccatcgttatgcaaaggccggtgtgatgctgaatgactttacacccaccggagtttctcagctaaacctgtttgacgagatacagccgcgcgcaaacagcgatgagctgatgaaagtgctggacgggatcaaccattccggactgggaaaaatatggtttgccggacgagggatagcgccggagtggcaaatgaaacgtgaaatgctctcaccttcttatacaacgaaatggtcagatctcccttgcgcttcgattagataa

SEQ ID NO: 134415 - DNA, 1188 bp, Enterobacter cloacae
atgtgtgcagaagaggtaataagctccgtaggtgattttcttaaggtggtgaaaagattctcaccgggaaatgaaaaagttttttatcgtgggcagggaaatgctattcatggagtgaattccagcctttatcgcttgttagataatacgaaattaaaaccgtttaatataacacagtataattttattactcaacaaatgcagactgatgacatttcagagtatgtgttggcacataagctttatgagaattttaaagataatcatgttgtgtatcctgatgtgaatataatcagcggatacactatgaacgaaattgatcttcatgtgacagctcaacactatggtttatcgacaagggttatcgactggacaaaaagcccattagttgctctgtattttgctacagaaaaaagaaaaaattcagatgagctaactgatgcttctgtttttatgatttgggatactccagatagtaaattagatgtagtgcaaagctcgaaatttctcgctgcaataaaatcagagaaagatgcttacaaggaaatttaccgtcgaagttctcagttttataaatctaaccatgctctttatatttcgaacccttctgatccagttttattgaaaaatataaaagattatctggatgatgtaagttcactcttaattcattatgaaccagggacagggattaaattatatttgaatcaaagccttcatctttttgatttaatgactctgaatttcagttttactggtcaaaatcttgtcacccgtttgtttgggagtttgacacaattcttaggggatctagactacaattacagtaggagtcacgataacgttgatatttttaataagcatcagactataataaaaccactaccgataaatcaacgggtaaaaaaccagcagggcgtattgcttttttcaaataaaataaatgaagaagtttatgcggcctccatgtttggtgcaagtaatacggtgtcgaaaatagatgaggaaagtctttccggtttacaatcaaactcggggcttttgaagatagtcattccaaaagagaaaattattgaaatcaggaaggaactggatttatatggattcactaaagaattcatatatcctgagataatgtctttcacagagtatatgcaagagaaaatagtttcagaaagtcaaaattga

SEQ ID NO: 134416 - DNA, 216 bp, Enterobacter cloacae
atgttgagttattgcgaagctccccaggtctctgacctgttcgcggtttacaccgggctgaaattaatcagtctgcttccacacaccagtatgttgactggtgtcgccatcgatatcgtgtcgattttctcctttcagaatgaagtccttacccgtttttacgggaaagacgtttggttgataaatgaacaaacagtgaatgaagtacgtttttaa

SEQ ID NO: 134417 - DNA, 891 bp, Enterobacter cloacae
atggcaaaactgaataaaaatcttaaaacacttgccaggcaggcagggggaagttttaaaaccgtttctgaccgaatgaaaattgcggacaggtttgccgaacgtttattaaaacttaatgttcaaatcagagatattaaaaatatcaagacggggcatatcgagttgtatatgaagagccgcctttccgaagatatttccagacgcacacttcagaacgaaatggcagctatccgggctttgttacgtgttgcggggaaaacattcatggcaaatccttctcatgaaaaactgagcaatcaggctctgggtatttcggaaacgagccgggatggaactaaggttgctattcccgatgcttattttcggcaggtattgacgtgtgtagagcaaaaggatgatggcgttgcatgtgcaatgagattatccagattactcgggttaagaacagaagaaacagtacagtctgctaaatcgttgcgtacctggcaaaaagctttactcaatggtaacgaaaaaatacgtgttgtatttgggacaaaaggaggacgaccaagagatacaacggtattagatcgcgagtcaactctggctgcaatcaatgcgtcccttaaacatttgaatgaaaataatggaaagttgattgataagccatcattacatacagcgattgaacgttatcgcaatgttgtccgtgagtccggattaacaggaaaatatgcgcctcatagtttacgctatgcctactctgttgatgtcatgaattatcatatgaaaagaggtttcactaaagaagaggcacaggctctgacatcaatggatctgggacatggcgatggcaggggacattacgtggctcgtgtttataatatggtagagggtaatgagtaa

SEQ ID NO: 134418 - DNA, 429 bp, Enterobacter cloacae
atgcaaaaacaatatttcagtcagattcgtcgtcagttcttcaacgtcaccggtatgttactcacttcattcatcgccattcctgccctggcagcgcagggcggcttctccgctgagaaagagcctgtcgtcactgagcgcatgtacgccggtcataaagttcagcaggagaatggtcaaagtcgtattcaggccgttccttcaatgcgcgaaggggcgtgggtaacgctggaaggcaatgttatcagtcagcaacaggaggaatggtacacattccgtgatcctaccggcaccatcaaagtgcgcattcagcagaaggtctggaacgggcaacatttcgacgctcaggatctggtgcgtgttagtggccaggtaagccatgaaaatggtagtacaattttagacgttgcagttatcagcaaaccctaa

SEQ ID NO: 134419 - DNA, 954 bp, Enterobacter cloacae
atgaaatatctccttctcatcctgtcgcttccgacagaaaacgccgccgtccggatgcggatctggcgtgcactcaaagcgtccggagcggcagtattgcgggatggtgtctatctgatgcctgaaacagaattatgcaggatgactctggatgctcaggcaaaggatgtctgtgatgctggagggatggctttggtactcaatactgaagagcctgaaggttcctgtttcgccaatcttttcgatcgtggtgaagattttgcggtactgcttgtagagatctcacgtgcacagggagccctgaccggggggaatgtccaggaaacactcaggctggttcgcaaactgcgaaaatcgtttaccggtcttgctgacatcgacttctttccgggagaggcgcagcgccaggcggacaatgcactacaggaactggagatggcctgctcgcggatattgtcacctgatgaacctcatatggtgatcggtaccatcccgaagttacgcataagtgactatcaacagcgagtctgggcaacacgacggcgtccctgggtggacagactggcctgtgcgtggttaatccggcgctttattgatccccgggcaaaatttctctggatgagcaatccggcggaatgtccggccggagctatcgggtttgacttcgatggggccacattcagtcatgtggataacagggtaacttttgaagtgctgctggctggtttttctctggaacaggaggggctttcacgcaccgggatactcgtgcattaccttgatgtcggcggtgcccagcccccggaggctgccggggtggaaagtattctggcgggattacgtgaaacctttaccgacgatgagcaactgctgaatgcggcctgtcccatttttgacagccttctgctgacctacagcaaaagcgcctccagcgacgataagccgggtcattaa

SEQ ID NO: 134420 - DNA, 1434 bp, Enterobacter cloacae
atggacatcaataacagcagttcttcagacccggtatttccctctcagcaaacaccggcatatgaacggcacggtgtgtcttttcgagaagcgttgctggtatgggtgcgggttgccgcgctgagttttggcggaccggcaggccagatagccgtgatgcacaggatactggtggaagaaaaaaactggatcagtgaaacccgtttcctgcacgccctcaactattgcactcttgttcctggtccggaagcacacaaactggccgtctatatcggctggttactgcatcgcacccggggagggcttgctgccgggatattatttattctgcctggcctgctggccctgggaacactgagctggatttatgccagctatggccagattggcattgtccaggcgctcttttttggcctcaaggctgcggtgcttgccgtagtgctggaagccgtaatgcgggtcggccggcgggcactaaaaagccaggccatggtgggtgttgccgtcttgtcatttatcgcgatatttgtgtttgccatcccttttccgttcattattgcggcagctgcgctgatcggatttatcgggagtaaaaccgggatcagcgcttttcagccccgttcaggctctgacaaacccgatgcggcggatgattccggggcagcgattgatgtcgcgtttgctcaggaaatccctgaacacgtgcgaccttctcacagaagagccataaaagtgacgctcctgggtttactgatatggctgggaccgctgatggcttttgtggtcacgatgggggttgataacgtctatacccatattgcggtatttttcagtaagatgtccgtgctcacgttcggcggggcttacgcgatactgtcttatgtggcgcaacaggctgttgaacattttcactggcttaccccgggggaaatgttaatcggactggggatggctgaaaccactccgggtccgctgattagcgttgtgcagtttgtaggatttatggcggcattccgcgatccgggagtattcagcccggtgctggccgggacgctgggcggtattttagccaaatgggtgacctttaccccttcgtttctgtttatttttatcggtgcgccctatatcgaggcattgcgtaacaacaaggcactcaatgccgtactgtctaccatcaccgccgctgtcgtgggagtgatactcaacctgtccgtctggtttgccctgcatacgttgtttgcgcaaattaatgttgttcgcacttttggcatggtcctgcaggtaccggtactgtccagcctggaaccctggtcacttgcgctatcctgtgttgccatgctggcgctgttccgcctgaagctgggaatgatgacgacactggccacttgttgcgccgccgggattgttcttcatctactcggtacaggaccctga

SEQ ID NO: 134421 - DNA, 417 bp, Enterobacter cloacae
atgcattacaccagcatgatcaatccgctcgcgttactgagttgtgactcacccgcttctgcaaaaatcattgtggattacgtaaaaactcagcttaacgttcgtctggataacaaactcatagtcgacgcagatcctcaggttcctgctgacggccttcctgattacctgacttttctcagacatgtcgcgtatacagttggttttgcaactgagcatggcttcataaaacatacctttgtcgaagaagcagtgagcgagcttacgcttctggggacagatgttcacagttttcactggagtacagcttttcttcagggcgttaccaggtctcgcgaggaaaaagagctggacgaagctacagagcaattgcgcgaaatgttttatcagagcgcccatttctcagacatcgcctga

SEQ ID NO: 134422 - DNA, 366 bp, Enterobacter cloacae
atgaacgagttaattctcaccgaagattttcacatccgtgccagcgagcgtaatgctcacaaagttgcactggctaaagcggaaggcgaactgctgagtatcgcagcgcttcgccgccttgacctaaataccgggacagatgaagacggctttccgtattacgtctgggatatggcttctgttgcccgggaactggctgaactgtatgttcgaaaacttataccgggatcatgggaggcattctttaacgacctctgccgcatggcagaaggtattgataaagaagcctggacatatttctacaaaagcgcagtcaaagacgaagaggcctttctgtctatggaacgcagcgatgctgatttctga

SEQ ID NO: 134423 - DNA, 309 bp, Enterobacter cloacae; identical to SEQ ID NO: 78834

SEQ ID NO: 134424 - DNA, 624 bp, Enterobacter cloacae
atgattcgctttacctcaaccgaattacgccctcttttatcacagcagggcggtatgcaaaggccactgctgcttgaaaagaaccttggtatatacatccgggttccggatgaccgaaaccccggcgaatggctcagggcatgggcggaaggttgtaatccctcgaaagatgcaaactggtcggaaaatgcagacctgttaattcccgggaaggaatacgcttttcagacctttatggagcagagcaaattcgacgccgttctgaacgaacaccacgatctttttatgatgccatcggccggtccactggggactggtatgacaattcgtaaggagacctgcccgccagaaaaggtgtatgtcctggtggaggaatatcgcagcaatattcgctggctctacgatcagtctctccggcatttacctgcctgtgtagggaatgcggaacgtctgagctggcgctcacaggcgctgtctgtgcttgacagggtaatccgtctcgactgtaaacgggcaaaaccggctgatcgcacgatgtttgagagtgcggttcgcagcgtacgcagcagcgtcagcgaggtgatgtctgatggctctttccgttacgcgggaacccgccgctag

SEQ ID NO: 134425 - DNA, 993 bp, Enterobacter cloacae
atgaacaaatccattcgcggccgtaaggccgcgccggctcagaaagccgatctttaccagcaggtcaccgacaaaatcattgccgccctggaaaaaggggttccaccgtggcgccggccgtggcgttctgcacagaacgtacatggcagcgcgttaccggtgaatgccacaaccggccgccattacagcggagtgaatatacccttgctgtggatgtctgctgaagagcggggattttcatccgatcgatggctgacataccagcaggcgaaagccgtgggtggtcaggtgcgcaagggtgaaaccagctcgatggccatcatctacaaaccgtttgagaaacaggcgacggatggcaacgataacaagctgttcgataaagacggtaatcccgtcatggagtcgcttgcaatgctgaagccgctgcaacttttcaatgtcgcccagtgtgatggactgccggatgctgttgccggcatgccgccaatagaggcagaagaggagcggcattccatactcagtgaacaacaacaggggcaggtactgtcagtactgaatgcaaccggtgtggtttgcacatcgtaccgacaaaaccgggcgtattatcagccatcaaccgatcgaattgtgatgcctacgacttcacagtttaattctgaagctgattactggtccacactactgcatgaactggttcatgcaaccggccacagccgccgtctgagccgtgaagggataacatcttcttcgcgaaaattcggtgatccagtttacgcctttgaggagcttattgccgaaaccggcagtgcttttctttgtgcagagctgggtatttacggtgatgttcaacatgaaagctatctggccagttggttgaaggtacttcgtgacgataaaaaagcctttttccgcgcctgccggtttgcccgggaagcgtcggattttttactgcagccactgaaccgacaaccggaacagaacaaggctgcttaa

SEQ ID NO: 134426 - DNA, 954 bp, Enterobacter cloacae
atgttttcatggtgcaaaaaccgtctggaaatcactgcgaaatctgtttgtattgacgtgatgcagtcctggattgccggcactgaaactccgcgttatcgacatgccatacggcaggccataaagctgtttcttgctggatgtgccgggatacttaagccaacaaaagcgacagagtttactgcttatccgatgcttacggccgccggtacgggggcttctacttcggcaaaccaggcgttccagcatttcctggaattaatggaaaaggatgcgtggctcgacagcgctactattgcacgtatggagaagatctgggttcagtccggcctggaaacacttaaatgggagagtattccagtttcatcgcgccagataatgtcccagttgatggctgttcactatgctgactggtttggtgttgccagcttcggggaacagttcgatccgcaggagcgttgggaatggctcagtataatgccggccgcgagttgtccctgcgatatgctgatgataatgccgtcacgtcttgcaactgagctgaacggtaacagtggtttgttccgggggcttaacacaactgcagatctttacacgcagctgtatggtgtggagttcccggctggtcataaagccaactggagccgtgaatcactgggcacgatattactgacgttcgataccccctggtacccgccatctggagaggttatgggtgagatgtcagagctgtttgactgtgagatccgtcattactggaaatcagtggatgaaggtttttccggatataactgttttgaccgcggtgatcacgttgacagtggcccctggccggaagaaatgcagcaactgagcaacggtgaaacagcaagaatgtaccttgtctctacggaaaccacagcggtaacgccatatgcggcgccagcggcacaatacgggagcattcgggcctga

SEQ ID NO: 134427 - DNA, 684 bp, Enterobacter cloacae
atgaaaaatctaataaaccatgaaaaggcgttcatttcgcttttcaaccagactgctcgttatcaccatcgacatcaggtttttgaagacttcatcagttgcagcgttattgctcttcagaatgccctcagtttctgcgaaaagcgggagcagaaatatctgcgcatagttgcacgttatgaaaagaaggatgtagtccgtatggcagaattgctggcccatgttgtcaatgggctggatgattcaccgggggattttcttggacaggttttcatgcagcttgaactgggtgataaatatcgtggtcagttttttaccccatgggatgtgggcatcatgatggcgcgcatgcagctcggcaacgttgctgataattttgcggacaagccttttattaccctggcggagccagcctgtggcgcgggatgtatggcgctcgcatttgccactgtgctgcgcgatgccggttattcaccacaccggtatttgtgggtttcagctactgatatcgatccgctggctgcggggatggcttatattcagttaacgctgtgtggagtgccaggtgaagtggttattggcaactctctttgcgatgaacgccgtcgtgtgttgcatacgtttgcgcattaccagggcaactggcccggtcgtttacgtcatgtcctgaatcaggccgcctga

SEQ ID NO: 134428 - DNA, 279 bp, Enterobacter cloacae
atgaaagatgtgtactgggtagtcgaagccaacgggaaggaaattggcgctatgacactggatgagtttgaagacatccacaagtccgtgaaggcaaactggatgaacaggatcgttgccgttatcaggtttttctttttccctgcatataagaaaacaggcctgtactggcctgaaattgaagaggaagtaaaagcacttttgcaggtcagaactgatgctccgctcaccattaaattcgttcgcggagaaatgccaactcagataagactactataa

SEQ ID NO: 134429 - DNA, 648 bp, Enterobacter cloacae
atgtccagtttaccaactggtgaaaatatcaaagccattgaaaagctaattagcgatgcctcagaggttattgcaaagcgagagcgctcagtcagacgtgcagaacgaaatctggaaatagccgaagaccaccttgcagacctggaaaatcagagagatgaactcgtcatagcgagctggggagatgctcccaactggcatggaatatttagtatgagtgaggatgcctcaaccaccatgcgagcataccgtgataaatgggtcggtacgatcgcaggtctgcgtctgactgccttcggcaatatttataccggacagtcagtttacgggatcggtttcacaacaaagtctgaagaagaactggagcaaacaatccggatggtggagtttgttctgccgtaccttattgctgatgagcgaaaagaaaaatcattaatgatttataactaccccgcggtggactgctgccacagcttcgtttttaatatcgaaacaggtacatatggcatcgccacagatcgctttatgtcacgtcaggaaacgatggagtttccctcactggaattcgcacttcgtcatctccaggcaaacaccttaatagacgatgtagataaacggaaaagcctgaacgatgaggtgacggaatga

SEQ ID NO: 134430 - DNA, 546 bp, Enterobacter cloacae
atgaaaaaactcattctttgctcaggtatctcttttgtacttatggctcttgctgggtgtagccagaaccagctcaatcagtttcagcggcaactgtcagatgtcagcacgatgatatcacctggtgagcagcatccttctgaaaaagaggctgaacgtaatgagattgcccaggcattcagcctgccagtcggcgtagatactgctgcactacgcctgaagcagcattatggttttccttctgatgaagacgtttcagccgcaagaaacaatggtcagggaaatgctggctggtcagcatcggcaatttcagaaggtgccagttggtcagcccaacctgggtcttattatcgcatgagccggaactgggcagctaatgatcgtctgacaatagaagtcacaggcgatgctaaacgcagcaacgtgaccgcaatttatcgttcctccaatccggagcatcttaaacctgaatggaccgcgcgcctgtggaaacaaattccggaagtcgcacgcggtacgaaggttagtcgggaggtcgggcaatga

SEQ ID NO: 134431 - DNA, 1218 bp, Enterobacter cloacae
atgatgaaagcttcaatttcaatgattacacgctgcgtttcccttgctcttctggtttccgcagcgccgtcggttaatgctgcgacgaactggatggaggcacgcggtgatgctatgggtggcaccggcgtggcatccgcgcactacggtactgcggctctgtctaaccctgctctgttaactacgtccggaccaaccgatgatttcagcctggtgctgccatcggtgggcgcccaggtctctgacccggataaaaccgtggataaagcggatgatgttaaggacctctgggatcgtttcgacagcgccgtcgctaatcagtccggtgtcagcgaaagcgccgcggcactcaagagtaagcttcaggatttgaaaaacacacatgcgaacggccaggtcggggcttcagttattgcaactgtgccgaaccagacactaccgttcgccgttgtggtgaaatcatggggtactgtctctgtcgatggtaaggtcagcgatcacgacctggaatacctcgacaaggtcgccgatggcacaatccccccttctgcagtggatactgactcacttacgtcaagagcctacggtcgtgcggctgtgatcaccgatgtcggagtggccatggcgcatgagttcgaaactgcaggacatgcctggtcctttggtatcacaccaaaataccagcgcgttgacctgtttaactacaacgtttccgtcagtaattttgacaaaaacgacattgactccagcgagtaccgcaataccaaaaccggttttaacgccgacgtcggtctgtccacaaacctgaacgacaactggactcttggtctggccgtacaaaatatcatcccccgctcaatcgataccaaagaagtaaatggtgaaaagggaacgttcaggattaaaccgcaggccactgccggcgcctcatggcacaacagcttcatcacaaccgcgctcgatgtcgacctgactgaggcgagtggtttcaccagtgataataagcgtcagtttgcaagtctgggtgccgagattaatgcctggaactggatgcaggtgcgcgcgggataccgccagaacatggcttccggagaaggcaatgctttcactgccggcctggggttctctccgtttgatgtggttcacctggatatcacgggcatcgcaggcactgatcgtacctacggggcggttgcacaacttcaattcactttctga

SEQ ID NO: 134432 - DNA, 1017 bp, Enterobacter cloacae
atgaaccgtctgaacgtcacctccatccttgccagtatcatcactgaacgggatgaaaatatgcagcagctggtagcccagctttcggacggaaagaaaacgtctggcagccctattgcaatacgttttaaaccagctgtcagggatttcgtcacactggtatcaggacgcctgggtatttcatcagctgaactggtcaatattctcgtcgagggtatcatgcgcgagacgcttatcccccgacaggctgtgatcacacatatccacgaacggttctggctgctgatggatgagcaccgcctgtcggtactggacgtggctcgcctgctctcggactggaatatcggtctgagcgttctggaaagccgtgaaagaacgatggattacttaactgcacctttgctgaaacagctatctgactggttctgtgtaagtaccagatggctggaaggaagtgatccccggccagtgtacctgaccgctttcagcgaatggattcaggttgccatgataattaaaaaaagaattcaggaatatacatctgacgacaacctgacccgtcctgacatattcctggtcagagagaatcaatacacctcaggagatatcaaagacgaatccggacatgttttcatttttattcggcgctataaaaccgttaataacacaacaattcgtgtagttgaatgtatcgggcattgtccatcttcaggtacttataaaacacaacttaattcattcctgagtatgagcaacattctcttcagagcgcatattctcaacagtttcgacacattttatgcatccggttatttactggatgcgctgagagaaggaaagatacttccggccgctgcactgtgggaaattcagaaacttcaacaaacagagtcaggtaagttttctcaaaatatatggaccgaagaggaaagagaaccttttcttttccctgaggaatttataacaccagaatggagtaaatttgttagccaaataacagccctcaatattaagtga

SEQ ID NO: 134433 - DNA, 561 bp, Enterobacter cloacae
atgcaaagattagtggtctctggaattatcctctgctggggtcttgcgagttacgggctcatcgctttaattacggggtatcaggatgggatggtgtatctctgggggcttgtattgatatcccctttttctctgagagtggtgaactggatgcagcgcagactcatcagccagccctgcatcctgagctaccataagcgcagctcaaggatattcgtgcatctgtcgccaaaccagccaaccgtcagtatttcatccgaacgtgtggcctggttctggaatggagtgctaaccagtatagaggacgctctcagtggcagagagaacaccatcgtgattgcctcccatctcctcacctcttatcgaattaaacgtatcagaaggcatcttcagattcaggccggacattaccgaagccatgtcatacatgtccccttcacacccgctgcgcgtgcagttatgcaactggaaattcttcttgcacagtggcgctggcgtgtaccgtccagaacgttatggcccgttcttgtcatacgaaaaactttcaatccggaaaaataa

SEQ ID NO: 134434 - DNA, 1539 bp, Enterobacter cloacae
atgcgtggactgaaatggttaacaggccttgggctggcagtcggaacggaatactcagtaaggccatccgtgcagccggcacaagcgggagggttccggaacgtactgtccggtcagttgttactgggaactgcggagcgacagaagaacgtccggatgttgcgggaaaattgcccactgtcacagtcagcctttgacgaattctggctaaaacccttagagcaaatggctgctcgcgttcaggaagtaccggcagcctgggcggggccgttcgccacaccagggagctttactgacctcagtttatccgtggccgcaagtgccgtgaggctggtacgcggtatgatgttacctccgggagcgacgcctgaggagcaggcagagcaggggcctgcctggatatgcgcagtgttctgggctgggctttttcatcatcttgactggttgtcgcagattgaagggagcctggcgaacggaaaagcctggtgtccggggatggaaatacccggtgcaaactggcgggtgcgtccccggcaggggagaacggcttcaatgaacggcatgtacattgccagtaaactcatcccggatgctgcggctatctggcttcaacgctggccggcgatttcaggtgcgctatttttgtacctcagcggacaaaaagctcagtctggaattctcaacagcatcatcagcgatgcgcttgccagcgttgccaataaatcaggaaccgtttctggtacagcaagcccctctgaaagcgataaggtgatcacctcaggggaggaaggggaggaaggatccagaacaaacaatatcccaaatttaatagacgacgatatgcatcaaacgtccagtcacaaaaatataacaccggttccagagccaattaacaatgcttcaataggttacgatactaaccagacaggtgattatgctgctaaggatgttaccggtcaggttacgttgctttcggcatttgataatcatgatacacagtcatccgatgaacgaacaggtgatgaaactgtcccggatgagtcggtatcaaccgcagaatttcttagcgtgcttgaccagatgtcgggctctggtgctcctgttgttgaagagaaggttgaaactacttcttctgaagagccttcgctggtcgggatggaatctggcactccaggagaaaagtttctggactggctgaaatcctcaatccttgacggtacggctagtgtcaatgagggcgagagttttgcacatattctggctcagtttgtattcattgtttcacctgagtgtttttttaaatatttatcgctgaatacaaacgagtcactggataaatcagagttacaaaaaagctttgaagctctgaacgttcattattcacgaaatggtaaaggcctctggcattaccataaatacgatacgccggacaaaagcggtcgttacaccaaaatgtcaggatacatgctgagtgctgacattatttacagaaaaggaacctgtccaccggacagcgtatggcttgcacgaagaaattaa

SEQ ID NO: 134435 - DNA, 954 bp, Enterobacter cloacae
atgaacaatgcatttgaagaagtgctggatgattattttttcagtaaatctttgcgcccggctacggagtggagctacaggaaggtagtcagatcattcatttcctttagcgggaaaggtatttcacctgagcaggttgataaaacgctggttttaacgtggcgccgaaaaattatccatgaggaaggactgagcagaacgacatggaataataaagtgactcatatgcgcgctatatttaatcacgccatcgttaatgggcttgtaacgatgagggaaaaccctttcaacggcgtaatcacccgacccgatgtcaaacgcaaaaaaacactgactgatgtgcagatgaataaaatttatctgcacatgctggcaagggaagaggatgaacggactggtatgatggagttaagaaaaagcgccttacggccagcatggttctggctaacggtactggatgcattgcggaggacaggaatgcgccagaaccagttgctgcacattcgcctggaggatgtaaattttgagcaccgctggattaatctccggcctgagggttccaagaaccataaggagcaccgggttccgattactgaaaacctccgtcccagacttgaaaggctctataacctctcccttgagcgtggcgcgaagatgcaggaccagttgtttaatctttctcgctttgatggccggaagaatgaaatcagcagcaacatggattatccgccgttgcgtgcgtttttcagacggctttcacgagaatgcggttttacagtcagtccgcacaggttccgacacaccatcgcgactaacctgatgcgtttgccggatcgtaacctgaagatggcacaggacctgctgggtcattcaacaccggcggtcacgctggagtatgttgaaagtgacctggataaggtacgggacatgctggaggagctggatgctgcataa

SEQ ID NO: 134436 - DNA, 669 bp, Enterobacter cloacae
gtgacactgctgacgctgagtatgccctgggcaactgtcattatcatttttcctctatgcctcagcttattcagttttatgaggagcctggttcgtctcagcctgatgatattggatgatgatcaggaatggtttgctgtttttttcgcccctgcatccaccggcttcatctggctttacgctacagcggcaactggcatgatgctgtcccctgtgccgctactggagcgactgatgtctctgttgttctgcctctttcttttcaggttgacgcttaccgatgcgttcacaggatttctgcctcgagaattgacgataaggtgtcttattgccggtcttgtttccgctcttatcgctcccggctttatagggcacttcctcacagctaccactgcgctggtgatttttggcgtctggcgttatgtcacctttaggattcatgcccgtgagtgtctggggcttggcgatgtctggttggccggtgctattgcggcctggttgggagggcgagaggggcttaatgctctgctgatcggcgtggtgctctttgtgctctggcagatatctgttcgtcgcataactgaaggagggccgatgggaccctggctgtgcgccggcgcgatttctgtgaccctgtttaaattgtatcaaccgcttattacatggtga

SEQ ID NO: 134437 - DNA, 480 bp, Enterobacter cloacae
atgctgcgcctgtccgcttttctgctgctgattttggtttgcccacgggtggatgcattctgctttgaatcggcgggcgctaaataccacattgacccgctactggttaaggcaatagccataggtgaaagcagcctgcgaccggatgtcacaaatattaatcgtgacaaaaagaccgggcaggcactcagtaccgattatggactgatgcaggttaattcatcgcatatcgcttcgctgatagcgcagggttacattcgcagctcacaggacctcctgaaccgtccgtgcctcaacgttcagataggtacctggatactggcgaagcattttcaggtatgcggcataagctggaactgtcttggctcttataacgcaggttttcgtaaggaccggcacgaaactcgcgagtcctatgccaaccggatttatgccatttatcgtcggcttttacttaatgaacggggaataaaactgtga

SEQ ID NO: 134438 - DNA, 597 bp, Enterobacter cloacae
atgtcagctcagacattaccacatcgccaacatcagcctgaccggggctggggcattcttgaacacggtaccattgcgatcgggacgattatcgtactggctatagttggtgctctggtctggagtctttgggggaaaaagtccgttgccgttgaggtttcaaatctccagaccgtcgtgacaaacgcgcagcagcttaagcaggcgcaggggggatataactttacgagcggtacaactatgacgggaacgcttatccagcaggggggcgcaccaaaggctggctggactatccagggaacagccagttccggtaccgctacgatgtggaacggttatggtggtcaggtcgttctggcacctgtggcatcgaatggatttaacaatggattttcagttacatcgcagaaagttccgcaggcagactgcatctctatcactactcaactcggttccggtggagcattcagtgctatcaccattaacagtaccgattacagtgacggtctggtcagtgcagaagaggcaggcaaatcctgctcatcagacagcggaatgacaggtaacaatacactggtcttcacccataacggctga

SEQ ID NO: 134439 - DNA, 1116 bp, Enterobacter cloacae
atggaaagtgacagccatttttatccatcccgggaaatgtcgttccctgaaaggattcgctaccggcttgtcagagccacttttactgggaaataccgccagccattttacgaaacgctgcgctttcttcttgaaaaccgtaaggccctgaaagacgcgctgaccatgatcggcgatgtacatactgattttggcaggcgctggcatccttattatgaacttgttcaggactgcatcgagggtgtgaacgacaaccgtcctggccgcgcgctgcaggatgttctggctgcctgggcaccttacgaagaggccgcgcttatcagcgccggaatggaaaccggtaatattcctgccgcgctgatgcaggctgataagttgattgttgcccgtcggcgaattcttgggcaggtaatttttgcgtcagtatttcctgccgcgcttgccatcctgagtacggggctactactggccaacaatctcgcacttgttcccaccatgagcaaaatgtccgatccagctcgctggaccggtgcactcgggtttatgaatggagtagcgaagtggagttccgagtggggtgttgcttctgccgctacagccgcagggcttgtgctgctgtctttctggtcgttgccccgctggcgcggccgtctcaggcgctgtgctgactggttactaccatggtctgtttataaagacctgcagggagctgtattccttatgaatattggcgcgcttcttggttcgggtgtccaggaactcaaagctttgcagatccttaacggttttgcaccgccctggctgcaggaacgcatcgaggcagcgatggagtgcatgagtgaaggcgattcacttggcagagctctgcgtaacagcggatatgattttccgagccgtgaggctgtgaactatctctctcttctggataagggggatggtgctgcttcgctcatcaccaattatgcggaccgctggctggaacaggcgctcgcgcgcgtcgcgcgtcgggcgaatgccaccaaactcttttctctcgttctgattatgagtttcttcttactcatcctgatgatggtgatgcagattcaggacatgaacactttcaacttacactaa

SEQ ID NO: 134440 - DNA, 1575 bp, Enterobacter cloacae
atgtctcctgataaagaaatcatggattttgtctttgccgagcagcatccgtctggaggggttacgctactcatcgacggcaaccggcgaaaagaccctgacatacagcgctgggttatggatgtcacccggacatgggctgatgcaaaaactgagtttgttacactcagcgaactgaaccggcggcgtgaagtggcagaacgtcagggccgtgggcttaaccagggtgtgagcgaggcggatctaagtaaccgtgacgtcagtgtgtcgcaggataaggtcatcagctatatgaggctgggtaacgactttaatgcctctgatattcatatggaaataagcggtgatcgcaagatttgcatcgttcagttgcgtattcacggcgagctggaggtggtggatgaagtgaaagatgtggagggtatgacgctggcctccacatcttatctttccatgtgcgacgtgcgcgagcagtcattctttgccggtcgtgagcagtcagggcgcatcgatgcaaagttcgcccgccgcgccggcctctatggcgcccgctacgaacaccgtcctactccggatgggctgatagtggtcatgcgtctgatcccggatgacggggacaatataccgacgctgccgcaactgggttttttgcctgagcagattaagctcatcatgcagatcctgcgtatgccggaaggcatgacgctgctgaccgggcctactggttcagggaagagcgccacgctgcgcgtgttcagtgatatctggctgaaactgaccggcggtaaaaagcgcctgctcacgctggaaaacccgcccgaggggcgtattccgggtggtattcagacccccgttatgcctgaagacaattcaccggaggccatcagccgcgcctggagtaacggaaacgcctctgcacttcgtctcgatccggatgccatcctgaacggtgagatccgtgacctgtattcccttctcgccgccattttcgccagtgaaaccggccacctggtgctgtcgaccctgcacacccagagccctatcggctccctgcgtcgtatggagcatttcggtattgatcgccaccttctggcggatgctgcactcatcaccggcctgattggccagcgtctggtgccgctgttgtgtgaacactgccgggtaccgtgggaagtcaaagtccctgagcttgatgaagaaacccgcgcgcgtctcgaaaaatattgttctgtcgcgggcttgtgcgaaccgaaaaatctcttcttccgcaactatgagggatgtgaacactgccggaaaacggtaccactgaccggacgcattatcagtcgtggcgttacagggcgaacagctattgccgaagttgtccggacagatgctcgcctgatgcaactttggctttcacatgggccttcagttgccagaaagtactggataaaccagggggggattactcgccgcatgcatctgttgcgttatctggcagagggtcttgttgatccgctggaaggcgatctcatctgtccgctggatgaggatgacatcatggattgtgaggtgcctgatggaaagtga

SEQ ID NO: 134441 - DNA, 498 bp, Enterobacter cloacae
atgcgcagaattaatcccgcgggaacgggcctgctgctgtccgctctgttctgcgggcaggcagtggcaaccgtaaccagtgatgcgcttccgccgaacgttacgcttggcgaacttgaagcagctcaggcgcgcaacctcattctggagcagaaagtgcagacggcgcgtctggagcagcagctgcgtgaaagccagtccggacagagtactgacaggaattatctgtctactgccgcccagcctgccatgccgcttatggcgcagccagctccttcacaacagactgccagtgcagtcggtgaaaagcggaccggtggtgtgcgccttcaggagatttacggccgtggctcgcagttgcgtgcacgcattgttctgcctgatggcggagtcacagaagtagcaaaaggcgatcagcttcccggaacctcaaagcgggtcacggaggttacgtccacgatcgtacgcctcagcgacaattctgaactttcattctga

SEQ ID NO: 134442 - DNA, 1281 bp, Enterobacter cloacae
atgtcatcaaagaaaaaatcttcactccgtagcggcattcgcgtcacccacaaccgtcgcgactggatggcaggacttcattgggagcagcagcggagcgcactgttaacgcgattccggggaaaagcctcacctgacacgcatgtagtagttgccggcaggcgtaacgcatcaatgatgggggtcgtttcccccgggcgtgtgcgacgtagcccttactctcttgcagtagcattcctgctgtctgaagggggaaatacatgggggatataccgcctcagccgcaacgaagatctctgggttttctttgcagccagcggtgggcagctttctgtcatgggtgatgtgaccggttcacgcgcgaagatagaatcagcagcagaaaacttcctgcgttttaacgatgctgatacaccgggtctgcgctgtgctgcaaccgcagatgataattgtgatgcaacctcgctcactgacaggctgaaccgttcgcaactgaagcgttgccgcctgggtaagcgcctgacgacgatgtcgcttattatgcctgctgcgcttattacactcgtggcagcagcaggaatttactggtacgacgacgttcagcaaaaagcggaacaggctgctgcaatggcagagtttcgcgcccgaatggcgatgtctgctgataagccagctgcgccagcccgagcgccacatccatgggcctctcagccaccagtttcgcttttacttggtaattgctggctgacacgcgaaccacttttcgcctcggtggctggctggcgctttacggacggtgaatgtgtccctgaaggcctgcgcttgcgttacctcgccacacctggtgctacggtggaggatttctcccaccgcgcgagggtgcttcttgggcattctgctgttttcaaccttcaggagggaggtaaaaacggcgacgtattcattcccttccggaaatacagcgtaagtgagtataccgacgaggccttgcctggcgcggatgcccaactgatgcgtttcatttcgcacctgcagcgccgcaacctggaagtcaagttcagtgaagtgaaaccgccagcggtcgcgccaggacaagagaaaaccatgcccgtacaggactggcgcgaattcacttttactgtcagctcgcgtttgcagcctgaacgtctgctgcaggattttgatgcgaccgggctccgcctgaacagcgtgtcaatcaccatgagcccgcaggggcagttcgactacaccatgaaggggagcatttatgcgcagaattaa

SEQ ID NO: 134443 - DNA, 1674 bp, Enterobacter cloacae
atgccgcgtatacctttctgcctgacagtacttaccgctgcgtttgtgctgtcatcatgttcgctgaatgaaatcagcaaaatagacaaggaagccgttgggcaggccgatacggctcagcgagtgttgcagagtcgtcagtccatatcacaaccaactgttgtctggatggataagccctgggtaaacctgcagccagtcacgccggtggtctccactccggacgaaaagaatctgcctccctgtcagataacgattaatcgtcctgacggcatttcactgcctgagctgggacagcgcatcactgcgctatgtggtatacgagtctccatcacaccagatgcatttgctgcgctgagcaacgtgagtaccggcagcgtggtaacttctcagatgagtggtcaactgccggcgccggatgacaatggtcgggttcccctggcacagatgggggctacgtcagctcagcccgtctccgttcagccatcaccggcgctcatgcgtggccttaaattccagggagatgttcgtgatctgctcgatgtcgaagccagcgggtacgggctgtcatggcgcagtgacggaaacggagtttatttttatcgacaggatacccgcacttttcagctcgttatcctgaatacgaaagtaaacagtagcgcatcaattaactccggctctggcaatcagctgggcagcggtggcggcacatcgggggggactagcggagacattagctctaatcagaagaccgattatggcatgaacagcgacctgtacgacgacattcgtaaaaccatcgagcagatgctgacgccaaaatctggtcgtttctggctttcagcagctactggcacgttgagtgttactgacacaccggacgttctggagcgtattggtcgttacattgagtatcagaataaggttctaagcaggcaggtccagctcaacatacagattgtcagcgtcaaccagacgcgtaatgagcaactgggtcttgactgggggctcgtatacaaatccctgcacaattttggcgccactctgaccggttcaatggccaatgcttcgacttcagcaggcagtgccggcatttcgattctcgacacggcaacaggcaatgccgccaaattttccggctccagcctgctgattaaagcgctttccgagcagggcaacgtcagcatggcgctgaaccagaccgacccaacagcaaatttgacgccggtagcttatcagctctcaaaccaacagggcgttctgacaagttccagttcaactgcaacagctaatgtcggggttacttcctcacagaccgtaaccacaatcaccaccggtttgttcatgaccatgctgccgttcatccaggaaaacggtgacgtgcaactgcagttcgcttttagctataccagtccaccgcagatagagaaatttatcagtagggacgggaatacccgtaacgatataccgaatacctcgacacaggggctggcacgtaaagttaacctgcgctcaggccagacactggtattaaccggatctgagcaacagaacctttctgcaaacaagcagggaacattcacacccgacaactttatcctgggcggtggccagaacggtacgcgcggtcgtaacacgctcgtgattatgatcacccctgttctgctgaggtaa

SEQ ID NO: 134444 - DNA, 444 bp, Enterobacter cloacae
atgggatatgcgctgccagttttcgcgctttgtcttgtcatcatcttgatagccggtgatgcacagcaccactcatcagagcatgtacggcttgcgctgcagcagactcagcctgaacagcttgcagcagacatgcttcggactgctgatgtcgtaaataactggcgtcacgggcggtccataacagatggccccgtatcaaccgcactgactggaatggtgccgttaccagacagtcgtatcaaaagcattattcagaacggtcgcctgtggatctgggtacctgaaacagacggtgtttatgccgcgttgcgcgcccgctcagtgacttctgcgcttgccctgaccgtcagaggcggtcgtctgcggatggcggatggcactgatatgaacctgtctctgccgtccggtgtgacggaaggcagcattgtttatcttaactaa

SEQ ID NO: 134445 - DNA, 1356 bp, Enterobacter cloacae
atggtaaaaataaacctgcagacacgttatcggcttggggccatcacgctatgtctgcttgccgctggctgcacagactttagttctcgctctggacccatgagcaggcttcagggctctccccgtgttcaggatctttatcaaaaccgttcccctgaagttgttcgttacgatcgttacacacttgccagtacgctacctgtagatgctcagcgtgacccactgaatcagattatcgatatcaggatgcctttgcagatggtgaatacgattggggaaggtatgcgatacgtgatgcttgaatcaggttattcactgtgttcaggcgaaccgggtgtattctctgaattgttcgttaaaccattaccggctgtgcagcgttcaataggacctgtgaagcttggagatgctttacaaatcctggccgggcctgcctggcgtatgcgcgtagatgacctgaatcgagaaatttgtttcgttctgcgtgatgaataccgacatcttgccctctcaacaacaggtcccttgcaggcgagtgtagcaagtcagggaacagggaaatcggcttctacaggtacactacttaacagttctaagggactttctggtactggaaataacagctatccgttgcccccggctcggccggaaagttccattttgtcaccagggacaccaaaagttacctctcaagctgtttctcctttatctgttgcaacgacagcaaaaacacctcgtaacccgttctctgccagcgagcctggggaaaaatctaaggttccggtgcagaaaacacaggcaagtcccgcagctaagttaacatctggcaaggtaaaaccatcaacagagttggctcctgcgcctgcgcctgcgccgtcagcattgtcagttgcgtcaacacctctgaataaagctgctcttggtgtgcctttaactccatctggtgcagtgaaaccaggtggaacagttcagaacagtaatccaccttccactgttatctctcctactgctccggtcagcggaaaaactgttttcactccgggagcattgctttcctcgttaccagacggacaggcctggaccgcgcaggcaggcactacgttaaaagagactctgatccaatgggctacatcggttcgctgtgagagtggcagtagtcctacctgggtagttatctggccaacgcctgtgaactaccgcatcgatgtaccatttacgctgcgcggtaatttcgagtcggttatcgtgcagctgtttaggttatatcgccctgcagaaaaacccctctatgcagcaccaaatcgtcttcagtgcctggtattcgtggacgataagccgattcaggacgggaaatga

SEQ ID NO: 134446 - DNA, 246 bp, Enterobacter cloacae
atgaaaattcataaaattatcgttgcatccctggcagtgacctcattcagtgcgctggcatttaaatctgaactctccccgacgaccacgatctccacgaataaactcactgcgattgaagccagtatttttagcagttttaacctcagccactcaggcccatcgctcgccggaacctgtaatgcctctccggtcacaggttacggttgcgcattctgcactatgcttcgaagccatctgaattaa

SEQ ID NO: 134447 - DNA, 660 bp, Enterobacter cloacae
atgattgagcttcaggaactcagcgtcggttataaccattctcccgtgacatccatcatcagtggacatattgcagttggcagcatgactgcaatcgtcggtgaaaatgggtgcggcaaatcgacgttactcaaaactctggccggttttctccctcctgtgaatggccatattatctggccacacgggcgtccggacacgggatggcttgcccagcgaaataccctggagtccgatttcccgatagtcgtccaggatgtagtgagcatggggctctggccgcgagtgtcactttttcgcagtatccgccgcagcgagcgcttgcgaattgcggccgcacttgagcgtgtggggttgctgcatctcgcaaaaagccctattgagacgctttcaggtgggcaatttcagagaatgctttttgccagagtctggttacagcaggctccattgatcatgctggatgaaccgttgaccggggtagatgaaaacaccagtcatgtcctgatgtcattgatcgaagaaatgcatcaacggggacaaacgattctggccgttctgcacgataccacgcgggtgcagcgctattttccttctgtattgcgtctggaaagtgagcgcagctactggcaaacgcaagtgcacaaggagtgtgtgtcatga

SEQ ID NO: 134448 - DNA, 873 bp, Enterobacter cloacae
atgacgttacatttccttattcagccttttattgaatatggctttatgcgtcgggcgcttgtggcgtgtctggcgctgtcgcttagcactaccacactgggcgttttcttatttctccggcgaatgagcctggtgggtgatgcgttgtcacacgctattttgcccggcgtagccattggttatctgctcagtggcatgtcgctgtttgcaatggcgacagggggatttatcgccggtattgttgttgcactggtagccggatgggtcagcaggcaaacgccgcttaaggaagatgccagctttgccggattatatcttggctcgctggcgctcggtgtcacgctggtgtcgttacacggatccagcgtggacctgctgcatcttctcttcggctcgattctggcggtcgaccgggcgtccctaattttcgtcgctgcggtagcgacactaaccctgcttagtctggcggtatgctaccggggactggtgagcgaggtatttgacagtacgtggcttgaggtcaataaaaagcgcctgcccactctgtttcacacgctgtttctgggtcttctggttctcaatctggtggcgggttttcaggtgctcggcacgctgatggttgtcggtgtgatgatgctgccagcggttgctgcacgatgctggatgcaaactttaccaggaattctactgctggcaggtgtggtgggtgtcctgtgctcgtggcttgggctcagtatttcctgggctatcgcgttacccgcagggccatctgtcgtgctctgtgccagtatctttttctttttttctattttatttggcgggcgtagcagactggttgtcactctgttgcgccatttttttggtaaggagtga

SEQ ID NO: 134449 - DNA, 879 bp, Enterobacter cloacae
atgaaacgtacagcactttttctggcactcagtatggggttcatggcgcacagcgccagcgcgaaaaccattaatgtggtcaccagcttttccattcttggcgatatggtgcaacaagtgggaggagagcacgttagcgtgaaagcgcttgtcgggcctgacggcgatccgcatacctttgaaccatcaccgcaggatagcgccgctatcgccagcgcggatattgtagtagtcaacggtctggggctggaaggcaggctggacagactcattaaggcgtcaggcttcaaaggcacactgatcgtcgcctctgagggtgttaaaacgcatactatggatgaggatggtgaaaccgtggttgatcctcatgcctggaacagcgcggcgaatggcgcacagtatgcacagaacatcgtgaatgggcttatcagtgcagatcctgaagataaggaggcgttgagaaaatccggtgaggactatattgcgcagttgaaagcacttgatgactgggcgaaaaaccgtttcagtggtattcctgaagcaaaacgcattgtcctgaccagccacgacacgtttggttactttagccgcgcatataacgtccgtttcctctcggcgcaaggcctttcctctgaaagcgaagccagtgcaaaagatgttgccgagttaattgaacagattaaagcggatcatgttacaacctggttcatggaaaatcagctcgacccgcgtctggtcaaacaaatcgccagggcaaccggtgcgaagcctggtggtgagttgtaccctgaagcgctctcaccaaaaggtggcccggcggatacttatacgaaagcgttcagacataatgttgataccatcgctgacagtatgaagtaa

SEQ ID NO: 134450 - DNA, 249 bp, Enterobacter cloacae; identical to SEQ ID NO: 78759

SEQ ID NO: 134451 - DNA, 243 bp, Enterobacter cloacae
atgccagttatactgagaattaacggattcaaatttttcttttactcgaacgagggaaatcctctagaacccgctcatattcatgtccgtaacgctgatggtgaagcgaaattctggcttgaagatgaagttaaactgagcaggaacgatggcttcgatgcccggactcttaaagagttgactaagatggttcaacataaccagacgatgtttgtggaggcctggaatgactatttcagctaa

SEQ ID NO: 134452 - DNA, 549 bp, Enterobacter cloacae
atggcaagtcgcggaattaacaaagttattctcgttggccatctcggtcaggaccccgaagtacgttatatgcccaatagcacagctgttacagggttcagtattgcaacgtcggagtcatggcgtgataaacaaagcggtgaaatgaaggaaaacactgagtggcatcgcgttgtgttgtttggcaaactcgccgaaatagccggtgaatatctgaaaaaaggttcacaggtatacattgaaggccatctgcggacccgcaaatggactgataatggcggggttgaacgctggacaacagaagttgtggttggtgtgaacggtacgatgcagatgctgggtagtcgtaatgctccagcaggtaccggtaatgctcagcagcctgggtcggcgcaaggaggttgggggcagcctcagcagcctcagcctcagcagtcagctgcgccacacaatcctgctaatgaacctccgatggattttgatgatgacataccgtttctggggcatggttatgggatctgccgaaaagcgatctacgccatttcctga

SEQ ID NO: 134453 - DNA, 204 bp, Enterobacter cloacae
atgggaaatcctttcggtttactggcttcagaagctgggtatcaattacagatccaggttctgtccagtcagcgcggtttttatatcggaaccgcgaacgaaatgggacccgtgtcccgtgagtcagtcgaatactacaaaaccagtctgcaggccgatattgctcttgaaaaaggggaatggacgcagcgtgaatatgattag

SEQ ID NO: 134454 - DNA, 492 bp, Enterobacter cloacae; identical to SEQ ID NO: 78755

SEQ ID NO: 134455 - DNA, 2010 bp, Enterobacter cloacae
atgcggttgtttatctgcgaaaagccctcacaggggcgagatcttgcgaatgttttgggtgccacccgacgtggcgacggttttctaactggccctggcgtcactgttacctgggcagtagggcatttgctggagaccgcaccgcctgaagcatacggtcaacagtatggcaaaccatggtcgctctctgctctgccgatcctgccttccccatggcaggtggtggtaaaaaaggagacgcagtctcagttcaaggttattgagcggctgctgcgccaggtcgatgatgtggttatctccactgatgcggaccgggaaggagaagtaattgcccgtgaattgctggaatactgccgctgggacggtcctgtacagcggctttggctttctgcccttgatgaaatgagcatccgtgcagctctccaggatctgcgaccgggtgccgaaactcttggaatgtatcatgctggacttggtcgcgctcgtgccgactggctcattggaatgaatctgtcccgtctgtatacactgcttgcagtacagtcaggattcgacggtgtgatttctgtcgggcgggtgcaaactcccactctggcactggttgtccgacgtgatcgggagatagcgacattcatccctaaacctttctggcaggttaaggcgcttctgagtgcgggagggagaacttttccggcgcaatgggtacctgcaaaggtttataccgacgaagaaaaacgctgtgtacaccaaaatatagcgcagcaggtagcgcatctttgccggcaggctggagcagcgaccgtaacagaatgtgagacgaagcgtgaaaaagcggcagcaccgctggctttttcgctcggcactttacaacaggcctgtggcctgctctgggatatgtcaccccagcaggtgcttgacactgcacagagcctctatgagaaacacaaggcaaccacttatccacgaactgattgtggataccttcctgagtctatgcgtgaggaaatcccctcggttctttccgctattggtctgtctgatccagagtgtagttctcttctttcaggtctaaatacttcgtttgtttcgcgtatatggaacgacaaaaaaatcacagctcaccatggcattatccctacccgaaacgcgtttaagttttctgcgttaagtgaggcagagcgaagggtatacacccttatccgccgaaattatctggcacaatttcttcccctgcacgaatctgatattactcgtctgcagtttgacattggcgggcaactgttccgcacaacaggaaggacggagattgtaatgggctggaaggtccttttcagtaaggaggaagaggatagtccaggggatgatgatctcagtattgaacttcctcctctcaggaagggtgaccgttgcggagtaaacggtgcagaggtcgtgcagcaaatgactcgtccgccggctcactatactttcgcaacactcatcggcgctatgatgaacgcgtcagcgtttgttaccgatattgctcttcgtaaggtactgaaggacaacgccggattaggcacggaagccacccgtgctggtatcgttgagcaactgctgaaccgcagatttattgtgcgcaaaggtaagcagcttcgcgcgactgatcttggtgctgatgtcattgatgctctgccctcgcagttaaccgacccgggaatgactgcactttgggaacaggctctggatgaagtagcagaaggacgccttaccctgaatgattttttgcagcgacaggtcggatggacccgtaaccttgtcagcatgggaggacagcagcgggtgagcattagaataccacccacaccatcgtgccctttatgtggggggaaaactcgcctaaaaaaaggacagaaaggagatttttgggggtgtactcgttatcctgattgcaaaggaatcatcaacaacgacacccagaaacgtaaaagcgcgcgtagctctaaggctgtaaaaccaaagaataattaa

SEQ ID NO: 134456 - DNA, 723 bp, Enterobacter cloacae
atggcagaaaaaaatgagaaaagaactggtgcgctgcagtctgaaatgacgatcgcactgcatacgaattacgcaatcgggctatggcaagggcgtcagcctgaaaaacaggacggtgaaaagcctgcaaggcatggaattatcggtatgcctcagtttttccaccgtgcgactctgattaaccaggattccctgcgcaataatccatgggctgatgttgctatgtttaacctggaagaaaagatcaaggttgcatcagattctatgactgctttgattcagcaacttgatgctgagatgtcaatgttgccgcctggtattacattgacagaagttgcatctgttgagccactcgatatccaggtatttacacgaacccctctgggttacaggtgtgtgtttctgttagtaggattcgatcagtttgcgaaaaaggcactacaggcatcgcattatggattaattacacgttctcgccgtgatcatcatcttagcgaaggtggcagattaattcgtcaggtctatggctctgttttatcttatcgccgtattgatgctacccggtttgatgctgtggaaaacaacgaaacatggaaacaagcatgcgaggtggcgggagagccagatttgtctgttcttcttggtgaaaagcgctcagctttctcaccgccggttaatgaatcgagcgtaaacctgcttcgtatgcgatatcgggctgcctga

SEQ ID NO: 134457 - DNA, 1233 bp, Enterobacter cloacae
atgaccattccggcagacagcatagttgctcatacactgtccaggatgcagcgtagtctcgaacggcgtacagacactggtgatgtcggtcaggagcgcagcgggcttctttttatgggaaatgtacatgatgcgtttccccgacagctgtttctggatacccgtctttcgccactggataaaaccgcctgggtgatgatccggttgtatgcacagcagaatgaaggtgctgttttcccgacttatgatgagctccaggttcaactggcgtcggcacattcagagaaggcctccagagatacggtcagccgcgttctgctgatgctgcgtcttacaggctggctcagcctgtgtaagcgtgttcgcgacgaccatggtcgtgtgcggggcaatatctatgcacagcatgatgagccgctgggctaccgtgatgctgagacttttgatccgggctggctgacccttgttgaagagagttgcctgagcaggaataaagccgtccgtatgacggcgctggctgtagtcaatgacatccttcatgatccgggaatgcgccaccgtcacagccgcctggccattattgagagccgactaagtgcacctgccacaccagaacaaatggctcgtcagcgacaggctgtgcaatcgagtccgaaatcaggactcagtaaaaaacgcataaaaaacagcccgaattcactgagtccggaaaacggactcagttcccttaaacctgataattcacagagtccggaaaatggactcagtaaaaaatcaaggagttacgccggagtccgaaattcggactgtaacgtacgttctttcacacacagtgtgaataaaaaaacgtacgtaccgtgtggtgagcaattcctgccagatgattttctgaacgctctgaacagtgaagacaggcagatgctgagtacgcagatggcttcgcttccggagacaatggcaaaagcccttgctgacatgctgcgtgaacaacaggcccttggaaggctcaacaatccggtgggctggatgttctctatgcttcgcagggcgcgaagtggtgagctgaaaatttcagaggatacggcgactgccagttctggtggaacaatttcccgcccggttgaatcacgtactgtacccacagccgacgtccctgttcaacctgcgaaacgcccgtctcaggggcaggtaagggcgatgattgcggctattcggcaacaggtccagaaatga

SEQ ID NO: 134458 - DNA, 231 bp, Enterobacter cloacae
atgcagatgaccgacttttcttcacgtcagtacgtttccccctcggttcgtcgcagggcgcaacggctgttcagcgcagtgtgctgcggtgagaaggtgttccgtcggttgacgatgaacggctatctcaagatagatgttgggccgttctggcgcatcctcagtaaggatggaggtaaacactggtggctgatggatcatgagacctataaccgtgaaatacggcggtaa

SEQ ID NO: 134459 - DNA, 597 bp, Enterobacter cloacae
atgagccagcacaacctttcacaggccaccacggccatcctttcatcactgctgatggatgttaaaaacggcaatatccgccgctgtgagtcgctgggaatgtcactcgaggagatacgcgcactgagtcagctgagccttgatgagctgcattatttgagccagtcacacgtttctgtgcttgatgttagcctgaatcacgaaaatttttggctgatgctcaaccaggcacgtaatgagcagaaacgaatgctgatgatagaccgggcgcttgagcttggcggttcaatggaactgattgataaatacttcggcctgtctccatcagaggttagcgcacggcgtcgtctgatggggatagagtctcgccagggccgcacacagtctctgacggagccacaggattcggcactatggatcgagtggaaggctgccgggctatcatccccggactctcatcaggctctggaagcgatgatgcttgccgctgagcagcatggcctgtcactgaccgcagtctggagcagggtctgccagtggtgccgggagacaactccatcccgcaagagtgaatcacaacagcgcaaggaagcatga

SEQ ID NO: 134460 - DNA, 780 bp, Enterobacter cloacae
atgttcaccgtgctgccggctgcagggggctacaccatgtctgaaaatacaaaagtgattgcacgtatccggcgactgatggcgctgggtacccggaacagtaatccacacgaggcggcccgtgcagtggctctggctcaacggctgatgcagcgtcatggcctgacccctgacatgctttctcttcatgatatccaggaatccgtctgtcagaacctgaccagtaatgctgaaaaagtgccagcctggctaagttcactcgcaacagtggtatgcatggccacgggctgccgttgctggtttggctggcatattcacactagttgcagtggtgtaaaaagcgtccgccgatctctgcacttttatggtttcagcgggagagccgaagttgcgctctatatctataccgttttacagcggcaacttcgtgcagacactgacggtcagattgccggataccggaagcgccgtattcttaagaacacgcttcgtcgcagagccgatcagtttcgtgaagggtgggtatctggcgtctggcaggtactgcagtcatttgcgccttcagaatgtgagaattccatgcttcagcgctggcttgcccagcgtcacaccggcgacaccttggggactgtaaacgtcagggcggccggtaaatgccgtggcgacagagcagcacgcgtagcgggctggctcgcggggcgggatactgaagttcatcaaggcctgactggtgcgaaggctcaacagcagattacggcgggaggctgtacacatgagtaa

SEQ ID NO: 134461 - DNA, 255 bp, Enterobacter cloacae
atgtctgaggacctgaatgatgaaatggctcaggccagtaccgctattttcacccagcgcggcatcgatgctgtcagggcaaaagtgcactcgttacgcccgtcaaaagaaatctgtgagtgctgcggcgcggacattcccgctgcccgtcagctggcagtgccgggcgtagagttgtgtgccgcttgtcaggatgtgaaggagaagcaggatgttcaccgtgctgccggctgcagggggctacaccatgtctga

SEQ ID NO: 134462 - DNA, 1716 bp, Enterobacter cloacae
atgagcaacgtccgtagtcttaaccttggcgacgccatgttgcagcgtggaaaatcaccggctcaggctgctgataataatactcccaccgttacccagccagtaaatgaaatggcaatggttcttacccttgaccagcttcgcccgaatccggataacccgcgcaaaggacgcaatcctcgttttgaggaaattaaagcttccgtccgtgcacgaggattggattcgattccaaaagtgacccgtgatccggatggtgatgatgtttatatctttagtgacgggggaaatacccggtatcagatactctgcgatctctggcaagagactggtgatgaacgtttttatcgcgttcacacgatcttcaaaccctggcctggacgtctaaaatgtctggttggtcacctggctgagaatgaggtcaggggagatcttacctatatagaaaaggcattcggtgttcataaagcgcgggtaatttatgaagagcaactgggccggagtgttaccttacgagaactttcggatctgttgggtaaggaaggttatcctattgataactccagcgtaagccggatggaagatacgcttaattacctttatccacatatgccccagttgcttgagagtggcatgagccgtggtcaggcaacaccactcctgagccttcgttcttcagctatgaaggtctggaaatctttcagcggtgacgtaaacccagaatgttctcttgatgatgtgtttggtgcagtttgccggtgttttgatgaacctgaaagctatgcccttgatattttcagggatgagtttatcggtcaactggttaaggctcttccccatccaagcctgaattatgaccgctggttaattgaacttgatcctcgtgaacaaaaacgcagggaacagtttggcgagccgcctccactgccagcacctacacctgcgtctgaacagtcaggtggtcgggaacgcacatcaccaccaattacgactctgccagcagatacttcatcccagccccctgttactggtctgcgtagcggtacgctgactactccagggcgtccggaagctgtaccagaacttcaggacaatactgcacttcccggcggtatgtctgttggaagtgagccgcgtcgtgaagttcagaatgacctgtttggcggaaatcctgtgattaccggtcagacagagaatcctgataacgatggagagtggcaatttaagtcagatgttaatgccaactcgctcgtttctgcttttggcgaacaggatgaaacttccacaccttcagttagctcagtggccttcgccgcaaccgggttggaaccggtcaatgatatctggcacatctccgctttacaggacgacatcgagcacctgcaggatatggcttatcggcttactttcgaaattgccgaagcgatgggctgcgcggactgtgttcgggaggataaagaccatcattcagctggtttctccatttcagagaacgccagtgagtttactcttttcctcgccgggctatcaggttcactgcctaacaaacagttcaatatgttcatgttctgcctgaatttttttggctctcaggaacctgcagatactgccgttttcgatgatgtcactgttgtaaaaacaatgcgccttatccgcgttatacggcgtctgcgtgagctgcagcgtctggttgtgaagggaggggaaaatgtctga

SEQ ID NO: 134463 - DNA, 1368 bp, Enterobacter cloacae
atgacctctaataaccgcagaaatgtttcggggctgttttctcaggatgctgagcagagcgtcattggtggcctgatgctggataacgactgctgggatgaagtggcgctccgtctcgattccgatgatttttatttcaaggttcaccaggtcatctttcatgaaatgacgcgtctggttgcagcagggcgtccgattgacctgatcacacttgctgagagcattgaaaaccgtggtaaggatgcgcttgagcaacttggcggattcgcctatctggccgaactttcaaaaaatactccgagtgcggccaatatcgtcgcttactgtgacattgttgccaggtacagccaggggcgacagttggtcgccattggtgctgagataaccgaaactgttaaggcatccggtgctgatatcggggcggtgatggaaaccgcagagcaaaaaattacccggctggcagaacgttcagaaccacagcaggccgtgacgctgcttgacggcatggaaaaactccttacagagctggaacgtcgttgcaatgtgcctgatggtattactggtacgcctacgggatttgaagattttgatgccatgaccagcgggctgcaggcagctgacctgatacttatagcagcaaggccttcaatggggaaaactgcctttctgatcagcctgattttgaattcacttctgaaaaaagccgatacacatgcgcagttttacagccttgagcagcccaccgagcagatcctcatgcgtatggtcgcttcacttggcagtgtagatctaacacatttaaaaaatggccagatggatgatgaggaatgggcgcgcgtttcaaacgcgtcttcactattgatgggtgaccttaaagaccgcctcatcatagatgacacaggctcattgacccccgccatgctcagaattcgcgcccgtcgtaacgcccgccgttatggtcacccttcagtcatcggtcttgattacctgcaactgatgcgttgtccggatcaggagaaccgcacacaggaaattgctgaaatctcgcggtcactcaaagcgctggcgaaagaaatgggttgtccggttgttgccctttcgcagttgaatcgtcaactagagagtcgtgctgataaacggccgaacaatggcgatcttcgtgattccggtgcactggaacaggatgctgatgttattgtctttatctatcgtgatgaggtctatcacgaaaacactgaagacaagggggttgctgaaattattgtcagcaaacagcgtcagggaccgattggtacgatccgactgcaatacgaaggccgttatacgcgtttttctgctaaccctggtcataccgggaggtttgcatga

SEQ ID NO: 134464 - DNA, 915 bp, Enterobacter cloacae
atgcatttacaatcaatcgattatccaacgttgggtgttaagcctcgtattatacctgttgtttccactaagggtggcgagggtaagtctactcagtcagctaatcttgcaggatttctggccgatgcaggtatcaaaacacttctgattgatggcgaccatgctcagccaacggccagcagtatattcccgcttgaatatgaagcccctggtggtttgtacgaactgttgatgcagacagttgatctctcaaatcccgataatctgatctcccgtacgtcgatcaataatctggacattatcgtttccaacgatcctcgtaattttctcccaactgcaatgctgaatgcgcctgatgggcgagttcgcctccgaaatgctctttcacatcccctttttaattcatatggcgtgattattgtcgattcacaaggctcacggtcagtgatgtctgagttaattatcctggcctccaccggaaccatggtgggtattgccaaaccgattcttcctgatgtcagggagttcatgcgcggaacagtcgcgctgatggaagaattgctgccttattgtgcgtttggcattcagcttccagtcacaaaattgctcatcaactgtatggaatacgacaatctgtctgttgagaccctcgctgaagtcaaagcgatcgttgaagataaacgctacagcgcccatgcagacaaaattcatatcgacctgctggagacatgtatctatgacctgactgtctatgtccttgggcatgttaagggcgtaccggtacatcgtcttgaaaaaaatacccggcgtaaaagcgactcagcgtttacgtcaatgtatcaattggcttgtgaacttttcccagagtggaaaacgaattttgatgcgttagctaatgcggggggcgaggaatga

SEQ ID NO: 134465 - DNA, 996 bp, Enterobacter cloacae; identical to SEQ ID NO: 132288

SEQ ID NO: 134466 - DNA, 2211 bp, Enterobacter cloacae
atggctcaactcaggatccggggcgtcagaagctacgcgcctgacagggatatctgctttgatctcagcagtaaggtgacactcatctatggccagaacggctcaggaaaatccacggtatcaggctatttctatgaccggcaggcggataaataccggcactgcacctttgagagcccgcacgtcagccactttcaggtctttaatcaggaatacattgacagtaagttcacccgttctgactatcagcccgggatcttcaccctcagcgaggccaatcaggaaagccaggacaaaataaacagtaataataaagaaagcgcaaaactgagtgcccggacagataagctgaatgaggagatcgccgagaaggaaggtatgaaggaaacggtcactgacagctgtgccaaagatattttcaaccggacagtcaatgacaggaaaatcctcagcgatttcctggatggcgctaaaattaaacgatcgttttacgaacgtatggtggcaacaccgctgtcggaggttagcaccacggctgaggcgctggcggataaatggcggatgttaagtcagagcgaaggaacgcttgtcgccgaaattcatattcccccgacaactgttttaacggaagacaccctgacactgatgcaggaacccgtgatgcctgcaagcagtacgcaattctctgctctcattcagaagatcggtaatgctgactgggtgcgccagggacagcagtatatacacgacgatatctgcccattctgccagcagtccctggatgtcacggccttttcgcgcgaactcattcagatgtttgatgagtcataccagacgtctctcggggcgctgagccaggccgcagaacgacttgctcaggactgtgatgccctggccgaattagaacgccgtgttacgacccatgctttcgttgatgaggacagtcagattttaagcctggtgaaaacggtcaataaaggcttccggatcctgttacagcagctccttactaaaattaaagagccttcccggcaggtacaacccgagaacgttcaggatcccctggtgcagctccggaaggaagtggacgttttaaatatccgggtacgggaaaacaaccgtcttgctgaaaacttcagtcaggaaaaacagaacctgtatacggaagttatggcgcacctcaggggaatttgtgaggagttctttgccgggcgtgaccggcagcttggcgaactgcagaacgaaatcgacaccagattgcgtgaagtcggcgccctggctgccagtaagaaaacactggatgatgagacgaacaggctgaccggacagctctccgacatccagccaaccattaacagtatcaatgcgaatctcaggctgctggggatcaccggctttgaaatcatctgccatgatgcagagatgaaactgtaccgtcttcgccggggaagcgagccagaaaaggcggaagtcttcaaatccctcagtgagggtgagaaaacaatggttgcttttctctatttcatcgaatcgtgttcgggcagtcttaccccggaaaccatccatccggaaaataaactcattgtgattgatgacccgatttccagcctgtcacataactatatctatgaagttgcagcactcattaagcggaagataattaaggccgctgcagcgagacatgtggtgatactgacgcataatatgtttttcttccaggagatgctgctgaacagcggccgcctgcaggatggcaggaaagcgccagcaaactggtcgctgtttcgcatcatcaagtcggattacagttcctgcgaaacgctttccatgcacgaaatgctcaatgaatatcaggcgttatggcagacactgaaagacgtcagggatgcgaaaacccagcccgtggtgctgttcaatacgatgaggaatattctggagtattatttcagcttttcctgcaagaatgaaaagcttaaagaagccctggagtctctggcaacggaacacagcgatgccggagaatatgattcattttaccgggccatcaaccgccactcgcattcggacggtagaaatcttttctcaaccggcgtcatcgataaggaacgctatctgaacatgttcaggaaagtgtttattcacactgatgaccatgaacactatcttgccatgatgggtgaatccgaagaacggccggaaacagaggcgtaa

SEQ ID NO: 134467 - DNA, 2475 bp, Enterobacter cloacae
atgagcctagactttgacaagctgaacgctggtatcggtgcaaaacaaactgacccgagaaaaatctttacgacgcttaagcgagacgctcgtttcaagcggccattggatgaacaggcggacgtacttgacgtttggtatgcacggaggcaggccaaagatttgacgctgaagatgaataccggcggtggtaagactgtggtgggcctgctgtgcttgcagagctccctcaacgaaaacgtcaagcccgcagtatacattacgcccgatagtttccttgtcaatcaggtactagatgaggctaaggcgctcggcattccagcaacagacgatgagaaggatccagatttccttgctggacgtgccatccttgttgccaatgtgtggaagctattcaatgcaagatcggtttttggggtcggacagaaaaagatcccgataggctgtgttgttgtcgatgatgcacatgcatgtcttagcgtggtccacgaccagttctcgataaaggcagatgttggcacaccggtgtacgacgaccttctgaacctttttgagaacgacttggataaacagtcccctactgggctgctcgacgtgcaggctctagatcctagcattgtaatggaagtgccatactgggcttggcagtctaaacaaaaggaagtaatcgcgttgcttcatgcacaacggaattctgcagagttggaatggagttggcccttgttgcgcgattgtatcccgctctgcacctgccttttcggcggcggtaaactagaaatcgcgccgcatttcattccgatcgaccgcattccatccttcgcaactgctcagcgaagaatctatatgacggccaccttagctgacgacacgatcctcgtgagtcactttggggcattggcggacgaggtagttaagccgatccgacctaaagggggcggagatattggagaccgaatgattcttgccccacaggagatcaatccggacttcaaaatggaggagatccgcgaacttgtgtcagatatcgcaaaggatctgaacgtagtagttatcgtaccctctaaagaacgcgcgaaattctggaaagattctgcttatcagatacttaacaaagataacattcaggctggaatacagcgtctcaaggacggttttgtaggcctaaccgtactaattaataaatacgacggtatcgatttgccaggaaaggcttgtgagttgctcgtcattgatggcttgccggaggtttacggactcggtgaaaggcgtgaaatgttgctgctagacggaaccaaacgccaacttgtgcgccaagttcagagaattgaacagggaatgggtcgtggtgtacgttcaagtgacgatcattgtgtcgtactattgcttggtggcaggttgacgcaacgactccatcaacccgaagctgaaacgatgttttcttcagccactcgtgctcagattgagctcggtaaaagtgtggcggagcagttgcgtggacaatcgcttgagaagctgcagggtattatgggcctatgcctgacccaagatgacaactgggtacaggctggccgtaatgcggttgtgaatgcgccacctgtcgaagggggacggattgacgataatcaggtcctgttgcgggaggccttcgatgcggcccgtgtgtcgcgatatgacattgctaagaataaggctcagacagcggtgaatgcagcaagcgagcgtcagatcaaaggctatctgaagcagcagttagcggcgtatacgaatttcactgacccttcacaggcgcaggaactgcaactggccgcgctcagcgataactatcgacttcttaaacccttggcaggaacgacttatcaccgtctcagcgcacccgctagcggacaagcggccgcagccgttcagttcatgacgcgttttctcgaaggaaacgatctcatcatatgggtcaacgggttgttagacgatctacaatggggagaggaagggtcgaagcggtttgaggctgccattaaggaattaggcatttttctcggtttcggatccgagaggccagaagacctagtgggcagaggaccagataatctttgggctcttggcaactcgaggtatttcgtgattgagtgcaagagcggagctgttctggcagaaagaatctccaaacatgacacgaaccagttaaatgggtccatcgtctggtttgatgaaaagtacggtcacacttgtacaaggactcccatcttggtgcatcctaaaaccatatttgaacacgcggcatcgccccattccgacatccgaatagttaacgaacaaggactcaataggatgcgcaatgcgatacaagcatattcaatctcgttggcgagtaatggtgggtatgccgactcgcaaatcgttcataagcaacttaaacatcataaactttctgctgaagatattgaggctttgtgtacggtagcacaaggtgcaaagtga

SEQ ID NO: 134468 - DNA, 507 bp, Enterobacter cloacae
atgagcacaaacaagcaggcgctgcgtgaagcggcggagaaagccatctcagaggaaggggaaacctggtggaatgaagatcaactggctagcgactatggacttgcacttcacagcgcggacgccgagttcatcgccgcagccaaccccgccaccgtgctggcgctgctggatgagctggagccaatggcgttggcacatttaaacctcaatcttctctgcgacgtctacaggtcggcatatgaagaagcccgtcatgatggtctcgttaactgggaagcagccgcatcacttgcggaagagaacgaagagctgaagcgcaagttggaatccgcagagaaacggattgctgagctggaggcgagccacggcaaccttcgtgaggcagtggctggcattcacaacacaatcattggtagaggggctcatacgccgctggcagccattctgaatgcatccaagcgcgcatacgaagagtcggccgccgcagccggtaaaggagagtga

SEQ ID NO: 134469 - DNA, 201 bp, Enterobacter cloacae
atgagcgctatggacttccagcaaaccaaagctgccattgatgctattaccaccgattgggccattcgcggcccgtatcacgaagatgatggcaagtattacgccttgctccatggtgagtgggtaggtggtggatatcagaataaacgcaaggccctcgacgccatttacgcgcaagtgaaacaggaggccgccaaatga

SEQ ID NO: 134470 - DNA, 408 bp, Enterobacter cloacae
atgaaaccaacatacgaagaacttgagcagcgcctcatcgagtcagagcgctacggccgccagactgatatcacaattgataatctggagatgaagctggcgcagatggctgcggagaatgcggggctgaaggatgcaatgcgcgtaacccttgagcatgtatcggtgatggatacagggcaggctggagtggccgcgatgattgtcaacgacgctctacaccatagcgaaaccccggcaaccgacgctttcctggctgaagtgcgggccagcggtgtggatatgtttgcactgatgtacgccgaagaggccattaagagtgacagcatctctatcggctggagagcgagagccagcaaagccgcatcagaatacgcagcccagcttcgccagggaggtgcggtatga

SEQ ID NO: 134471 - DNA, 825 bp, Enterobacter cloacae
atggctaactcattcaaacaaatgacccgtgacgggaccattaagcgtaccgatacagggatgtttatcagccttgacgatattcatgttagagaaggctttaacatccgtgaagacgatgagcgtactcgcctagctaatgatgacttattcgattacctgatgaatggtggcgtcgttccgccaattgaagttgtaccgcgtgacgagggcggagtttacatcgttgagggacatcgtcgtcacctggcctatcagcggtgtcgtgacgcaggaaagcccgttaatcgaattcatatcatgccgttctatggcaatgacctaaagcaaaaggcgcgaattttcacgagcgcaagtcagctgtcattgtcccctatcgatcagattaacggcattcgcgattttgctcccttcaatctcactccggcagagatagcgaaggaaatccataagtcagtggcatgggtcgaaaagctgatagcccttagcaatgcaaatcacgatgtgcaaaaagctgttaaggctggcgaagtttccgttgatgtggccatagaccgggtaaaagagttcggcgaaaaggccggtgaggttcttcagaaggataaagcttctgcggctgcaaagggaaagaagaaagtaacccgtagcgttatagctcccgaaattagcgtgaagaaagcgcgtcgccttgttgagcttatcagcatggcaggaatcagcgacaccggcgttatctctcttgaaggtttggcccatgccgaagttgtggaaattatcgacgagcacaaggccatagcatcacaacgatctggagcatcagcatga

SEQ ID NO: 134472 - DNA, 360 bp, Enterobacter cloacae
atgacgaacacacagaacgtcaccgagttacaaccacgcatgaccagagagcagctgatcgaagccgctcgtatcgctgctaagttcctcccagttgcgtcagctcagcttatgaatgagcttgctaaccgtctcgatatcaccagcgtagcgctttgcgaagcgatggcgcagcgtaaggaactggctgagcagaacgctaccctgcgtgaagatgtaaccagctgggcaaaagagtgtgaccgtctcgaagagcgccgcacaaagacgcctacgaacgttcactcactggaagcgcagcgcgaattacgtgagttgccggcggtcgtatttacccatgaaaacgaggtagcgctctaa

SEQ ID NO: 134473 - DNA, 201 bp, Enterobacter cloacae
atggacgaagttaagttctcttgcccagaatgcagtggcaaactcttcgatagcaccgcgatacctgaaggttctgacagttttgcgggagctgtctgtggaaattgtggtcacgttgtaactgaagacgagagctctcagttcgatgatcagcttgccaatgattacttcgacaatctcaccaggaaccttttcgattaa

SEQ ID NO: 134474 - DNA, 771 bp, Enterobacter cloacae
atgtatctggtaaaaagttgccatgaaagagataatatttgggaaagaaatactataaaaattggaacgctgacagagtatagagatacggaggagcagcaaatagccgacagatatgaaggtaatatagagttaatattcaggctaaatgacgttcacttacctgcatttgtatttaatgagatgaatactttcagcgatgcctctagcaatttctacgctcaaaatattgatatgcgaagcagtcctttaattccgaatcacgtatattcaaaaaaataccatgcaacaggcacaatgacaaaatttaatagatttattttttgcttgtctgagttattagacccaaaaaagtgccaggggatttttagagaatataatgattactggtatttcccaagagatagggcatcattctttggtgacctcgtatcaaaatcaatacttacggaggtgtcagcaaggacattagatggtgagaagctcttcaccacagacattgaacacaaaccactggaaataagatggtattgcaatcgcattttttacaccgccagaaagattcatattgataacaaggtaatatatactgaaccagaaaaaatcatccactgcctttcagaaggacacatggtaaaaccctcagattttcaacatgaaaaggagtggcgattcatctttgatatttattgtgagaataaaattctgcaacctttgaataagccattatttataagcgcagaaaacatcctgccgcttatcaaaagataa

SEQ ID NO: 134475 - DNA, 864 bp, Enterobacter cloacae
atggaaagaggtgttgtttttacagcttatgaattgttaaaaaataaggataataatgggttcgagacggggaggtgcatctctcctgaagaacttaattatttggtcttgtattgggataaattatcatgcccaactaacaattttatccatcttgctttttcaagtgaagaagaattgattaaatgcggcgtgctcagccgccctgtattttccgtcggtgatggtgtcaatagtaatgaaatgcctgagtttcaatcaagaaatcaagttaaaacattggcaaagttacggagagaacaaagttctatcgactggagaatgcatttcttaaatgatcaagtctgtattacagaagatatggcaactcaaaaggaagtcatccgctttgagttgacagaccttttaccagtacctcaaaaaggtatacctattcatgaattattagagtttaaggaaagacgttctgatgagttactaacattgcatggctatttagatgaaatttatgctgaggtgataaactctggtgattttaacttacagagagcgaaggctctttctgggctaaagaaatctcttgaagatttaaacagactgaatgatttagaatggaaaagtcctcttaaattcagtatttcttcttcttttgaattagatatgaatcaactttatgctggcgccgcgacagtttatgccgctatgcaatcaaaccatccttttgaagtcttatttactggggctgcatttgcaactcttggtgggttcataaaggttagagcgcagcttcaaaacgttttaaaagatggtgagtctcatttggcttatattacaaatgcaaaaaaagaagggctggttatataa

SEQ ID NO: 134476 - DNA, 1284 bp, Enterobacter cloacae
atgctttataacaccggcaccatcgccattaacggaaataccgcaaccggcaccggcacgaactggacagcacccgccagccaggtccgcgctggccagacgattattgtcatgtctaacccggtgcagctgttccagatttcatccgtgaacagcgccacgtcaatgacggttacgcctgccgcttccccggcgctgagcggccagaagtatggaattcttgtgtcggacattatctcagtcgacggcctggcacaggccatgtcgcagctcatcaaagagtacgacgagaacattggcgcatgggagacgttcgccaccacctcagcaaaccagagcatcacagttaccatcaacggcacctctgttacgatccccggtatcggtaaactggcgcagaaagggagtaacggtgcgctggctgtagctgacggcggaaccggagcaacaaaggcagaggacgctcgcacaaacctcggtttgggaagtagcgccactaaggacgtaggaactacgaccggaaacgtcatgcaggtgggggcgtttggattaggtggagataccctgactgtcagtgatacctctctccttgcaacattccagaccctcaccgccagaggtaattcttttgcgagaacagatacccctctctatgtaattccttcttattctcctgcagtatttatcaagacccgcgatacatatgcgttgctatgtatcaattatcggaatggaactctgtctacagtcactaccactcagagcgacatggcgaatcagctatttcagactaatacaatttacggtacggcaaatacgactaaggctagtgacggcaccttaaaagcagcgtcaccagttgcccgtatcgtagcgagcaaggaggcctgccagcgcgccgatatagcagaggatggttttgtatggtgcggatgcggcacagcgaacgctgaggccgagggcataaccctttcccgccgcgacgtaggtttttacgttctcaccggttcggcaggtctggcgtctgaggggtggcagttactgccgccgatggaccctggcggcatgggagagctgggtgtagttgaggcagagcaaaccgacaatggcgagctgacaatccgcctgtttaagcgcaaatacatgctgagcgatgacggagagatcatcaaaacgaaaggagaactgatggatgtccccgcgaacagctggatcgatgttcgcctggatatgccgtcagactctctgtttaaccagcgaatgagccaggaaccggaggtttag

SEQ ID NO: 134477 - DNA, 639 bp, Enterobacter cloacae
atggctaccggttcgcagggggcaccggcagacacatatcggttcttcagaactgaccacacgattaacaatacccagaacatcaacaacgtgaatgagccaggcttgttcccgcagatgattaacttttctactgcaactaatgcgcctgtagccggtggctacggttacatagcgaacctggggcgcataaacaaggtgaacagcgactggtcactttgccagatatcttatcctcactcgatcggtaccgattcaggcaggatgttttatcgcggctggaatacaaatacatggggagcatggaaggaagtaacgacatccgcggtttcagatgcaactgccaagaacatcggtgatgacctggaccctgaagaggcgctgctgaatatctgccggatggagttcaagcacttcacatttaagaatgatgaaacacagacccaacggcgcggggtgatatcacagcaaattgaaacgatcgatccagaatacgtcaaagaaattggcggcctgctgcacctcgatcagacgccaatgttgctcgatgcgctggctgccattaaagccctggctatccgcgtcagcgcattagaggaagacgctaaacctccggttcctggctcattcgctggttaa

SEQ ID NO: 134478 - DNA, 429 bp, Enterobacter cloacae
atgcaaattggctatgtaagggtgtcaacaaatgaccaaaatacggatcttcagcagcaagcactcgaacgcgcaggatgtgaacagattttcgaagaaaaaatgagcggtactgtggcaaaccgaccagcgcttaaaaagcttctgagaacgctgaatgagggcgatacgcttgtggtctggaagctggatcgtcttggtcgtagcatgcgtaatttggtgctgctggtggatgaactacgtcagcgtggcatccacttcaagagcctcacggacagcattgatacatcaagcccgatgggccgcttcatctttcatatcatgtcagctctggctgaaatggagagggagttgatagtggagcgcaaacggagtggatcggaagcaggtggcgatcatttacgatgtggccgtttgtactctatataa

SEQ ID NO: 134479 - DNA, 1248 bp, Enterobacter cloacae
atgaagaatcactacgggcttaaaacatttgttatggacagtggcgagcgctactgcatagtgatgaatcgctcttctggccttcccgtgtattaccctactctttatttaacaacacaactccgcaataggggggatgctttttcaacgatgtcagcggcggctagcaacctaattgttttgctccgctttttagatattcgtggaattgaccttgaacagcgttttttgaccaaaaatttcttaaaaccacatgagctggacgacctgcgagatttttctcagcgtaagcaagcaaagaagtcattaaatacatcctctaccctttggcttgatgagccggagtccgatattgttgataacggaacacagcattctaggctgacaacgtgtgccaactatttacactggtatgcgatgcatattttaaagacggcagaactggaagtggtccaacagatcgacgctatggcgcaacagataaagaagcgcaggccttctaaacagcgcagaagcagtgagctacaagataggtcactgagtgatattcaattggattcactatttgaagttatccttcctggatccaaattaaatcctttttcaattgaagtgcagcgccgaaatcggctgatgatcttgcttctgttttatcttggtattcggggtggtgaattattgaatatcagaatacaggatgttgattttagtactaacaggatccgtattgttaggcgagcagatgagcgggctgactctagaaccaatgagcctaatgccaaaaccagagaacgactcttaccgttgtctgaatctttagttctagaactgcatagttatatcattcatgatcggcgtaaaatccgaaatgctaagaaaaatgattacttgtttgtgacatacaagtctggaccaactgtgggtaatcctatttcgaaggcgggatatcacaaaattttttccgtggtcaggactgtctcgccgcaattgtatgcagcgaccgggcattcgctccgtcatacctggaatcgcaagttttcagaaagaatggatgcaatggatgagaaagtcagcgaggaacgccaagaacagcttcgttcgtatttaatgggctggagggatggctcaggaaccgcagctatttacaacaaacgtttcattcggcaaaagggttttgaggccgctctggtattgcaagaaggcagcggtacccgtttaccagaggacatgaataatgatgacgaatag

SEQ ID NO: 134480 - DNA, 900 bp, Enterobacter cloacae
atgatgacgaatagagctgtacctggagcatcatcagatcaaatccgtgccaaggccaatggctacttctttcagttgtatgatccatcgtgggttttggataaaaatacaactgttactcttgcagatattcaccaacacttgtcaggcgaggtacttgatggctgcctgcgtacactagcattttatgcttctagtctttccgcttctcatactatgaacattactatgcggtttcagcacatgctgcgtgagactgaagcggaagcaatcactgatacgacattggttaattatcgttcaatgttgacgcctgcaacagaatggtatctggcaactatacgtggctttcttcgaacttggcaccagctgggttatcccggtatcagcaaagatgtgatccgtttgctgtatggctggaggctaaagggtaatcgtaagggggatgcggttaagcgtcaggatcctcatgaagggccactgacagataatgagctgacagcgtttaacgagggggctgttcgggcttatgaaaagagcttaattaccatagctgagttggcgatggcacttagcatcagtcatacaggacgacggcccattcagatctcgatgcttcatgcggtcgatgtgctttgcggtgaaaatgaaaaaggtgagccattctatgttttgaatgtgccgcgagccaagcagtgcaacagctcttttcgtaaaaatttcaaaccttttgcgatatcactggaactatgggcaattctgagcgctcaggcaaggaatgcgatttcactgattgagaatcatctaaggtttgaattgcaggaaggtgaccgacagcaaatccctctgtttccagatcttgatgtgttagatgtcgtccaatctctttatgaattctga

SEQ ID NO: 134481 - DNA, 2058 bp, Enterobacter cloacae; identical to SEQ ID NO: 32296

SEQ ID NO: 134482 - DNA, 936 bp, Enterobacter cloacae; identical to SEQ ID NO: 118628

SEQ ID NO: 134483 - DNA, 174 bp, Enterobacter cloacae
atgaccgagctgtccggagagctttttataatgctccgggcgataccaggccgggttctcacatttggcttttgtggaatgctcaccgcgtttgcggcgggtcagttttttgaccggtgcaatgaggaaattaccctgagtgccggcatcgacatcctggcagaaacgggttag

SEQ ID NO: 134484 - DNA, 279 bp, Enterobacter cloacae
atggcggccgggtgttgtgttatgtggtgcatgcgttataatccttcacaggccacgcgcctgcttttggaccccctgatatctgtgtcttccgccaagatgatgacagatgtcggggggtttgtgcattcaggctccgggaaatcccgttacctgctcctgaacgttttactggacacgtcctgtccctgtctgtttccggaagtccgcatttcttccgtaaaaccatcttttgccacccgcctgcctcaccacaaagcagtcaaaccgtcagtttga

SEQ ID NO: 134485 - DNA, 267 bp, Enterobacter cloacae; identical to SEQ ID NO: 119602

SEQ ID NO: 134486 - DNA, 486 bp, Enterobacter cloacae; identical to SEQ ID NO: 119601

SEQ ID NO: 134487 - DNA, 351 bp, Enterobacter cloacae
atgtcgcttacttccctacaactctttaagaatctgtctgatgaaacacgtctgggtattgttctcatactcagaactatgggggagttgtgcgtatgtgatctttgcactgcacttgatcaatcacagcctaagatctcccggcatctggctatgttgcgagaaagtgggattttgcttgatagtaaacacggtaaatgggttcattaccggttgtccccacacattccttcatgggctgcacagattattgagcaggcctggttaagccaacaggacgatcttcaggccatcgcccgcaaactggcttcagtcaactgcactaacagcagtaaggctatttgtatttaa

SEQ ID NO: 134488 - DNA, 363 bp, Enterobacter cloacae
atgaaaacgctagcggtattcgacccggcaatgtgttgtagcaccggagtctgcggtactgatgtcgatcaggctctggttgatttttccgcggatgtgcaatggctgaaacaacgaggtgttcaggtagatcgtttcaatctggcacagcaaccgatgagctttgtccagaacgagaaagttaaagcatttattgaggcttctggtgcggaagggctgccattactgttactggatggcgaaacagtgatggccgggcgttatccgaaacgggccgaacttgcacggtggtttggaattccgctggagatagtaggattagcgccttcaggctgctgcggtggtaatacttcttgttgttaa

SEQ ID NO: 134489 - DNA, 1752 bp, Enterobacter cloacae
atgaaattcttacagaacattcccccttatctgttttttactggtaaaggaggcgttggtaaaacctctatttcctgcgccacagcgatccgtctggcagaacaggggaaacgagtgctgctggtcagtaccgatccggcctcaaacgtaggccaggtctttggccaggttattggcaatactattcagccaatagccactgttcctggattgtcggctcttgagattgatcctcaggccgctgcgcaacagtaccgggccagaatcgttgaccctattaaaggtgtcctgcctgatgacgtcgttagcagcatcaacgaacaactgtctggtgcatgcacaacagagattgctgcttttgatgagtttaccggattactgacagacgcctctttgctgacccggtttgaccatatcatctttgataccgcgccaaccggccatactattcgccttctccagttgccaggcgcctggagcagctttattgacagcaatcccgagggcgcatcctgcctcggcccgatggcggggctggaaaaacagcgtgaacagtatgcccatgccgttgaagcattgtccgacccagcgcgtacccggctggttttagttgccagactgcaaaaatccaccctgcaggaagtcgcccggactcatttagaactcgccgcaatcggccttaaaaatcagtacctggtcattaatggtgttctgcccaaaactgaagcggcaaacgatacactggctgcggcaatatggaaccgtgaacaggaggcgctggccaatcttccttctgacctttccggtctgccaactgacacgttattcctccaaccactcaatatggtcggcgtggctgcattaagtgggcttctctcttctcagcctgaggtagcatcatcttctgaagaatacattcagcaacgacctgaaatcccgtctctatcggcgttagtcgatgatattgcccgtaatgaacatgggctgattatgctgatgggcaaaggtggtgtggggaaaaccacgatggctgctgccattgctgtcagactggccgaaatgggatttgatgtccatctgacaacgtctgatcctgcggcgcatctcagcacaactctcaacggcagccttaagaatctacaggtcagcaggatcgatcctcacgaggaaacggaacgctaccgtcagcatgttcttgatactaagggaggcgaactggacgaagcaggaaaacgcctgctggaagaagatttacgctctccttgtaccgaagagattgcggtcttccaggctttttcacgggtgattcgtgaagcgggtaagcgcttcgtggtcatggatacggcacccaccgggcatacgctactgctgctggatgccaccggggcgtatcaccgcgaaatagctaagaaaatgggcgataaaggccatttcaccacgccaatgatgcagcttcaggatccggagcgaaccaaagtgttactggtcacgctgccggaaaccacgcccgtgcttgaggcggcaaatttgcagactgaccttgaacgcgcagggattcatccctggggctggattatcaataacagcctttctattgcggatacccgttcgccgctgcttcgtctgcgggcgcaacaggaacttccgcagatcgagagcgttaaactccagcatgccagtcgcgtagctcttgttcctgtactggcatcagaaccgaccggcatcgacaaactcaaacaactcgctggttaa

SEQ ID NO: 134490 - DNA, 537 bp, Enterobacter cloacae
atgaaaatcgttaacgcagaagaaaagcacatccccgctatacgcgatatctacgcccatcatgttcttcacggtaccgccagctttgaaactgaaccaccggatactcacgagatgcttgcccgcctgaaaaagatccgcagtgaggcgctaccgtgggttgtcgcgttagaggaagaaaaggtcatcgggtattgttatctcactcgttaccgtgaacgctacgcctaccgccacactctcgaagattcgatttatattcacccggacgcgcagcgtcaggggacaggaaaagcattgctgcgccacgtcattgcctgggcagaaactcatggctatcggcaggtgattgctattgtcggcgatagcaataatcaaggttcgctgaaagtccatcagcaggtcggatttactgagattggtacgctgaaaaatattggcttcaagcatggtcgttggcttgacacagtgttgctgcaacgacatctgggcgaagggaacagcacgttaccatcggattcaggcatgatgatctga

SEQ ID NO: 134491 - DNA, 813 bp, Enterobacter cloacae
atgtcatcaaaatcaaaacggaacggaaaaggttttttatcaggcacattaataggtgctttaggcggcttgattggccttggtggtgcggagttccgtcttcctgtcctgatagggagtttcaaaatgcccacgctggaagcggttatttttaacaaggcaatgagtcttattgttgtcgctgttgctttgatattccgaacaaaacccattgccgtcgatcagatgtttgctcatcttgatattgtcatcaatttgctggccgggagccttatcggtgcatggtgggcagcaggaagagccataaaaatgtcccgtatttggctggacagaaccattctgctcctgcttgtcatcctgtcattcgtcatgctttcagaagcatggatgcctttgcatgatagctctgctggattattcccgcctggaatctcaaccattattgcgggtgttattgcgggtttcttcattgggaatgtggctgctcttctgggtgttgcaggaggagaactcctgataccaactatcgttatcctttttggggctgacattaaactggctggtagtttgtcactcatgatcagtttgccgacgatgattgtggggttttctcgctacaccaatgcagatgctttccagatactgagaaaagagaaaaaactttttgtgtggatggtcgccggttccgttattggggctgctattgggggactcatgcttggtatgttcccggtaagagtgcttatgacgctattaggcgcggtacttcttatttccgcaatcaaaacctttaagcatacccggcaaagttaa

SEQ ID NO: 134492 - DNA, 369 bp, Enterobacter cloacae
atgaaaaacaccccccttaaatcaaacttaatcttagtcagaccaaggatctatattaacgacaacatctcgctagggccggggaaggttgaccttttaagggcgattgatggctttcactctctttctgcggcagcaaaagatttggggataccttataaaagggcatggctcttaattgacactttgaataaggggattggccagccagtggtaatcacttctactggtggtaacaaaggcggtgggacagttctgacgccattggggcgtagcctgctgacctggtatgaccaggccgaggcccacctcaatgagcaatctcagcaacagttaatcgaacttgaaaagattcttttcggaaaatga

SEQ ID NO: 134493 - DNA, 318 bp, Enterobacter cloacae
atgaccccaatgatgcaactccaggacccagaaaaaacgaaagttattatcgtgactctggcggaaacgactccggtgctggaagcagcaaacctgcaaaaagatctgcgccgagctgatattgaaccgtgggcatgggtgataaataacagcattgctgctgcgaaacctacatccccattcctgatgatccgagcacgtcgtgaactaccgcttatcgccgatgtaacaagtaaatacgcaaaacgtatagcgttgacagcgctacagagcgaagagccggttggtattgacttgctggaaggtatggcgaagtaa

SEQ ID NO: 134494 - DNA, 246 bp, Enterobacter cloacae
atgtccggtcggtgccgtatccataattacgaagtgatcatctgcttctttgatgatgcgggagaatgcctggaagaccgcaatctcttctgtgcatggagaacgaagatcttcttccagaacagccagaccttctgcatccagcccttttccttggttatcgataacaaactggcgatagcgctccgtttccacctttggatcaatacggggtcagtttggatatcgaaaattattgtactataa

SEQ ID NO: 134495 - DNA, 1014 bp, Enterobacter cloacae
atggctgagggtgttggctcgttaatcgagatgaacttattaatcagtgaaaatgaaatggttatttcagcgctacgaaaaaacaacgacattctcgaagatatttttaaaaactcaaccatcgggatggcgctggtagccccttcaggcctatggataaaagttaacagctcactgaccagtatgctggggtatactgaagagcatctgctttccatcaactttcaaaatatcacccaccctgatgatttaagcacggatttaaaacaactagaggcactttctcgaggagatattcctttctaccaattggaaaagcgatacctggcggcgtcaggccattatatatggatccttctgagtgtctctctagtacgtgaggataacggtaatgtcaaatattacattgctcaaattcaaagtgttgatgagcgaaaaaggatggaggtggagctaaaaaaacaaaaagaggaactgcacaaggtcaatattattttggagcgcatggccacggaggacagtctgacagagattgccaatcgccgaaagttcatgctctggtttgagagtgaaatgaccagagtggcgcgccatcccgttcctgtatcacttgccattgccgatatcgatttttttaaatcgtataacgactcctatggccaccaggaaggtgactttgccctaaagaatatcgccagagaactcagctataccctgcgaagccaggataaagtcgcgcggtttggcggggaagaatttatcatgcttttccctgaaacggatgaaaaaggctgctttttggcttgcgaaagattacgaaaaagcgttgaaaacctgacatctctcagaagaacggtcacgatcagtattggtgcagtgacattccatccgaaagaaggggagcttgttcactttgatgatttattgaaagtagcggactcaaagctctatgaagcgaaaaggtctgggagaaatcaggtcaaagtggtctacttagataaccctctgaagtaa

SEQ ID NO: 134496 - DNA, 393 bp, Enterobacter cloacae
atgcaatcccggatgacaaaggacattgtcctgaacgcactgctgatggctgtatggcggcgtaatccccaaaaacaggtgctggttcattcggatcagggcagtcagtacacaagccatgagtggcagtcgttcctgaaatcacacggcctggagggcagcatgagccgtcgcggtaactgccatgataatgcggttgcagaaagctttttccagttgttgaaacgcgaacggataaagaaaaagatctacggaacgcgggaagaagcccgcagcgatatttttgattacatcgaaatgttttataacagtaagcgtcggcatggttctagcgatcagatgtcaccgacagaatatgaaaaccagtattatcaacggctcggaagtgtctag

SEQ ID NO: 134497 - DNA, 1437 bp, Enterobacter cloacae
gtgctgcatacactcctgcaacgctttacggatctccaccggatcttcgccgttacggttgccgttccagcggttgagccgctcaagagaggcatcgatttcgtcgtcggtcgcatcacgcagcgcgccctgctcggcaatagattcctggagatgcagccccaccgcacgaccaaacaccaccaggtccagcagggagttgccgcccagacggtttgcgccgtgcacggatacgcaggcaatttcgcctaccgcgaacaggccagggatgaccacgtcttcgccctgctcgttcacggtcagcgcctgaccggtcactttggtcggaataccgcccatcatgtagtgacaggttgggataaccggaattggctctttcaccgggtcgacgtgcgcgaaggtgcgggacagctccagaatgcccggcagacgggattccagtacttctttacccagatggtcgagtttcagcttcgcgtgtggaccccaagggccgtcacagccgcggccttcacggatttcgatcatgatggaacgcgccaccacgtcacggcccgccaggtctttcgcgttcggcgcataacgctccataaagcgctcgccatgtttgttcagcaggtagccgccttcaccacggcagccttctgtcaccagtacgcccgccccggcgataccggttgggtggaactgccacatctccatgtcctgcaccggcacgccagcgcggatcgccatcccaacgccgtcaccggtgttgatatgggcattggtagtggactgatagatacggcctgcgccgccggtcgccagcacggttgcgcgggctttgaagtagaccacttcaccggtttcgatgcacagggcggtacaacccaccacggcgccatcggcgtttttcaccagatccagcgcataccactcggagaagatggtggtgtggtttttcaggttctgctgatacagcgtgtgcagcagcgcgtggccggtacggtcagctgccgctgcggtacgtgccgcctgctcgccgccgaagtttttcgactggccgccaaacggacgctgatagatggtgccattttccagacgggagaacggcagacccatgtggtccagctccagaatcgcttccgggccagttttacacatatattcgatggcatcctggtcaccgatgtaatcggaaccttttaccgtatcgtacatgtgccattcccagttatcttcatgggaattacccagcgcaacggtgataccgccctgcgcagacacagtgtgggaacgggtcgggaatactttagagagcagcgcacaggtctggccgctctgggaaatttgcagtgcggcgcgcatacctgcgccacccgcaccaatcacaacagcatcaaattctctgactggcagtttcattacacaccccacaccacaacaaatccataa

SEQ ID NO: 134498 - DNA, 351 bp, Enterobacter cloacae
atgaacaacaccacaatgcacaaaacgctgctggcgattgccatcggcgcggtaacccactccgcttttgcggcggatgagaaaaaagaggacaccattgtcgtccagtccaccgcggggagtgatttcaaacccggcggcgaccagctggtgcccgccttccttgacgggcaggtggcgaacggcggacgaatggggatgctcggtcagcagaacgccatggacgtgccgttcaacatcatcagctacacctcgaagctggtggaagatcagcaggcgaaaaccattgctgacgtggtcgctaacgacgcgggcgtgcagttcgttcaggggtacggcaacagcgcgtaa

SEQ ID NO: 134499 - DNA, 837 bp, Enterobacter cloacae
ttgcagaactcgcttaatggcttgccccaatgggtatctgaacgcattctgcagcagataaatcagttaacccaatacgagcctgtaataggtattatgggtaaaactggctcgggcaagagcagcctatgcaatgccctattttccggcgatgtttcgccggtcagtgatgtagcggcctgtactcggaaagcgttgcgatttcgcctgcagctcggcaagcgcttaatgacaattatggacctgcctggtgtaggggagtccaaactgcgggatgctgaatatgccgcgctttaccgtaaagagcttccccggctggacctggtgctgtggttgattaaaggcgatgatcgggcgctggcggtggatgaacatttttaccgtcaggtgattggtgagtcttaccggcataaggtgctgtttgttatcagccaggccgataaggctgagcccaccagttgcggagaacacttatccacggaacagaaacaaaatatcagccgtaaaatctgccagttacatgaactcttccaacctgtaaaccctgtctgcgcggtgtcggtacgtttgcagtgggggctgcgggtgatggctgaacggatgatccgttgtctgccacgtgaggccagcagcccggtggcgatacagcttagtgctccacttcgtaccgatgccgttaataaaaaagcccgtgacgattttggtgaaacggtcggctcggtactggatacagtaagttccatgcccctgataccagccccggttcggacaataatccaggctgtacgcgataccgtggtatcggccgcccgcgccgtctggaattttttcttctga

SEQ ID NO: 134500 - DNA, 819 bp, Enterobacter cloacae
atgaaatcactgtttaaagttacgctgctggcgaccactatggctgtagcgctcaatgcgccgctgtctttcgctgctgatactgctgcgaagcctgctgcgactacagacagcaaagcggcattcaaaaatgacgaccagaaatccgcctacgcacttggcgcgtctctgggtcgttacatggaaaactctctgaaagaacaagagaaactgggcatcaaactggacaaaaaccagctgatcgcaggggttcaggatgcgttcgcagacaagagcaaactgtctgaccaggaaatcgagcagactctgcaagcgtttgaagcgcgcgtgaaaggtgccgctcagaccaagatggaagcagacgctaaagataacgaagcgaaaggcaaagcctaccgcgacaagttcgctaaagagaaaggcgttaaaacgtcttctactggcctgatctataaagttgagaaagaaggtaccggcgacgcgcctaaagacagcgacaccgttgtggtgaactacaaaggtacgctgatcgacggtaaagagttcgataactcttatacccgtggtgagcctctctccttccgtctggacggtgtgatcccgggctggaccgaaggcctgaagaacatcaagaaaggcggtaaaatcaagctggtcatcccaccggatctggcttacggcaaaaccggcgttccgggtatcccggctaactccacgctggtatttgatgtagaactgctggacatcaaaccggcgccgaaagcggatgcgaaaacagacgcaccggctgacgacaaagccgcagcagctaagaagtaa

SEQ ID NO: 134501 - DNA, 177 bp, Enterobacter cloacae
atgaaattcttaccagttgttggctgggagggaatctaccaggttaatgatggtggagatgtactaagcatacctagggtaattttgaggagagatggctctaaacagcgatttaaaggaaagaaactaaaaccgtttttaaacgaggcaggctatctcgttgtcaggttgagttga

SEQ ID NO: 134502 - DNA, 669 bp, Enterobacter cloacae
atggttatttggtcgctttttgatggttctgggattatggggcttccttgggctgaatgtggtcacaccgtttactgttttaatgcctcatcgggtaatcatggtgaatatgtaggacggaatgagcatccgttagttcatcacatcgatatgtggattgatggagattttgcggagaagtgcgtcacgatgaacattcccagtccagacattatctttgctttccccgactgcacagagcttgcggtatcaggtgcgaagcatgatagccacacaagtcttgcttccgtagataacgcgaaaatggtgcagaaaattgcggaggaattcggcgctaaatggatggttgagaatccggtaggaaaaatgtcaacggcatggcgcaagccggattactactttcacccgtatgaatacggaggacatatgcacggacgcgaggaaagctttcacccgaaaatgccagcgtatgacggttacacgaaaaaaacatgtatttgggctggcggtgggtttgtcatgccagataaaaaaccgggaccggtgaatattggactgttttgggggtggcgttggttaggtggcaactcaccgcgtacgaagcaactacgttcacttacgccacgcggattcgccagagcggtatttttagcaaatcgggaggactaa

SEQ ID NO: 134503 - DNA, 303 bp, Enterobacter cloacae
atgagcaacatcaacaaacaggatctgcgcctaacagcagaaaaggcgaaagataacttcatgccgaacttcatggtaccaactcgcgatttactggcgctgctggatgagctggaagccgcagagaagctgattgccgagctggagacgcgggaggtgatactccctcagcgaatggatcctgaggggtatcacatcgacgaagcctatatggtagcagccgaagatggtgagtatcttgaccgcgacgaagttatcgaagcgatgcgtactgccggaatccgcatcaacggggagggctga

SEQ ID NO: 134504 - DNA, 348 bp, Enterobacter cloacae
gtgacccaagaatttagagatgctgtaaaagtgacagatgcagaagcttcttttcaagaaaggcaactgtatcaggttcagatagctgtgaaggctttgattgatttcgttgtcactagctttgaagagttgggtatcgaaaagttacatgagctcgttgatccgtcacttgatgaggttcatgagatcattctcaagcttgataccaaagccaagcaacttggcgctcttgacctacagcaggtattgcttaccgcgcagatactgattcgtgatattaaacagaaaaacccagatctgtgtgcacaaagctccaaaattctcaaaggggctgtaatttttaaataa

SEQ ID NO: 134505 - DNA, 123 bp, Enterobacter cloacae
atgaataaactccacacaatttctgagatgcttaaactggctggccgtcttaatgaaatcgttgcagaaatgcaagctcgcaaggatgctatccttgcagaaatgaacaagaaagctgcataa

SEQ ID NO: 134506 - DNA, 270 bp, Enterobacter cloacae
atgacaattgattttgaagtgaaagctacaggtattgatgtttcaacaagtggttaccgtgaccacgtcattttagaagttcgcggcgtggaactctccgatcttgtctctgaaattgaagaaaaagcgctctttcaggaaattgatcttgatgactatatcggctgggctgaggctgctggtcacattgaagacattcttgatcggcttgatgtggatgaagttatcgcatggttgcgcagcaacggacacctggagactgaatcatga

SEQ ID NO: 134507 - DNA, 159 bp, Enterobacter cloacae
atgacagtcacccacaacggcaagcagtacaccgccaaaaagctcaacgataacgagtggcagttgacgtcggtatcggcaccgcgcgacaagctgacgctgaaccgccaacagatgaatatcgctggcctcatgaaacaggttgaggtgaaggcatga

SEQ ID NO: 134508 - DNA, 153 bp, Enterobacter cloacae
atgaatgacgctcacgatgacatcagggttggcacactgtgccttcccttcattggtaacggctggctaatgccatggggtgaagtggtcagcaatccactaaaggcgcagcggctcgctgaggaatatcgagaaaggcaggaggcggcatga

SEQ ID NO: 134509 - DNA, 240 bp, Enterobacter cloacae
atgttcaggataatccagcctaatacctggtacgccgatctccacggcgcgccctgcaaaatcctccgtgctacccacgaagtaatccactacatccgcaacggtcgcacctgcatcgccagcatgggccgctttcagcacgaattcgagccgctgaccaaagcacaggccgcgcggatcgctgaagaaatcgaaacagcagaacacctgaagaagctgcgcgcccagcgtgcggcatga

SEQ ID NO: 134510 - DNA, 261 bp, Enterobacter cloacae
atgcgttacagctcaaatgatggtgcgaacctgaacttactcgcctttagctgctttgaaagcttcagccattgcgttgttagagaagtttgcatcttcctgtttgttcacagttgcgattgcatctttctcatcagcttcgtctttagcacgaacagacaggctgattgcacggttcttacggtcaacaccggtgaacttagcttcaacgtcgtcaccaacgctcagaaccagagttgcatcttcaacgcggtcacgtga

SEQ ID NO: 134511 - DNA, 1245 bp, Enterobacter cloacae
atggcaacactaaccaccacccaaacgtcaccttcgctgcttggcggcgtggtgatcatcggcggaaccatcattggtgccgggatgttttccctgcctgtggtcatgtccggtgcgtggttcttctggtcgctggcggcgctggttttcacctggttctgcatgctccattccgggctgatgatccttgaagcaaacctgaactaccgcattggctccagcttcgacaccatcacccgggatctgttgggcaagggctggaacctggtgaacgggctgtccatcgcgtttgtactctatatcctgacctacgcgtacatttcagcgagcggctcgattctgcatcacaccttctcagagatgtcgctgaacgttccggctcgtctggcgggtctctgcttcgcgctgggcgtggcgtttatcgtctggatgagcaccaaagcggtcagccgcatgacggcgatcgtgctgggcgcaaaggtcatcaccttctttctgaccttcggcagcctgctggggcacgtgacgcctgccacactgtttaacgctgcggaagtgaacacctcctacacgccgtacctgctgatgacgctgccattctgtctggcgtcgttcggctaccacggcaacgtaccgagcctgatgaagtactacggcaaggatccgcgcaccatcgtgaaatgcctggtttacggcacgctgctggcgctggggctgtatgttatctggctgctggggacgatgggtaacatcccgcgtccggaatttatcggcattgcgcagaagggcggtaacattgatgtgctggtacaggcgctgagcggcgtgctgaacagccgcagcctggatctgcttctggtggtcttctctaactttgcggtggcgagctcattcctcggcgtgacgctgggcctgtttgactacctggcggatctgtttggttttgatgactctgcgatggggcgcttcaaaacggcgctgttgaccttcctgccgccgattgtgggcggcctgctgtggccaaacggtttcctgtacgccatcggctatgcgggactggcggccaccatctgggcggcgattgtaccggcgctgctggcgcgcaaatcacgtaagcgcttcggcagcccgaaattccgcgtctggggcggaaaaccgatgattgcgctgatcctggtatttggtatcggcaacgcggtggtgcacgtgctgtcgagttttaatctgttgcctgtgtatcagtaa

SEQ ID NO: 134512 - DNA, 1317 bp, Enterobacter cloacae
atggccgctaatcttaccgagactgctatacgtggattgaagacaaaaagtacgtcgtactacgtgtggagcaacagtgctcaacgtggtactggcaggcttggcgttaaggttcaaccttcaggcagcaaagttttttatttccgttattacgttgagaaagggaagaaagagaagttcatccagttgggcatctggcctgagatgaaactcgtaacagccaatgagctggcgaaaaagtatggtgcctggcttgttgaaggaaaagagccccaacaagagcttgagcaacaacgcctggccgaagagcacattatgcagatccatcgctctcaaggatcgtttgaagagctggtgcatggctacgttaacaagatgaagctcgacaataagcggacctgggctgatgttctgaagcgtcttgaaaaagagtgctacacggttatccctcgagaaaccaaagcgaaagatgtaacacctctgcagatcaaaaccatcctctcaggcattatccagcgtgatgcggtggtgcatgctaatcggattcgctcgtatctgatggcggcatttaactacggcctgaaagctgataacgatccgattaataccagcgtgggtatcacgtttggtcttgaagttaacccggtctcggccataccgaaacagtcttcggcggaaaaagtgggtgatacatggctaacactggaagagttgcgtgttgtcatggaacagttcgccggggccaccaacgttgggccgctgatgcagcatctgattcgcttctgtgtttatgctggtgggcagcgtccgtttgaaatgattgccagccagtggagtgctattgattggcaacaaaagacgttgctggtcatagccgatgtatcgaaaaacaagcgtgagcatctgatcccgctgactgaatcggcactacaggaattagcctcagtgaaagaactgactaaggaaagcaacagtccctatatcttcccactctcgaccaatggagatcgaccggtacgcactgatagtctggcgcgttccatcatgtatttccgggcttttaatcctgagtttaaagttttcacggcgcgagatttacgtcgcacctgtaaaacgttgatgggggaggcggggatcagcaaagagatccgcgaccgtatccagaatcacgctttgaatgacgtcagctcgaaacactatgatcgttatgattacttgcctgaaaagcgcagggcgcttgagatttgggaagatagggtcaacaactatcagcgacagcaggaaaacaacgttgtgaacttgtttgggcggaggtaa

SEQ ID NO: 134513 - DNA, 615 bp, Enterobacter cloacae
atgaaacgtgtcgggataaaggctcaggtcggataccggagcccgcgggcacgtaaaggcgaggccagtatcgtgtcgcccaacaggctccagcgacagttcaatccggatgctccggataagcgttgggtaacggacataacctacatcaggacccacgaaggctggctgtatcttgccgtggttgttgatctgttctcacgcaaaattatcggctggtccatgcaatcccggatgacaaaggacattgtcctgaacgcactgctgatggctgtatggcgccgtaatccccaaaaacaggtgctggttcattcggatcagggcagtcagtacacaagccatgagtggcagtcgttcctgaaatcacacggcctggagggcagcatgagccgtcgcggtaactgccatgataatgcggttgcagaaagctttttccagttgttgaaacgcgaacggataaagaaaaagagctacggaacgcgggaagaagcccgcagcgatatttttgattacatcgaaatgttttataacagtaagcgtcggcatggttccagcgatcagatgtcaccgacagaatatgaaaaccagtattatcaacggctaggaagtgtctag

SEQ ID NO: 134514 - DNA, 2727 bp, Enterobacter cloacae
atggctacgattcatgtagacggcaaagaatacgaggtcaacggggcggacaacctgctagaggcttgtctctctcttggtcttgatattccctacttttgctggcacccggcgctagggagcgtcggtgcttgccgccagtgtgcggtgaagcaatatcagaacgcggaagacacgcgtggtcgcctggtgatgtcctgtatgactccggcatccgacggcacctttatttctatcgacgacagcgaagcgaagcagttccgcgaaagcgtggtggagtggttgatgactaaccacccgcacgactgcccggtctgcgaagagggcggcaactgccacctgcaggatatgacggtgatgaccggtcatagcttccgccgctatcgtttcaccaagcgtacccaccgcaatcaggatctggggccgtttatttcgcacgaaatgaaccgctgcatcgcctgctaccgctgcgtgcgctactacaaagattatgccgacggcaccgatctgggcgtctatggcgcgcacgacaacgtctacttcggccgcccggaagatggcaccctggagagcgagttctccggcaacctggtggaagtctgcccaaccggcgtcttcaccgacaaaacccactccgagcgctataaccgtaagtgggacatgcagtttgcgccgagcatctgccagcagtgttccatcggctgtaacatcagcccgggcgaacgctatggcgagttgcgtcgtatcgaaaaccgctataacggtaccgtgaaccgctacttcctctgcgaccgcggtcgtttcggctatggctacgtgaacctgaaagaccgtccgcgtcagccggtgcagcgccgcggcgacgatctgatcacccttaacgccgagcaggcgatgcagggggcggcggatatcctgcgccagtcgaagaaagtgatcggcatcggctccccgcgcgccagcattgaaagcaacttcgcgctgcgcgagctggtgggcgccgacaacttctataccggcatcgccaaaggcgaacaagcgcgcctgcagatgatgctgaaagtgctgcgcgagggcgggatccacacgccaagcctgcgcgatatcgaatcctacgatgcggtactggtgctgggcgaagacattacccagaccggcgcgcgcgtggccctggcggtacgccaggcagtgaaagggaaagcacgcgaaatggcggcggcgcagaaagtggccgactggcagatcgccgcgatcctcaacatcggccagcgcgccaagcacccgctattcgtcaccaacgtcgatgacacccgcctggatgacatcgcggcgtggacctaccgcgcgccggtagaagatcaggcgcgtctcggctttgctattgcccatgcgctggacgacagcgcgccggcggttgacggcctgagccaggacctgcagggtaaagtcgacgttatcgttcaggcgctggccggggcgaaaaaaccgctgatcatctccgggaccaacgccggcagcatggagatcatccaggccgccgctaacgtggcgaaagctctgaaaggccgcggcgccgatgtcggggtgaccatggtcgcccgggcggttaacagcgtcggactgggcatgatcggcggcggctcgcttgaagaggcgctggacgaactggaaagcggcgccgcagacgcggttatcgtgctggaaaacgaccttcaccgtcatgcttccgccgcgcgcgttgacgctgcgctggcgaaagcgccgctggtgatggtggtggatcatcagcgcaccgcgattatggacaaagcgcacctggtgctctccgcggcaagctttgcggaaagcgacggtaccgtggtgaacaacgaaggccgcgcccaacgtttcttccaggtatacgatccggcttactacgacgcgaaaaccgtaatgctggaaagctggcgctggctgcattcgctgcacagcaccgtcaacaaccgtcaggttgactggactcagctggaccacgtcattgatgcggcgattgcggcgctgccgcagctggcgggcattaaagacgccgcgccggatgcgaccttccgcatccgcggccagaagctggcgcgtgaaccgcaccgctacagcggccgcacggcgatgcgcgctaacatcagcgtgcacgagccgcgtcagccgcaggataaagacacgatgttcgccttctccatggaagggaacaaccagccgtccgccccgcgttcgcagatcccgttcgcctgggcgccgggctggaactccccgcaggcatggaacaagttccaggatgaagtgggcgggaaactgcgccacggcgatccgggcgttcgtctgtttgaagcgtccgccagcggactggagtacttcacggcggtgccggccagcttccaggcggaagagggcaaatggcgaattgcgccgtactaccatctgttcggcagcgatgagctgtctcagcgcgcgccggtgttccagagccggatgcctgagccgtacatcaagctgaacccggcggatgccgcgaagcttggcgtcaacccaggggcaatgctctcctttagcgtggaaggccagaccctgcgtctgccgctggttatctctgaaggcctgaccgcgggacaggttggcttaccgatgggcatgccgggcattgcgccggtgctgaccggatcgcgtattgattcactgcaggaggcgaaagcatga

SEQ ID NO: 134515 - DNA, 978 bp, Enterobacter cloacae
atgagctggttaacgccggatcttatcgacattctgttaagcatcctgaaggccgtggtcattctgctggtggttgtcacctgcggcgcgttcatgagcttcggcgagcgtcgtctgctcggcttgttccagaaccgctacggacctaaccgcgtcggctggggcggttcgctgcagctggtcgccgacatgatcaagatgttctttaaagaggactggatcccgcgcttctccgatcgcgtgatctttactctggcgccggttatcgcctttacctcgctgctgctggccttcgctatcgtgccggttagcccgacgtgggtggtggccgacctgaacatcggcatcctcttcttcctgatgatggcaggcctggcggtctacgcggtgctattcgccggttggtcgagcaataacaaatactcgctgctgggggcgatgcgtgcttccgcgcagaccctgagctacgaagtgtttctcggtctctccctgatgggcgtggtggcgcaggcggggtcattcaatatgaccgatatcgttaacaaccaggcgcatctgtggaacgttatcccgcagttcttcggcttcgtgactttcgccatcgccggcgtggcggtgtgtcaccgtcacccgttcgaccagccggaagcggagcaggaactggccgatggttaccacattgaatattccggcatgaaattcggtctgttcttcgtcggggaatacatcggtatcgtcaccgtttcagcgctgatcgtcacgctgttcttcggcggctggaatggcccgtggttacctcctttcatctggttcgcgctgaaaaccgcgttcttcatgatgatgttcattttgatccgcgcatcattaccgcgtccgcgctatgaccaggtaatgtcctttggctggaaggtatgcctgccgttaacgctggtcaacttgttggtaacggcggctgtcattctctggcaggcgcaataa

SEQ ID NO: 134516 - DNA, 543 bp, Enterobacter cloacae
atgaccttaaaagaattattggtggggttcggcacccaggtccgtagtatctggatgattggcctgcatgccttcgccaaacgtgaaacccggatgtatccggaagagccggtctacctgccgccgcgctatcgcggccgcatcgtgctgacccgcgatccggacggtgcagagcgctgcgtcgcctgtaacctgtgtgcggtagcctgcccggtgggctgtatctcgctgcagaaagcagagacggtagacggccgctggtatccggagttcttccgcatcaacttctcacgctgcatcttctgcggcctgtgcgaagaagcgtgcccgaccacggcgatccagttgaccccggacttcgagctgggtgaatacaagcgtcaggatctggtgtacgaaaaagaggatctgctgatttccggtccgggcaaatacccggaatataacttctaccggatggcgggtatggcaatcgacggcaaagataagggcgaagcggaaaatgaagctaagccaatcgacgtcaagagcctgttaccgtaa

SEQ ID NO: 134517 - DNA, 555 bp, Enterobacter cloacae
atggaattcgctttttatatctgtggcctgatagccatcctcgcaaccttgcgggtcgtcacccacaccaatccggtgcatgcgctgctgtacctgattatttcgctgctggcgattgccggggtgttcttctcgctgggcgcgtacttcgccggagcgctggaaatcatcgtctacgccggggccattatggtgctgttcgtcttcgtggtgatgatgctcaacctgggcggcaccgagatcgaacaggagcgcaagtggctgcagccggggatctggattggcccggccatcctctccgcggtgctgctggtggttatcgtttacgccatcctgggcattaacgaccagggtatcgacggtgcggcgattaacgccaaagaagtgggcattgcgctgtttgggccgtacgtcctggcggtggagctggcctccatgctgctgctggcgggcctggtggttgccttccacattggccgcgaagagcgcgccggcgaggtgctgagcaaccgtctgaacgacagcgacaaacgaaaaacggaggaacacgcatga

SEQ ID NO: 134518 - DNA, 243 bp, Enterobacter cloacae
atggagctgcagcagcagcgccaggccgatactcgcttccgcagccgcgaggctgatggcgaggatatacattatctgaccatctgcctgaccccagtagctacccgccaccacaaaggccagcgcggcggcgttaatcatgatttccaggctaatcaacataaacagcagattgcggcggatcaccagccccgtcagaccaagcacaaacaggatggccgcgaggatcagtccatgtgttaa

SEQ ID NO: 134519 - DNA, 678 bp, Enterobacter cloacae
atgaaatgggactggattttctttgatgccgacgaaacgctgtttacgtttgactcgttcggcggcctacagcggatgtttctcgactatagagtgacgttcaccgcggaagattttcaggactatcaggcggtgaacaaaccgctgtgggtggattaccagaacggagccatcaccgcgttacagcttcagcatcagcggtttgacgtgtgggctgaacggttaaacgtcagtcctggggtgctgaatgaggccttcctgaatgccatggcagatatctgcgcgccgctgcctggcgccgtttctctgctggattcgctgaaagggaaggtgaagcttgggatcatcaccaacggctttaccgcgcttcagcagatccgccttgaacgcaccggcctgcgcgatcatttcgacgcgctggtgatctccgaagaggtgggcgtgccgaagccggatccgcgtattttcgattatgcgctggcgcaagcgggcaatcctgaccgcgatcgcgtgctgatggtgggggatacggcagaatctgatattctgggaggtatgagatcgggcctgtcgaccgtctggctgaatgcgcatggccgcacgctgccggaaggcatcgaaccgacctggaccgtaacgtcattgaacgaactggagcagctcctgtgtaaacaatga

SEQ ID NO: 134520 - DNA, 393 bp, Enterobacter cloacae
gtgcctgatttctttttctttattaacgaagtcctctggggttcgatcatgatatacctgctttctggagcaggtatctggtttacgtggcgcagcggtctgattcagtttcgctatatccgcaaatttggcagaagtctgaaaaacagcgtcaccccacagccgggcggcctgacctcgtttcaggcgctctgtaccagccttgccgcgcgcgtcggcagcggtaacctggccggtgtcgcgctggcgatcggcgcgggcggtccgggcgcgatattctggatgtgggtgacggcgattatcggtatggccacctcctttgctgaatgctcgcttgcgcagctctacaaagaaaaagacggcaaaggtcagtttcgcggcggtcccgcctag

SEQ ID NO: 134521 - DNA, 972 bp, Enterobacter cloacae
atgcctaacagtttgacctggtgcgacctgcctgaagacgtttccctgtggcctgggttgccgctttccctgagcggcgacgaggtcatgccgctggattatcacgccgggcgcagcggctggctgctgtatggtcgcggtctggataaacgtcggctgacggcgtggcagcgtgagctgggcgccgcgttagtgatcgttgcctcctgggtggtcgaggattaccaggtgatccgtttggccggttcgctgactccccgtgcgacgcgactggcgcatgaggcggggctggacgtcgcgccattgggtaaaattccccatttgcgcaccccgggcctgctggtgatggacatggactccacggcgattcagatcgaatgcatcgatgagatcgcgaaactggccggcaccggcgagctggtctcggaagtgaccgagcgggcgatgcgtggcgagctggacttcaccgccagcctgcgccagcgcgtggcgacgctgaaagacgccgatgccagtattttactgcaggttcgcgacgcgctgccgctgatgccgggcctggcgcagctggtgctcaagctggaaacgctgggctggaaagtggcgatcgcctccggcggtttcaccttctttgccgagtatctgcgcgacaaactgcatctcgacgcggtattcgccaatgagctggagatccgcgacggcaagctcaccggcaacgtgctcggcgatatcgtcgatgcgaaatataaagccaatacgttgcgcaagctggcggaaaagtatgagatcccaacggcgcaaaccgtggctatcggcgatggcgccaacgacctgccgatgattaaggcagcagggcttggcatcgcctttcacgcgaagcccaaagtgaatgaacaggcggaagtgactatccgccacgctgacctgatgggggtattctgtattctctcgggcagcatgaaccaaaagtaa

SEQ ID NO: 134522 - DNA, 648 bp, Enterobacter cloacae
atggttcgcgcaaaactgaaattccggctgcatcgtgcggtcattgttcttatctgtctcgccctgctcgtcgcgctgatgcagggcgcttcgtggttcagtcagaacagtcagaaacaacgcaatccgcagctggaagagctggcccgcacgctggcgcagcaggtggtgctgaatctcgcgccgctgatgcgcagcgagacgcctgacgagaagcgcatcaatcagctgttgacccagctaacccataacagccgcgtcctggacgccggcgtatatgacgaacagggcgacctggtggcgcgctctggcgaaagcgtcgaggttcgcgaccggctggcgctggatggtaaaaaagccggcggctacttcaaccagcagattgtcgaaccggtgccaggaaaaaacggcccgctgggctacctgcgtctgaccctcgatactcataccctggcgaccgaggcgaagcaggtggataataccaccaatatcttacgcctgatgctgttactgtccctggctatcggcgtggtgctgacccgcacgctgctgcagggcaaacgcacccgctggcagcaatcgcccttcctgctcaccgccaacaagccggttgaggatgaagacgatgaaaagaaaggaaatctataa

SEQ ID NO: 134523 - DNA, 720 bp, Enterobacter cloacae
atggcaactcctcacattaacgcagaaatgggcgatttcgctgacgtcgttttgatgccgggcgacccgctgcgcgcgaagcacattgcagaaaccttcctcgaagacgtgcgtgaagtgaacaacgtgcgcggcatgctgggcttcaccggtacctataaaggccgcaaaatctccgtgatgggccacgggatgggtatcccgtcctgctctatctacaccaaagagctgatcaccgatttcggcgtgaagaaaatcatccgcgtgggctcctgcggcgcggtgcgtgaagatgtcaaactgcgtgacgtggtgatcggcatgggcgcgtgcaccgactctaaagtgaaccgtctgcgtttcaaagaccatgattttgcggcgattgccgatttcggcatggtgcgtaatgcggtagacgcggcgaaagcactgggcgttgacgcgcgcgtcggcaacatcttctccgcagacctgttctatacgccggacccgtccatgttcgacgtgatggaaaaatacggcattctgggcgtggaaatggaagcggcgggtatctacggcgtggcggcggagttcggcgcgaaagcgctgaccatctgcaccgtctccgaccacatccgtacccacgagcagaccactgccgctgaacgtcagacgaccttcaacgacatgatcaaaatcgcgctggaatccgtgctgctgggcgataaagagtaa

SEQ ID NO: 134524 - DNA, 1224 bp, Enterobacter cloacae
atgaaacgtgcatttatcatggtgctggactcctttgggattggtgcaacggaagacgcagaccgctttggcgacgtcggcgccgatacgctgggccacattgcagaagcctgcgccaaaggcgaggctgaccacggccgcaaaggcccgctgaatttaccgaacctgacccgtctgggtctggtgaaagcgcatgaaggctccaccggtaaaattgccgcgggtatggatggcaatgccgaagtgattggcgcctatgcctgggcgcatgaactttcttccggtaaagataccccgtccggccactgggaaatcgccggtgtgccggtgctgtttgactggggctacttcagcgaccatgaaaacagtttcccgcaggagctgctggataagctggtgaaacgcgccaacctgccgggctatctcggcaactgccactcctccgggacggtgatcctcgatcagctcggcgaagagcatatgaaaaccgggaaaccgatcttctatacctccgctgactcggtgttccagatcgcctgccacgaagagacctttggcctcgacaagctgtatgagctgtgcgaaatcgcgcgtgaagagctgaccgaaggcggctataacattggtcgcgtgattgctcgtcctttcgtgggcgacaaagccggtaacttccagcgtaccggtaaccgtcacgacctggcggtagagccgccggcgccgaccgtgctgcagaagctggtcgatgagaaaaacggccacgtggtgtccgtgggtaaaatcgccgatatctacgccaactgcggtatcactaagaaagtgaaagccaccgggctggacgcgctgttcgacgcgaccatcaaagagatgaaggaagcgggcgacgagactatcgtcttcactaacttcgtcgattttgactcctcctggggccaccgtcgtgacgtcgctggctacgcggcgggtctggagctgttcgaccgccgtctgccggagctgatggagctggttggtgaagacgacattctgatcctcaccgccgaccacggctgcgacccgacctggaccggtactgaccacacccgcgagcatatcccggtgctggtgtacggcccgaaagtgaaaccaggttcgctcggtcaccgtgaaaccttcgcggacatcggccagactattgcgaaatactttggtacgtctgacatggaatatggcaaagccatgttctga

SEQ ID NO: 134525 - DNA, 1323 bp, Enterobacter cloacae
gtgtttctcgcacaagaaattattcgtaaaaaacgtgatggtcaggcattaagcgatgaagagatccgctttttcatcaacggcatccgcgacaatactatctctgaagggcagatcgccgcgctggcgatgaccatcttcttccacgatatgtctatgccggagcgcgtttcgctgaccatggcgatgcgggattccggtaccgttctggactggaaaagcctcaaccttaacggtccgatcgtcgataaacactctaccggcggcgtcggggatgtcacttcgctgatgctggggccgatggtggccgcctgcggtggttacgtaccgatgatctccggccgcggcctcggccataccggcggtacgctggacaaactggaagcgatcccgggcttcgatatcttcccggacgacaaccgcttccgcgagattattaaagatgttggcgtggcaattatcgggcagaccagctcccttgccccggccgacaaacgtttctatgccacccgcgatattaccgcgacggtggactccatcccgctgattaccgcctcgattctggcgaagaagctggcggaagggctggacgcgctggtgatggacgttaaagtcggcagcggcgcctttatgccgacctatgagctttcagaagcgcttgccgaagcgattgttggcgtctctaacggcgccggcgtgcgcaccaccgcgctgttaaccgatatgaaccaggtgctggcctccagcgccggcaacgccgttgaagttcgcgaagcggtgcagttcctgaccggcgaataccgcaacccgcgcctgttcgacgtgacaatggcgctgtgtgtggaaatgctgatctccggcaagctggcggcggacgatgccgaggcgcgcgcgaagctgcaggcggtgctggataacggtaaagcggcggaagtgtttggccgcatggtcgcggcgcagaaagggccgagcgactttgtcgagaattatgctaattatctgccgacggcgatgctgagcaaagcagtctatgctgataccgaaggttttatcagcgcgatggatactcgcgcgctgggcatggcagtggtttctatgggcggcggccgccgtcaggcatcggacaccattgactatagcgttggctttaccgagatggcgcgtctgggtgaccgcgtcgacggacagcgtccgctggcggtgatccatgccaaagacgagaacagctggcaggaggccgcgaaagcggtcaaagcggccattaaactggacgataaagccccggaaattacaccgacagtctatcgccgtatcactgaatag

SEQ ID NO: 134526 - DNA, 780 bp, Enterobacter cloacae
atgactgatttaaaagcaagcagcctgcgcgcgttaaaactgatggacctgaccaccctgaatgacgacgacaccaatgagaaagtcattgccctgtgtcatcaggcgaaaacgccggtgggtaacaccgcggcggtctgcatctacccgcgcttcatcccgatcgcccgtaaaacgctgaatgagcaggggacgccggatattcgcatcgccacggtcaccaacttcccgcacgggaatgacgatatcgacattgcgctggcggaaacccgcgcggcgatcgcttacggcgctgacgaagtggacgtggtcttcccgtaccgcgcgctgatcgccggcaacgagcaggtcggtttcgagctggtgaaagcctgtaaggaagcctgtgcggcggctaacgtgctgctgaaagtgatcatcgaaaccggtgagctgaaagaagaagcgctgatccgtaaagcgtctgaaatctctatcaaagccggggccgatttcatcaaaacctcgaccggtaaagtgccggtgaatgccacgccggaaagcgcgcgcatcatgatggaagtgatccgcgatatgggcgttgagaaaaccgttggcttcaaaccggcgggcggcgtgcgcagcgcggaagacgcgcagcagttcctggcgatcgctgatgaactgttcggcgccgactgggccgattctcgtcactatcgttttggcgcatccagcctgctggctagcctgttgaaagccctgggtcacggcgacggcaagagcgccagcagctactaa

SEQ ID NO: 134527 - DNA, 1278 bp, Enterobacter cloacae
atgcaaatcctcatgggacttatcggcatggtggcgctattggccattgctgtgctgctctccaataaccgaaaagccattaacctgcgcaccgtgctcggcgcctggataatccaggtgggtatcggcgcgttaatattgtatgtaccggccgggcgcgcggcgctattagcgatgtcgaatggcgtcgccagcgttattgcctacggcaatgaagggattagtttcatcttcggcgggctggtctccgataaaatgttcgaggtgtttggcggcggcggcttcgtctttgccctgcgcgtgctgccggtgatcgtcttcttctcgtcgctgattgccgtgctttactacctgggcattatgcagctggtcattcgcattctcggcggcgcgctgcgggcagtgctgaagacctcacgtaccgaatcgctgtcggccacggcgaacatctttgttggccagaccgaagcgccgctggtggtgcgtccttatatcgccaccatgactcgctcggagctgtttgcggtcatgtgcggcggcctggcctcggtggcgggctcggtactggcgggctatgcgcagatgggcgttccgctggagtaccttattgccgcgtcgtttatggcggcgccgggaggcctgctgtttgccaaaattatcgtaccggaaacggaaaaaccggacgataacccggctcatgacagccaaagcgctgacgcggataaaccggccaacgtgctggatgccgccgcctccggcgccgcgtctggtatgcaactggcgctcaacgtcggcgcgatgctgctggcgtttattgcgctgatcgccctgctgaatggcatgctctccggcgtcggcggctggtttaaccatcctgagctgtcgctgcagatgatcctcggctggatcttctcaccgctggcgtgggtgattggcgtgccgtggcacgaagcgacggtggcggggtcgtttatcggccagaagctgatcattaacgagttcgtggcctacatgaactttggcgaatatttaaaggcggatgccgaagtggcggcggccgggctgcaggtcatttcagatcacaccaaagccattatctctttcgcgctgtgcggctttgccaacctgtcatcgatcgccattctgattggcggactcgggggaatggcgcccaaccggcggcaggatatcgctcagcttgggctacgtgcggtagcagcggggacgctgtccaacctgatgagcgccaccatcgccggggtttttctcgccctgtaa

SEQ ID NO: 134528 - DNA, 795 bp, Enterobacter cloacae
gtgacgcaccgttttatcgatacccactgtcactttgattttccccccttcgcggcagatgaggtcgccagcctggcgcgtgcggcgcaggccggcgtcgggcgaattatcgttccagccatctctgctgagcgttttagccgcgtgctggcgctggcagctcagcacgaagcgctgtacgccgccctgggtatgcatccgatcgtcatcgaagagcatactgatgagggactggcgcagctggaagccttgatggcgcagcggccgcctaaactggtggcggtgggagagattggcctcgatctttatcgcgacgatccgcagtttgatcgtcagcaggcgctgctggaagcgcagctgaggctggcgaagcgttacgatctgccggtgatcctccactccagacgcacccacgataagctggcgatgctgctgaaaaaacatgccctgccgcgtaccggagtcatccatggctttgccggcagcctgcagcaggccgagcgcttcgttcagcttggctataagatcggcgttggcggcaccattacctatccccgcgccagtaaaacccgtgaagtgatggcgcgtctgccgctttccgctctgctgctggagaccgatgcgccggatatgccgctaaatggctttcagggacagcccaatcgaccggaacaagctgcacgggtatttgaggcgctgtgtgaactgcgtccggagtcgccggcagccatagaagaaaggatcatgcacaatacgctcgccttgttttcccttcccccggcctctgtatggtga

SEQ ID NO: 134529 - DNA, 1074 bp, Enterobacter cloacae
gtggggcaacgcattcccgtcacgctgggcaatatcgccccgctggcggttaaacccttccgaccaggcaagctggcgctggtatgcgaaggcggaggacagcgagggatttttactgccggggtgctggacgaatttatgcgcgccggatttaacccctttgacctgatgctgggtacttccgccggcgcgcaaaacctctccgcctacatgtgtaatcagcaaggctatgcccgcaaagttatcacccgctacaccacttcacgccagtttttcgatccgatgcgctttgtgcgcggcggcaaccttatcgatctcgactggctggttgaggccacttcgcagcaaatgccgcttgccatgaactatgccgaagcgcagttcgcgttgggcaaagagctgtggctatgcgcttgccgcggtgacgattactccgccagctatttttcgccgacgccgcaaacgtggctggatctgatccgcgcctccagcgccatccccggcttttatcgcagcggcgtgttgctcgacggcgttagctacctggacggcggcgtcagcgatgcgatcccggtgcaggaggcggcccgccgcggcgcccagaccatcgtggtgatccgtaccgtcccttcgcagatgttttataccccgcagtggttcaagcggatggagcgctggctgggagagagtagtctgcaaccgctggtcaatttggtgcatcatcacgaaaccacctaccgcgccatccagcagttcatcgagaaaccgccgggtaagttgcggatcttcgaaatctatccgcagcggccgctgcgcagcatggcgcttggcagccgactaccggcgctgctggaggactacaaaaccgggcgccagtgcggccgttatttcctggcaacggtgggtaaactactggccgaccagccgccgctgctgcgccacgcgccgcgtattgcccggcccgcgccggtggtggtgccgccggtgccggtggccaatgaagcgccccaggcgaccatcattcctgcgccccaggcgaatgaccccagttttgatcatgaggatctggcgtga

SEQ ID NO: 134530 - DNA, 162 bp, Enterobacter cloacae
atgtttcgatggggaattatttttctggtcattgcattaattgctgcggctctgggctttggtggtctggcgggtacggccgctggcgctgcgaaaatcgtctttgtcgtcgggattatcctgttcctggtgagcctgtttacaggacgcagacgtccttag

SEQ ID NO: 134531 - DNA, 621 bp, Enterobacter cloacae
atgaccagactaaagaatgccaatatgttgctggcgctcttcttaggcttagccgcgttgaacgcctcggcagagacggaaaaaacaacggtagacagtgcgaagtcggctgccagcaatgcgggagaggcggtagataattcgattaacaaagtcggcgattttatggatgacagtaccattaccgcacgggtaaaagcggcgctgatcgaccatgaagatattaactccggcgatatttcggtgaaaacggagaataaagtggtcaccctcagcggcgacgtcaccagtgctgaacagaaaagtcaggcactgagcgtagcgaaagaggtcaaaggcgtctcacacgttaacgacaagctgacggtccatcataaatcatcgagcgagacggcgacgctgaaaggctatgccggggataccgccattaccagcgaagtgaaagccaagctgctggcggatgacattgtcccttcgcgcaatgtgaaagtcgaaaccaacgccggcgcggtacatctgaccggtacggtggcttccgcggcgcaggcggagcgtgccgcagagattgcgaaagcggtctccggtgtgaaaagcgtgcgcaacgatcttagcgttaagtaa

SEQ ID NO: 134532 - DNA, 1590 bp, Enterobacter cloacae
atgacgttgtctccttatctgcaagaggtggccaaacgccgcacttttgccattatttctcacccggatgccggtaaaacgaccatcaccgagaaggtgttgctgttcggacaggcgattcagaccgccggtacagtaaaaggtcgtggttccagccagcacgcgaaatccgactggatggagatggaaaagcagcgtggtatctcgatcaccacctcggtaatgcagttcccgtatcatgactgcctggtgaacctgctggataccccggggcacgaagacttctccgaagatacctaccgtaccctgacggcggtggactgctgcctgatggtgattgacgcggcgaaaggtgttgaagatcgtacccgcaagctgatggaagtcacccgtctgcgcgatacgccgatcctcacctttatgaacaaactcgaccgtgacatccgtgatccgatggagctgctggatgaggtcgagaacgagctgaaaatcggctgcgcgccgattacctggcctatcggctgcggcaagctgttcaaaggcgtttatcatctctacaaagacgaaacctacctgtatcagaccggtaaaggccacaccatccaggaagtgcgtatcgtgaaggggcttaacaacccggatctcgacgcggcggtgggggaagacctggcgcagcagctgcgtgacgagctggagctggtgcagggggcgtcgaacgagttcgataaagatctgttcctggctggggaaatcaccccggtcttcttcggaaccgcgttaggtaacttcggcgttgaccatatgctggatggcctggtggagtgggccccggcgccgatgccgcgcaacaccgacacgcgtgaagtcaccgccacggaagagaaattcaccggcttcgtgtttaaaattcaggccaacatggatccgaaacaccgcgaccgcgtggctttcatgcgggtggtgtccggcaaatatgaaaaaggcatgaagctgcgtcaggtgcgtatcggcaaggacgtagtgatttccgacgcgctgacctttatggcgggcgatcgctcgcacgttgaagaagcgtacccaggcgatatcatcggcctgcataaccacggcaccattcagattggcgatacctttacccagggcgagatgatgaagttcaccggtattccgaacttcgcgccggaactgttccgtcgtattcgcctgaaggatccgctgaagcagaaacagctgctgaaagggctggttcagctctctgaagagggcgcggtccaggtcttccgcccgatcgctaataacgatctgatcgttggcgccgtcggcgtgctgcagtttgacgtggtggtagcgcgtctgaaaagcgaatacaacgtggaagcgatttacgaatcggtcaacgtggccaccgcgcgctgggttgaatctactgacgtgaagaagttcgaagagttcaagcggaaaaatgaagttcagctggcgctggatggcggcgataacctgacctacatcgccccgacaatggtcaacctgaacctgacgcaggagcgttaccctgacgtggtgttccgcaaaacgcgcgagcactaa

SEQ ID NO: 134533 - DNA, 678 bp, Enterobacter cloacae
atgaaatgggactggattttctttgatgccgatgaaacgctgtttacgtttgattctttcagcggcttgcagcggatgtttctcgactacagcgtgacctttaccgccgaagattttcaggactatcaggccgtgaacaagccgctatgggtggattaccaaaacggcgccatcacctcgctgcagctgcagcaccagcgttttgacagctgggcggaacgtttgaatgtgccgcccggggaactcaacgacgcgtttatgaatgcgatggcggaaatctgtgccccgttgccgggcgcggtctcgctgctcaacgcgctgcagggcaaggtcagaatgggcatcatcaccaacggctttacctcgctgcagcagactcgtctggagcggacaggtttacgcgatcactttgatttgctgattatttctgaacaggtgggtgtcgccaagccggacgcgcgtattttcgattatgcgctggcgcaggcgggtaacccaccgcgctcgcgggtgctgatggtcggtgataccgccgagtcggatattcgcggcggcgtgaacgccggactggcgacctgctggctcaatgcgcatcagcgcgagctgccggcggacctcgagccggactggacggtgacctcgttaagcgaactggagcagctcctgtgtaaacactga

SEQ ID NO: 134534 - DNA, 447 bp, Enterobacter cloacae
atgaacacgatttctaccctcagcacggctgatttaaccagagcctggcacatcgaaaaacgcgcccacgctttcccgtggagcgaacagactctggccagtaaccagggggagcgctatcgcaactatcagctatcggtagatggcgaaatggcggctttcgccattacgcaagtggtgctggatgaggcgacgctgttcaatatcgccgtcgatcccgcgtaccagcgccgcggcctggggcgagcgctgctggagcatgtcattgatgaagtcgaaaaactcggcgtcgtcacgctgtggctggaggtgcgagcatccaacgttgccgccatcgcgctgtatgagagcgtaggtttcaatgaggcaaccatccgccgcaactactatcctacggccgacggacgcgaagacgccattattatggctctgccaatcagtatgtaa

SEQ ID NO: 134535 - DNA, 414 bp, Enterobacter cloacae
atgacatcccgacgagactggcaattacagcagctgggcattacccagtggtcgctgcgccgaccgggggcgttgcagggcgaaatcgctatctcgcttcctgaacatattcgtctggtgatggtggcggaaaccccgccgtcgctgacagagccgctgattggcgacatattacgcgcgctggccgtgacgccagatcaggtcctgcagctgaccccggagcgggtggcgatgctgccgcaggacagccgctgcaacagctggcggttgggcacagaggcgtcgctgccgctggcgggcgcccaggtgtccacccccgcttttgatgaactccagaccagcgcgccggctcgcagggcgctctggcaacaaatctgcgcacatgaacacgatttctaccctcagcacggctga

SEQ ID NO: 134536 - DNA, 1029 bp, Enterobacter cloacae
atgtccgcttttaccccggcaagtgaagtcttgctgcgccacagtgatgatttcgagtccgcccgcgttctgtttgccggtgacctgcaggatgacctgcctgcgcgtctggataccgcggccagccgcgcccacacccaacagtttcaccactggcaggtcctcaaccgccagatgggtgacaccgtccgttttagcttagtggctgaggccgctgacgtcgccgaatgcgacaccctgatctactactggccaaagaacaaaccagaggcgcagttccagctgatgaacctgctctctctgctgccggtgggaagcgacattttcgtcgtcggtgaaaaccgcagcggcgtccgcagcgcggagcagatgctggctgaatacgcgccattaaacaaagtggatagcgcgcgccgctgtggcctctatcatggccgtctggaaaagcagccgaccttcgacgccgacgcattctggggcgaatacacactggataatctgacgattaaaaccctgccgggcgtcttcagccgcgacggtctggacgtcggcagccagctgctgctctccaccctcgagccgcataccaaagggaaagtgctcgacgtcggctgcggcgcgggcgtgctggccgccgcgctggccagccattcaccgaaagtgcgcctcaccctgtgcgacgtcagcgccccggcggttgaagccagccgcgcgacgcttgccgccaacggcctggctggcgatgtgtttgccagcaacgtcttctccgaggtcaatggtcgcttcgacatgatcatctccaacccgccattccatgacggcctgcagaccagtctcgaagccgcccaggcgctgatccgcggcgcggttcgccatctgaacagcggcggcgagctgcgcattgtcgccaacgccttcctgccgtatccgcaggtgctggatgaaacgttcggcttccatgaggtgatcgctcagaccgggcgctttaaggtctatcgcaccatcatgacccgtcaggcgaaaaaataa

SEQ ID NO: 134537 - DNA, 354 bp, Enterobacter cloacae
atgtatgtcattaccgcgaacgtaaagaaaaaggggcagagcacgtcgcaaatgacaaatgataaagattatcatatgatattggttatcattatcgttgtgagaggtgaaaccatgctgcagcgagcattaggaagcggctggggagtgatgattcccggcgcgctaattgtcgctctcgggtatgccggagtgtcggctgacgtatggcgggtactggtcgcggtgggcatgctgatgtccgcggcgatgatctggcatcgtcaattgcgccattttatcctgctgccatcgtgtgtcgcgttgatcggcggaataatgctgatgattgtggatattaaactgagaggataa

SEQ ID NO: 134538 - DNA, 1047 bp, Enterobacter cloacae
atgactgcacaaacctggcgagcacactacgcacaaaaatatcaatattccttacggctttttttactgcttaatttcatttcttcctcgctgtcgctggtcacccccctatttacggtagttcgttttacgctgccctgcgccctgatcgtcgtctgcagcgggctgctgctgctctggcactggaaatggccgcaatcgaaaataaatattcccactatctcattgttatttggcatgctatgggcatggcacgtagtgacaaaagcgatgctattgacaccgccgcattttaactatctggtgatcgccctattaagcattctgtttatcggcaccatcgctttttccaataatatcactgcctttaccctccactctttaccaactttccttgcctgcctgataatggcggagggggaacaatggttgcgtatgacttactgctttatgctgcctatagccggtattaccctgcaaaatattatccagaagcgcagcgatgcctttacgcagggtttaatggataaactgatgcatgaacgcaatacgctcaacgatctcagtatgctcgatcccctgaccggtttgtataatcgccgcggactgcagaaccgcctcgataccctgctggcgctggacggcgacaaccactacgtgctgctcctcgatatcgatcacttcaaggcctataacgatcactatggtcatatgatgggtgaccaggcgcttattcgcgtctctgctgccattcgcaacgctgtacgctcacgcgatattgtcgcccgctttggtggagaggagtttatggtgctgctgaccaatagcagcgaagaaacggcctggcagacagccgaacgtatacgtcagcgggtctatgacctgaagatcccgcatatgtttaatgaaagcgtcgccaccaacgtcaccatcagtattggcctgacgccgctcattaatgacaacattgaacaagcgctggcgcgcgccgacggcgcactctatgaggccaaaaataaaggccgcaacattattcttgccagttga

SEQ ID NO: 134539 - DNA, 789 bp, Enterobacter cloacae
atggcctggcgttcccttcctctcagcgatgaacttatctggcgggctcctttgccgacggctgagcatgccctggcggagagtattcgggaaaaaatcgccaccctgcgcccacacctgctcgatttcctgcgacttgacgaacccgccccacggcacgcgttaacgcttgccgaatggtcgcaacccatcgccttgcgctccctgctggccacctggtccgatcatatctatcgtcatcagccgacgctgcctcgggaacagaagcctctgctctcgctctgggcgcaatggtatatcggcctgctggtgccgccgctgatgctggcgctgctcaatgaaccgcaaggcctcagcctggcgccagaacatttccatgtcgaatttcatgaaagcggccgggcggcctgcttctggattgatgtgcatagcgatgccgacatcgagaggctttcaccgcaggcgcgaatggatgccctggtaacgcgcaccctgcagccggttgttgaggcgctggcagcgacgggcgaaatcaatagcaaacttatctggagcaataccggctatctgattaactggtatcttggggaaatgcgcgcgctgctgggtgatgagcggcttgccgcgctacgtcagcactgtttttttgaaaaacaactcgccgatggccaggataacccgctgtggcgaacggtgatgctgcgtgaagggcagttagtccgacgcacctgctgtcagcgctatcgcctgccggatgtccaacagtgcggcgactgtacgcttaaataa

SEQ ID NO: 134540 - DNA, 1344 bp, Enterobacter cloacae
atgtctgctaaccatgctgcgtttaatttgatatttcgctttgtagaaaattacataagccccatagcagggcggatctcgtcgcagcgccacgtcatggctatccgtgacggatttatctcagcgatgccgtttatgatcgtcggatcgttcctgttagtgtttgcttatccaccgttctcaccggataccacctggggttttgcccgcgcctggctggatctggcgaaagagtttgaggggcgtattctgaccccctttgatatgacgatggggatcatgtcgatctacatctgcgcggcaatctcctataacctcggtaagcattacgagaaatccaatcagctcgatccctttatgtgcgcaatgctgtcgatcatggcctttttgctgattgccgcgccgaaaaccaatggcacgctgccggtggatagcctcggggggaccgggatctttaccgccattctggtggcgatctactgcgtggagatgatgcgtttcttgaaagcgcacaacattgggatccgcttgccggaccaggttccgccgatgatcaaaaactcgtttgatctgttgatcccggtgctggtggtcgtgctgacgctctatccgctgagcctgtttatccagcaccattttgacatgctgatcccgcaggccattatggccattttcaagccgctggtttcggcagccgactctctgccggcaattctgttggcggtgctgatcggccacctgctgtggtttgccgggatccacggtgcggcgatcgtgtccgggatgctgcagatgttctggctgactaacctcggtatgaaccagcaggcgctggcccagggcgcgcctctgccgcatatctttatggaggcgttctggaccttctttatcgtggtcggaggttccggggcgaccatgggactggtgttctgttatctgcgcagccgttcagcgcatttgcgctccattggtcgtttgagcgtggtgccaagcctgttcaatatcaacgagccggtgatctttgggacgcctatcgtcatgaacccagtgttctttattccgttcctgctggcgccgatggtgaacgcggtgctggcctgggcggcaatgaagctggatctgattggccgcgtcatctccgtagtaccatggacggcgccagcgccaattggcggcgcctgggcgctgggctgggatttccgggcggcgattctggtcattgttctggcctgcgtgtcggcaatcatctacttcccattctttaaggtatatgagaaacagctgcttgctcaggaagcggaagaggccgagcgggcggagcatgagagtcaacagaccgcataa

SEQ ID NO: 134541 - DNA, 459 bp, Enterobacter cloacae
atgagtctgcagtctgtacggcagttttttgccgaacacgcccccgatatcgaaattattgagttaaatcagagtaccgccaccgtcgcacttgccgctgccgcacacaacgttgagccggggcaaattgccaaaacgctgtcgctcaagatcaaagataagattgtactgatcgtcgccaggggcgatgcgcggctggataataaaaagctgaaagagacctttggcgcgaaagcacgcatgctaagcagcgatgaagtggttacctggaccggtcatccggtcggcggcgtttgcccgtttggtctggaaaatccgctggcagtctactgcgacgtctctctcagacattatcaggaagtactacccgcagcgggagccatccatagcgcggttcgcattgaaccagaacgcatggcgcagctcaccgatgcaacatgggtagatgtgtgtttatag

SEQ ID NO: 134542 - DNA, 675 bp, Enterobacter cloacae
atggaaaaaaatagtacaacccgccatgtcgccatcgtagaaaaatgcgtgatgacggaaatggcatggcgctatatctttagtcgtgaagataatcgccgttatcatattcatctgtttaaaaatgtcagtatgctcagggcggcggaaataccgtttccctggtcaaccattattttttctctttcgggaagtcgttcttcacgagccgagagtctgctctttgttcatgaaatggcgcggtgccggccggaagtccaaacgattattctggctaataatgaaagtgaaatgcacctgatcggccatcttatgccggcctgtttgcacggcatactgaataaatccgcgccgcgacgcgggctacaggagcgtttgctgcagctactggacaatcatcatctcagcggcagcgaacaattttgcgacagagaggcgtgcaacgatccgctaagcccgacggagcacgccatccttcggtatatgtcgtggggatattcgctttctgatattgcgatacagctcaaccggaatattaaaacgatccgcgcgcataagtttaacgccatgaccaagctcggagttcgctcagacattggtttattaaacgcggcggatatcctgttgcatttaccgctcaatagtacgaccagcgccgttaaacaggtagcgtaa

SEQ ID NO: 134543 - DNA, 723 bp, Enterobacter cloacae
atgttaccaggacaaggtaagtttggcgtcgttattagtaaaattcccgtcatgcaatcagggttaaaggtgatcttcaatgagaacctccctgattacgaactgagtttttgtcgttctcatgatgagctcacccttttacaactgcggcgggcggtgctggttgtcgcggatatctccggcgagattgcgcacccccgagccgtctgcgagcgttattactccctcatgactcagtaccgtgatattcactgggtttttatggtcagcgacagcctctatccgttggccgttgagctattaattcgtcctgaaagctcgttgatctccgagagcgagccggttaaccggctgattgaggtgatttgcgccggtagccgtgcggctgaacagattagccgtacgctgtttgccggggatgaggacagcgatttcgcaagctaccactctgcggcgatgctcactctttcagagcgtaaagttctgcgccttctggcgaaggggtggggaataaaccagatcgccgcgctgttgaaaaagagtaataagacgatcagcgcgcagaaaaacagcgcaatgcgtcgcttatctctacgcagcaacgctgaaatgtatgcctggatcaacagcgcgcagggaatgcaagagctgaatatcaattcagcttacggggagcaaatggaatggaaaaaaatagtacaacccgccatgtcgccatcgtag

SEQ ID NO: 134544 - DNA, 882 bp, Enterobacter cloacae
atgccgttcgttcaaaccgtgcccgtatttaagctgtatggcgaagagtgcggctggccgacgccggacctgctgcactgtgagtcgattttacagcgcagcagcctgtatcagtggcatattcgcgtccatcagcatgcggaaatggtccagcttctctatctgcatcaggggcgggcggagatcgaaattgaaggcgccaccgcggtgatgacggagtcctgcatccaggtggttcccgccctctgtattcacgggtttaatttttcacccgggacgcaagggtttgtgctctctctggcgctgccgctgctgagccggtttgaaaatcagttcggtcgccctctggatgtgcttagcgtgccgcagtgtgtgccggtgggccgttctcgcgggcgcatgcatacgctgttttcagcgcttcgcgaggagtactgcgaagagcacgatgcgcgagaaatgatgctctattcgctgctggggacgctgttggtctggctgaaccgacagtgccatcccgcgtcccccgcggaagataaagcggagcggaagcgcagcatgatgcgccacttcgcccgccttatcgagagccactaccgacagcatctcccgttggcggagtatgcgaagctgattggactgtcggttacgcacttaaattatttatgtcgtgagttttatggctgtagcgctcttggagtattgcatcagcggttgatgcttgaagcgcgacgcaatctgcagtacacccgcatgacgattacacaactctctgattatttggggtttagcgatgcagcctatttttcgcgttttttccgtcgctatagcggtatgtcacccaaagcatttagagaaacaattaaagataatgcttcataa

SEQ ID NO: 134545 - DNA, 1185 bp, Enterobacter cloacae
atgaagacacaggtcgcgattattggcgcgggcccctccgggctgctgctggggcagttgctgcacaacgccgggatccataccgtgatccttgagcgtcaaacgccgcagtatgtgctggggcgcatccgcgcgggaattctggaaagcggtaccgttgatctgctgcgcgaagcgggcgtggcgcagcggatggatgccgaaggcctggtgcatcatggggtggagtttctgtttgacggccagcgggtgcccgtcgcactgagcgagctaaccgacggtaagagcgtaatggtttatggccagaccgaagtcacccgcgatctgatggctgcccgggccgccagcggcgcgccgatcgtctatggcgtgagcgaggtggctatccatgacgccaaaagcgaccggccgacgatcacctacctcagcgaaggggaaacctgccgtctggagtgcgattttattgccggttgcgacggtttccacggcgtatcgcggcaaagtattccagctggcattttgcagacctacgagagcgtgtggccgtttggctggctaggcctgctggcggatacgccgccggtcaatccggagcttatttatgcgcaccatcagcgggggtttgtattgtgcagtcaacgctcactgactcgcagccgctattatttgcaggttccgctgagcgataaggttgaagcatggtcggacgagcgcttctggcaggagctgaaaagccgcttgccggaggagctggcatccaggttagtgactggtcactcacttgagaagagcattgcccccctgcgtagcttcgtcgtggagccgatgcaatatgggcggttgttcctggtgggggatgcggcgcatatcgttccgccaaccggggcgaaaggattaaatctggcggcatcggacgtgaactatctgtggcggattctgcgcgaatactaccatcgtggccgcagcgatctgctggcggcctactcgcaactggcgctggatcgggtctggaaaggggaacgctttagctggtttatgacccgcctgctgcatgattttccggatcagaacgcgttcgacgctaaaatgcaggccgccgaccgccgctactatctgggctcgcgcgccgggctgaccaccatcgcggaaaactacgtgggcttgcccatggagcgtgtcgcctga

SEQ ID NO: 134546 - DNA, 777 bp, Enterobacter cloacae
atgcaggttgatcggacacagcagcgggcaatcacacgtttatgcatccagtgtggtctttttctgttacagcacggcgccgagagtgcgctggtggaggaactgtcaacacgtctcgggctggcgttggggatggacagcgttgaaagcgccatctcttcgaatgccatcgtcctgaccaccattaaaaatggcgaatgtcttacctctacgcgcaaaaatgtcgatcgcggcattaatatgcatgtggtgacggaagtgcagcacattgtgatcctcgccgagcataagctgctggactatcgcgacgtcgagaagcgttttgcgcagatcgttcccctgcgctatccgcgctggctgctggtgctgatggtgggtctttcctgcgcctgcttctgcaaactgaataacggcggttgggatggggcgctggtcagcttctgcgccagcacggtagccatgtacattcgccaggtgctgacccatcgctccatgcatccgcagatcaacttctgcatcaccgcctttgtcgccaccaccatctccgggctgctgctgcgcctcccagcgtttgccagcacgccgactattgccatggccgccagcgtcctgctgctggtcccgggttttccattaatcaatgccgtcgccgatatgtttaaagggcatatcaataccggactcgcccgctgggcgatcgccagcctgctaaccctcgccacctgtattggcgtggtgatggccatgaccgtatgggggctgcgcggatgggcataa

SEQ ID NO: 134547 - DNA, 474 bp, Enterobacter cloacae
atgggcataatctcatttatttttgcgctggcggaagacatgctgctggcggcgatccccgccgtcgggtttgcgatggtttttaatgtccctcagcgcgctctgcgctggtgcgcgctgctgggggcgattggccatggctcgcgtatgatcatgatgagcgccggttttaacattgaatgggccacctttctcgccgctctgctggtgggcagcattggcattcaatggtcgcgctggtatctggcgcatccgaagatttttaccgtcgccgccgtgatcccgatgtttcctggcatctcagcctacacggcgatgatttccgcggtaaaaatcagtcattttggctattcggaagagatgatgattttgctgctgagcaattttttaaaggcctcttcgattgtgggcgccctttcgattggcctgtcgatacccggcctgtggctgtatcgtaagcgtcctcgcgtctaa

SEQ ID NO: 134548 - DNA, 540 bp, Enterobacter cloacae
atgtcttcgcgaattttaacctcccattttagcggcctggaagagttcctccagcagcacgcggcgctgctggcaaaatcgactgacggcaccgttgccgtttttgccaataacgcgccggcattctatgcgctgacgccagcgcggctggcgcaactgctggagctggaagccaggctggcgcgccccggcagcgacatcgcgcttgacccgcagtttttcgaggagcccgccgcggcgccggttgcggtgccgatgggcaaatttgctatgtacgccggatggcagcctgacgccgattttcagcgcctggccgcgctgtggggcattgccctgagccagccggttacccccgaagagctggccgctttcgtcgcttactggcaggcggaaggtaaagtctttcaccacgtgcagtggcagcagaagctggcgcgtaacgtgcaaatcagccgcgccagcaacggcggacagccgaagcgcgatgtgaacagcgttagcgaacccgacagccatattccgcgaggtttccgaggatga

SEQ ID NO: 134549 - DNA, 744 bp, Enterobacter cloacae
atgagcatgaaaaacgttggcgacctgatgaaacgcctgcagaaaatgatgccggcacatattgaaccggcgtttaaaaccggcgaagagctgctggcctggcaaaaagagcaaggccggctgcgttccgaagcgctggagcgagagaatcgcgcgatgaaaatgcagcgcaccttcaaccgctcggggatccgcccgctgcatcagaactgctcctttgataactatcgcgtcgagtgcgaggggcagatgaatgcgctcgcccgggcgcgccagtacgtggaagagttcgatggcaatatcgccagctttatcttctccggtaaaccgggcactggcaaaaaccacctggcggcagccatttgcaacgagctgctgctgcgcgggaagtcggtcttaatcatcaccgtggccgatattatgtcggcgatgaaagataccttcggcaaccgggaaacgagcgaagaacagttgcttaacgacctcagcatggtcgacctgctggtgatcgatgaaattggtatgcagacagagtctcgctatgaaaaggtcattatcaatcagatagttgaccggcgctcatcctccaaacgacctaccgggatgctcaccaacagcaatatggaagagatgaacaaactgctcggcgagcgggtgatggaccgtatgcggctcggcaacagcctgtgggttatcttcaattgggaaagttaccggcaccgcgttacaggcaaggagtattaa

SEQ ID NO: 134550 - DNA, 492 bp, Enterobacter cloacae
atgaaatcgtttaaaaaaagcgttgttgccgcgcttgccgttagcgcgtttaccctctctggcgcccacgccgcctcctggcaggattcccttaacagcgctgccagccagctcagcggcagtaacgcccaggccagcggcggcatgtccgtctcctcgctaaccagcctgcttaacggcagcagccaatccctgaccgccagcagcatgaataatgcggccgggatcctgtcatattgcgcgaaacagaagctggcctccgtgaccagcgccgataacgtcaaaaatcaggtgctggataaactggggcttagcacgccggaaaaacaaaaacaggacaccagctatctggatggcctgcaggggctgctcaacagcaaaaacggccagcagttggacctgaatacgctcggcaatagctcgctggcgaaacaggtaaaaaccaaagcctgcgatctggtcttaaaacagggtgttaatttcctctcctga

SEQ ID NO: 134551 - DNA, 2292 bp, Enterobacter cloacae
gtgtcagagttgttatccatcgccttatttttagcttcggtggtgctgtatgcctggaaagcgggtcgtaacacctggtggtttgccgctacgctcacggtgttaggcctgttcgtggtgctgaatatcaccctctacgccagtgactacttcaccggcgacggcatcaacgacgcggtactctacactctgaccaacagcctgaccggcgccgggatcggcaaatatatactgccgggggtcggcgtggccgtcgcactggtcgccgtctttggcgccctcggctgggtgctgcgccgccgtcggcatcatcctcatcacgtcggttacagcctggcggcgctactgctggcgctggcctccgttgatgccagcccggccttccatcagatcagcgagctggtgaaatcccagtcacgcgagggcgatccagactttgccgcgtactataaagagccgtcgaagcaaatcgacaatccgcagctgaacctggtctatatctatggcgaaagtctcgagcgcacctattttgataacgacgccttccccaacctcacccctgagcttggcagaattaaagatgaggccattgatttcagcaataccatgcagctgccggggaccgattacactatcgccggcatggtcgcctcacagtgcggcattccgctgttcgcgccgttcgaaggtaatgcctcagcctcagtctccagcttctttccacagaatatttgccttggcgatattctgaagaactccggttacgagaattactttgtgcagggggctaacctgcgctttgccggcaaagacgtgtttcttaaatcccacggcttcgatcacctgtacggggcggaagagctaaaaactacggtggcggatcctacctaccgcaacgactggggcttctatgacgacactgtgctcgacgagacctggaaaaaattcgaagagctgtcgcagtccgggaaacgcttctcgctcttcgccctgacggtggatacccaccatcccgacggttttatctcacgcacctgcgagcgtaaacgctatgatgtggacggcaagaaaaacctctctttcagcgccgttagctgcagtcaggaacatatcgccgcgctgatagaaaagattaaagcctcaccctatttcaaaaacacggtcatcgtggtctcttccgatcacctggccatgaagaacagcgcctgggattatctcaacaagcacgatcgcagcaatctgttcttcgtcctgcgcggcgataaaccgcagcaggagaccctggcggtgaaacgcaacaccatggataacggcgcgacggtgctggatattctcggcggcgataactatatcggcctcgggcgtagcagcctctccggccagtcgctctccggtattttcatgaatatgaaagagaaagacctggcatggaagcctgacgtgatccgcctgtggaatttccccaaagaaatgaagaatttcaccatcgactcgcagaaaaatatgatcgctttctccggcagccatttccgtctgccgctgctgctgcgggtatctgaccagcgcgtagaaccgctgccggagagtgaatactctgcgccgctgcgcttccagctggccgatttcgcgccacgggataatttcgtgtgggtcgatcgctgctataaaatgggccagctgtggtcgcctgagctggcgctctccaccgactggtgcgtctcgcagggacagctggggggtgagcagaaggtccagcacgttgataagccacagtggcacggcaagaccgccttcagggacacccttatcgatatggagcgctataagggcaacgtcgatacgctgaaaattgtcgacaacgatattcgctataaggccgacagcttcgtgtttaacgtcgctggcgccccggaagaggttaaacagttcagcggtatttcgcgtcccgagtcgtgggggcggtggtccaatgctcagttgggcagcgacgtgaagattgaatataaagagccgctgccggagaaatttgatctggtgatcaccgccaaagcttatggcccaaacgccaataagccaattccggtgcgagttggagaaagtgagcaagtgctcactctggataatgacgtgactaccacgacgctgcattttgacaacccaacgcgcagcaacacgctgatcatcaccccgccggacccgcaaaccactaacgagggcaatatcctcggccactccccgcgtcagttggggatcggcatggtggagatcaaagtggtgaaaagcgaaggctaa

SEQ ID NO: 134552 - DNA, 927 bp, Enterobacter cloacae
atgaaaaaacggatgacctcgacgccgcacgatgcggtctttaagcgatttcttcgtcacccggagacagcgactgatttcctcaccctctaccttcccgaagcgatccgtcagcggtgcgatttctctaccctgaggctgcagtcggcgagctttatcgatgaggatctgcgcgcctggtattcagatgtcctctggtcggtgcagaccacctgcggcacggggtatgtttacgtggtgatagagcaccagagctcaccggatagccatatggcctttcgcctgatgcgctatgcgattgccgcaatgcagcgccacctggatgccgggcacaaaacgctgccgctggtggtgccgatgcttttttatcacggtgcaaccagtccgtatcctttttccctcaactggctggatgaatttgccgacccgcagctggcgaagacgctgtatggctgtccgtttccattgatcgacgtgacggtgatgccggacgatgacatcgtgcaacatcggcgagtcgccttgctggagctgatgcaaaaacatattcgccagcgcgatctcagcggcataacggagtcgttggcggccgttgtgatgctgggatacactaaccgtcggcagttgagaatgctgtttcactatatgctgcagtacggtaatacggccgagccgggcgtgtttctccgccggctggcccgccgtctgccacagtatgaggagacattgatgtctatcgcgcaaaagcttaagcaggaaggtcgggaagaaggccgggaagaagggcacctggagggcttgcaggaaggcagccgacgcgaggcgctgcgcattgccggcagtatgttacagaatggcctcgacaaagagatggtacagaagatcaccggactgtcggctgatgaactacagccgctgtgtggttaa

SEQ ID NO: 134553 - DNA, 1011 bp, Enterobacter cloacae
atgttgggttttaatcaggacgagtacctgaccagtgctcgcgagatcatcgctgcgcgtaaacaggctgaaaccgtagccgacgatatttatgacagcggctgtagcgcattattttttgcttcggtaggtggttccctggcgccgatgatggcaattaatgaatttgccaaagaattaaccagcgtgccggtatatcttgaacaggccgcggagttaatccatcgcggacataaaaaattaaataaagatgcggttgtcgttacgttatctaaatccggcgataccaaagagtcggtcgccattgccgaatggtgcaaggcacaggggatccgcgtggtggctattactcgtcacgccgactcgccattggctgccgccgccagctggcatattccgatgtgccacaaaaatggcgtggaatatgaatatatgctgctgtactggttattcttccgcgtcatttttcgtcacggcgagtttgctgattatgcgcgatttgccagccagctcgagttactgccggaaaatctcctgcaggcgaaacgccagttcgatccccgagcggatagcattgccgcgcaataccatgactgcgactatatgatgtggattggcggcgcggaaatgtggggcgaggtctatctgttctcaatgtgtattctcgaagagatgcagtggaagcggacgaagtcggtgagctccgctgaatttttccacggcaccctggagctgctggaaaaagaggttccgctgtttctggtgaaaggcgaggggagatgccgggcgctggacgaacgcgtcgagcgttttgccgaaaaaataactgaccatctggtggttatcgacccgcgcgactatccgctgaacggcattgatgacgcgttccgctggattatggcgccgtgcgtggtgtccaccctgctggtggaccggctggcggcccactttgaacaccataccggccacgacctcaatatccgccgttactaccggcagtttgattactaa

SEQ ID NO: 134554 - DNA, 1062 bp, Enterobacter cloacae
atgcgaccaacaatgatgacatatatcagtgaagagccggcctgcctggcgcagatcctgcgcgactaccggcaaaagctggcgccgattgaagccttcgtccgccagcacccggtacggcggatattattgctcgcgaccggatcgtcgctgaatgccgcgctgtgcgcgcgctatttctttgagcaacgcttcggtgtgctgcttgacattaaagagccgtacaacttcacccattacgacgcgatcgacccgcatgccgatctggtggtggcgatttcacagagcggaaaaagcgcgtcgacgctggaggcgatgcgtaaggtacaggcttccggcaagtcggttttcgccctgacctcagatccgcaaagcccgataggatgcgccagcgatggcgttctggatattaataccgggatcgagagcgtagggtttgtgacccgcggctttagcgcgacggtgctcaacctgttgctgatagcgctgatcattgctcgtaagcaggagaaagccagcgaggtcgaggagcagcactatctcgctgaattgcagcggctgctagcggcgatcccggaggttatcgtccgcacctcgcgctttattgaccgccatagcgaaacgctgcgcagcggcgagcgctttgtcgccaccggctacggcgcgctggttggcgtggcgaaggagttcgaaaccaaatttaccgagacggtgcgcgtgccttccagcggctttgagctggaagcctatatgcatggcccctatctggaagccaatgcccgccatgtgatgctgtttattgaagatacgccggacgcgcgaacccgggcgctgcgcgactatctggcgccgtccattggccgggcctttaccctgacgctgggtgacgaagaggatgctcaaacgctggcgctaaactgtccgtgcgagcatcacctggcgcctctgctgctgattgtcccagtgcagatgctcgcctggcataccgcaggactgaaaggcatcgatctggctaaacgtattttcgacgattttgaccgcgtcttaaaaagtaaaatctga

SEQ ID NO: 134555 - DNA, 852 bp, Enterobacter cloacae
atgacgacgaagatgatttctgaagagaccctgcagccgcaggcgcaggaagaaacccggattacgccgcgcgatttacgccgggtgttctggcgctctttccagatggagttctcgtggaactatgagcggcagatgaatctcgcctttgtttacgcgttgatcccggtgctgaagaagctctatccgcgcagagaggagctggccgcagcgctgaagcggcatctggtttttttcaataccacgccgcatatcgtcaccctgctgctggggatcaccacggcgatggaagagaaaaacagtcagcagaaaaacatggatgccactgcgattgataacgtcaaagcctcactgatgggaccgttagccgggctgggtgactctttcttttgggggacgctgcgcctcatcgccaccgggatcggcaccagcctggcgctgaagggcaacatcctcgggccgatcctgtttctgctggtatttaacgtgccgcacattctggtgcgctggtgttttacccgctggggctacgtactgggcaccggggtcctgcagcggatccagaagagcggaatgatggagagcctgacctacggggcgtcgattatcggtctgatggtagtcggggcgatgaccgcttcaatgatcgatatcaccattcctctctccttcggcgccggggaggccaaaacccaggtacaggacattatcaacgacattctgccctgcatgctgccgttggtgagttttggcatcgtctactggctactgggacggaaagttaaaccgctctcaattattggcggcatggcgctggtgggcattctgggttcgtggatcggattgttttaa

SEQ ID NO: 134556 - DNA, 780 bp, Enterobacter cloacae
atggtagaggctctcttactgggtctggtggcgtttatcgcgcaatcggaatatgccttagggacgtcgctaatttcacggcctatcgtcaccgggctgttgaccgggctggtgctgggggatgtacagaccggcgtcattatgggcgcgacgctggagctggcgtttatcggctctttctccgttggcgcctcgatcccgcccgacgtcgtgaccggcggtattctcggcgtggcgttcgccattacctctggcgcaggcacagaaacggcgttgctgcttggcctgcctatcgccacgctgactttgatcctgaaaaatatctatctggggatgttcattccaatgcttagccagagggcggacgggtatgcggaacgggcggatctccgcggcattgagcggatgcatttgattgccggattcggcctgtcgctgatgcttgccgcggtggtcaccgtctcattcctggtgggcagcaacgcggtgaaatccctgctcgatacgatcccggaattcatcaaacatgggctcagcgtcgccaccggcatcatcccggccctcggcttcgcgatgctcgccaggctgctgattaacaagaaagtggcgccgtattttttcctcggttttgtgctgatggcctatttgaaaatcccggtgaccggtatcgccattctcggcgccatcgtggcggtggtcatggttaacgtcaccgcattgaattcacctcgtatcacgacagaacaaggagtcagcgatgacgacgaagatgatttctga

SEQ ID NO: 134557 - DNA, 471 bp, Enterobacter cloacae
atgattacgttattaagggtagaccatcgattacttcacggccaggtggccttttcctggacccaatatgtcggcgccgattgtattttaatcgccaacgatagcgtccctggcgatgagctgcggaaaaccaccattaagcttgccaaaccgccctcggtgaagctggtgattaaaaatataaatgattctattgaggcaataaaaagcggggttaccgataaatataatttatttattgttgtggagtcggttaatgacgcctggcgtattgccagcgccatcgacgaaataaaaagcataaatcttggcggaataaaggctaaagagggcagtaaaaatatctctaaggcgattaatttactgccaacagaaatagaacagctacaacaactggtgggcaagggcgtcgaagtggagattcgccaggtcccgaacgatcgcaaacagctttttgcggaatgcgtgtaa

SEQ ID NO: 134558 - DNA, 423 bp, Enterobacter cloacae
atgaaacgacactatatttttgccagccatggcagctttgctaacggtttgttgaactccgtggaactgatcctcggtaaacaacccgacatacataccttgtgtgcctacgtggaagaagaggtcgatctgacgcagcaggtggaagcgctagtggcgcgtttcccggcgcaggatgagctgatcgtgattacggatatttttgccggtagcgtgaataacgagtttgttcgttttttatctcgcccacatttccatttattatccggtttaaatctgccgttaattattgacttgctgatttccgcagcggaagacgataccgaaaaattaattaccgaggcattaacaaacgccaaagagagcattcagtactgcaatcaaacgattgccagtgcgatgactatggataaagacttctga

SEQ ID NO: 134559 - DNA, 2766 bp, Enterobacter cloacae
atgcgtaaaacggaactgttggcttttttgcaaaatcagaccgattttttcgatccggataacctgagcgaggtctttaccgccagctggctggcccggcgtttcgcgatgcaaagaaataccgccagccattatctcaatcagctggtcgctcaggacgtgctggtgaaaatcaacacccggccggtctattttctgcataaaaaagccttttgccagcagttctacccgctttcccgcagtgagtatgccagcatggcggagttactcgcggagagcgaccgccagccggagcaggcggaccatttttcgttgctgaccgggcatgacggcagcctgcgtaaaccgattgagcagatgaaaaccgcgctgttttatcctaacggcgggctaccgctgcttattaccggcgacagcgggaccggcaaaagctatatggctgagctgatgcatgagttcgccatcgcccaggggctgctggcgcccgatgccccctttgtgagctttaactgcgcgcagtatgcgagtaatccggagctgctggccgccaacctgtttggctacgtcaaaggcgcgtttaccggtgcgcagagcgataaagcgggggcgtttgaggcggcaaacggcgggatgctgtttctcgatgaggtccatcgcctggatgctcagggacaggagaagctgttcacctggctggatcgtaaggagatctaccgggtgggggagaccgcgcaaggcttgccgatttcgctgcggttagtgtttgccaccaccgaagatattcacagcacttttctcaccaccttcctgcgccgaatcccgatcctggttagcttgcccgatcttcaacaccgtagccgcgaggagaaggaggcgctaacgctacagtttttctggcaggaggcgcgcacgcttgccgcccggctgcaactaacgccgcgattgttgcaggtcctgacgcagtatgtttatcggggcaacgtcggcgagctgaagaatgtggtgaaatacgccgtggcgtcagcctgggccaggtctccgggccgcgaaatgttgaccgtgacgctgcacgatctgccggaaaatgtcatggccgcgacgccagcgctcagcgaagcgatgggccagcaggagccgctgcttatcgagccgcagaccagcctggtctggctgctgcgcgcgcgcgacccggtacaggggctgatctatgacgttcagtgtcgggttctggcgcagtatgaagcggtgctgaataaaaaaacggtctgggaagaggcgcaaaggagcatgggggaagagattgaaaccctcttcgatcggttgatctttgataatcatgactccagtagctcgcagatgctgctgctgatcgctcatcaggttcgggaggagtattatcgcctggaaaagcgcttcaatatccagtttaacggcaactgcctctacgcgctgagccactacctgatccaccgatcccgacaggcgcagtccacgataaacaatgaaaaagcccgccagctggaggacttcctggtacagaagtttccgctgctgtatcgcttttgcgaagcgatcctcggtgcgttgacgctgaagctggatattgaaccccagcgtatcgacctgctgctgttagtgctgtggttccacaagaatggcgccatcagccagcagcaggtgacccgggcgataattctcgctcacggttacgctaccgccagcagcatcgccaacgtggcaaaccgcttgctgaaaagccagctctttgagtcattcgatatgccgctggacgtgacgccggaggctatcgctaaccaggtgatggcctacatagagagccatgctctggcatcaggattgataatcctggtcgacatgggatcgctgaacgccattcaccgccattttaatcgtcgcctgagtacgccgatggcgatcatcaacaatgtctccaccggtatggcgatgtacgtcggggagcgcattttgcagggcgttatgctggaagatatcgtccgcgagatcggcgatgaccttgcggttgagcaccagctctattacccgcaaaccgataagccgcgggcgattttaaccacctgcgcgaccggtttgggcgcggcggcgaatctgtcggcgctgttaaaagccagcattcctgaagcgcttggcattgatattgtggcctgcgatgtggagacccttgccgatcccgcgcgacgggagccgatgctaagccgctatgaggtgctggcgatcgtcggcaccctggatccgcatcttgccgatctaccctggatctcgctggattcgctgatctctggcgaagggagtcgtccgctgatgcgcatttttggcgaactggcgacggcggagcaggtcagcgagatcaacaacctgatcctgaaaaacttttcgctgcgccgggtgatcgagtcggtgacgatcctcgatacggctaaggtgatcaaccaggttgagcagtttttgctgcgctatgagcatctggccgggcgcgatgtacctaacgatcgtaaggtcgcgctgtatgtgcatatcagctgtctgatagagcgattaattcgtcacgcttccccagcccaatacactggagggcagtgtccggatcgcgagctggctacgctacgcgaggcctttagtgtcatagagagcgggtatagtgtcaaaattcccgttgtagagctctgctacattcacgatatcctgacgcgggaaacggaatttattcaggaagatcaagacttttaa

SEQ ID NO: 134560 - DNA, 831 bp, Enterobacter cloacae
atggagctgaccgccgttcccgccacgcagttcagcagcgtgcagttaacggatattctcaacgcctgttttgaagcctacctggtgcctgttacccagtcggtagagggatttgttcagcgttttagcgccgaggggatgagcctggtcgattcccgcgtctggctggccggagatgaaccggcggcgatcgcgatcgtcgcgcgccgggggagtgccgctcgcctggcggcctttgccctgcgcccggcctggcgcggcaaaggcctgggccggaaactgatgcaggaactgctgatgcttttgcaacagcaggggatcgagacggtattcctggaggtgatccgcgataaccatgcggccgtcgcgctgtatcagtcgctgggctttacgcgacgctatgggctctgcggctacctgagtacagaacttctggccccggtgccgggcgtattgcagctttatcccaccctgtccctgcttcggcgcgccattgaggagagtaacagccagcttccctggctgctggatccgctcacctttgccactctgccatgtcaggtcgtgacgctggaacagcgcgccttcgcggttctaacgacggcgggctcgcgccctgtactgtcgtttttgtgggtggagcccgccgcccgccgccaggggctggcgcgtgagctgctgatggcgctggcgcagcagttcccgggcattggtacttcggtgacggtcccggaaacttttacgccgctgtttgccgcggccggctatacgccgctctcgctgcagcagtatgaaatgacgatggatctggccgacgcgaagtcggcttag

SEQ ID NO: 134561 - DNA, 534 bp, Enterobacter cloacae
atgaaaactaacactataactgccggtgccgtattacgcctgactcaggagagcgatatcgcccttctgcccgccattgaacgttctgccgcccaggcatttcgccagatcccttctctcgcctggctggcggacagcgaggtgattagcgttgcgcgccatcatgattatctggaaacggagcatagcctgctggcggtagccgccgggcaacccgttggctttattctgaccgaaccgctcgacgatgcgttatttatcgtcgaagtcgccgtccaccaggcctggcagcaacagggcatcggccggatgctgctggagcgggttattgagagcgcacggcagatgggctacccggcggtaaccctcaccaccttccgcgaggtgccgtggaatgcgccgttttatacccgtctgggattcgccatgctcgatgagctgaccctgcccgccgggctggcggcaaaaagggaacaggagacccggcacggcctgccgcccgagtcgcgctgcgccatgcgcctggcgttgtag

SEQ ID NO: 134562 - DNA, 906 bp, Enterobacter cloacae
atggtacaaagtaccattcaaaacttacccgttgttacccgtatgtcctggtcaatcgatattatttcctgcataaccgatcgctttgtggaactcacggcgaccgaaaaacgcattgcgcagtttattctcgatgatgtcgcggcggcggcggagctgcccatcgccgagatagcgcgtctgacgcaaaccagccaggcttcggtcacccgttttgcccgggcgctcggctgtaaagacgtccgcgagctgaagatgaagcttgcgcaatctcttgcggtcggccagcggtttatcctcgatgttccggatctcgaaggcgtccaggggatctatgagtcaatcatcagcgtactggagaccaaccggcgggcgctggatatcgaggcgctgaagcgcgcggtgagctggctgagcgatgcgcggcagatcctcgccctggggatgggcggcggttcgaccatctgcgctcaggaaattcagtatcgcctgtttcgcctcggtctgccggtagtcagccagagcgatggtctgctggtacgcatgatgagctcggcggtgacgccgcaggatgtggtgatcgtgctgtctctgggcggctatacccgggaaatcatcgagagcgcggcgattgccagccagtacggcgcgaaggttattgcgattacccccgccggaacgccgctggctgaacaggcggatctggtgctaccgctgctggtacgggaaaacgactatatctttaagcccagcacttcccgttacgcgatgctggcgatggtcgatgtgctggccaccgaactggcgatggccaacaaaacccaggcaaaaggcaaattacgccgtattaagctggcgctcgacagccaccgcggcggcgtcgatcggcagccgctgggggactaa

SEQ ID NO: 134563 - DNA, 600 bp, Enterobacter cloacae
atggacaagattaagctggtggcgattttacgcggcattcaacccgctgaggcggcagatcatattgagacgctaataaatgcaggctttcgctatatcgaaatcccgctcaattcgccggactggcagcaaagtattccggcgatggtgcgtcagtttggcgagcgggcgatgattggcgcgggaacggtgctgaaggttgaacaagttgattttctcgctgaagctggggcgaaacttatcgtgacgcccaatacggccccggcggtgatccgccgcgcggtagataaggggatgctggtgtgcgccggctgcgcgacggcctccgaggcgtttagtgcgctggatgccggggcgcaatggctgaaaatctttccgtcatcagcattcggcgcggactatattcgcgcgctaaaagcggtgttgccgccggaggtaccggtgctggcggtcggcggcgtgacgccggaaaatctggcgacctggatacaggcggggtgcgccggtgccggtctgggcagcgatctttatcgcgccggacaggccgtggaacgtacccgcgaacaggcggagaggtttatctccgccagtaaaagttag

SEQ ID NO: 134564 - DNA, 873 bp, Enterobacter cloacae
atgaacgagtatattgccgtcgattggggctccacccagctgcgggcatggcggatgcgtgatggcgaatgcatcgacaagctgaaactgccctgcggcgtcacgcgtctgaacgggcagcgcgccgaagcggtatttcagcagcagatggcgccgtggcgcggtgaccccgcgctgccggtggtgatggcgggcatgatcggcagcgatgccggttggcaaccggtgccttatctggcctgcccgctggcgctggaggcgctcaacggtcagttatatgaggtggcggaaaaagtgtggatcgtgccggggctgaaagtggcgcaggctgcagattacgacgtaatgcgcggtgaagaaacgcagctgctgggcgcttggcaactgatgcccgcggagtgttacgtgatgcccggcacccactgcaaatgggtgcaggtgcaaaacggcgtggtgcgccagttcgccacggcgatgaccggcgaactgcatcacctgctgcttaaccattcgctgctcggccagcaattgcctgcgcagttcccggatgaagctgctttcgccctcggtatggaaaaagggttaaatcagccggcgttattgtccgggctttttagcgcccgcgccgcgcgggtgttaggcgcgctggcggcgacttcggtgagcgattatctctccgggctgttgattggcgcggaggtggcgacattcagcgaacgctatcgcgccagccgcgtggtgctggttggtgagcactcgctcaacgcccgttatcagcaggcgatggcggcgcgtgggttagccgtttcccgttgctccggcgaggcggcgtttctttcgggtatagcgaggatgattgatggacaagattaa

SEQ ID NO: 134565 - DNA, 1488 bp, Enterobacter cloacae
atgaataatatgtcatttatgatttggttttccgtttatgcctgcgcgatgattaccttaggctggtacgtttcgcgcaaacagaaaaccggcgaagactttttacttggcggtcgttcgctgccgatgatcctcactctcggttcgacggtcggcaccatggtggggaccggctccagcgtcggcgccgtcggctttggctacagcaacggctgggccgggatgctttacggcctcggcggcgcggtggggatcctgctggtggcatggttattcgcaccggtacgtaaacttcgcttcatgaccatgagtgaagaaatgtcgtattacaccggcggcagtaaaattattaaaaacctcgtcgcgatacttatttttattgcctctatcggctggctgggggcgcatatattaggcggcggattatatctggcgtgggccagcggcattgatattaatgtcgcgaaaattattatcgcgctggcttttgtggtttatgtcggtatcggcggctattccgcggtggtgtggatcgataccattcaatcgatcgtgctgttcgtgggctttattttaatggcgatactggcggttcatcacgttggcggctggagccatattcagcaggccgtcgatccggcggcgcaaagcctgttcgcggtcgataaattaggcgtgctgccggcgctatcattggcgatggtgattggcgtcggcgtgctggcgacgccttcttatcgccagcgtatttactcggcgaagaccgtctcctcggtgcgccagtcctttaccattaccggcctgctgtatctgggcttctccttcctgccggcgatcatcggtatggcggtatggaccatgaacccgcagctggaaaacagcggcttcgccttcttgtttgccacccaggtgctgccgccggtgctggcgatggcgatcctgattgccgggatgtcggccaatatgtcttccggtagctctgatgccatcgccgcggtgtccatcatgctgcgcgacctctacaccctggtgaccggccatatgcccgcgccggagaaagcgattcgcctgtcgcggatcttcctggttctggtgattgcgctggcgctgctgtttgccctgacctccaacgacatcatcagctacatcaccaaaatgatctcaatgattatgtccgggatgtttatctgcaccatgcttggccgtttctggacacgctttaactggcagggcgcggtcgccgcgctggccggcggcgccggggcatcggttgcggtgctggtggatagcgactggctggcgttctggggcaacccgtgtattccggcggtgctgacgagcctggtggcttcggttgtggtgacgttactgtccccggccagcagcatgagccgcgagcaggctctggagatgattacccgcgagcgtgaaagccgcccaacgccgccgccgctgccgattggcaaacgtcatacctcacgcgggtaa

SEQ ID NO: 134566 - DNA, 393 bp, Enterobacter cloacae
atgagtatcaagcgttatggcgtagaaggtggtaccggtaccggcgggcagcacctgccgttcgcgcgggcggtggaagcgggaggctggctgtacgtttccggccagacgccgatgaaggacggggaagtggtggaaggcgggattgtcgaccagtcgcgtctggcgattcagaactgcgtagatatcatgaccgaagcgggctacaccctggccgacgtggtgcatgttaaagtgatcctcaccgatgcgcgctattttcagtcgttcaataaggtatttcgcgagttctttggcgacaacccgcctgcccgcatctgctgcgtagcggacctggtggtggattgtaaagtcgaagtggatgtgacctgttttaacgctgcgcgacaataa

SEQ ID NO: 134567 - DNA, 1440 bp, Enterobacter cloacae
atgaaagttgactggcttttcaaaaacgtcacggtgatcgacgggagcggcgggccgcaataccgtgctgatgtggcggtgaagggcgatcgaattatggctatcgccccggcgctggacgttgcggcggagcaggtgattgatggccaggggcgggtactggcgccgggctttattgatgtgcatacccatgatgatatcaacgtgatccgcatgccggagtacttgccgaagctcagccagggggtgacgacggtgatcgtcggcaactgcgggatcagtgcggcgaccgccaccatgcggggggaagtaccggacccaatgaatctcctcggcgagcagcagcactttatctatcccaccgtggaggcttatgcccatgcggtggaggcggcgcgaccatcgctgaatgtcggcacgttaatcggtcacaccgcgctgcgtaataaccatatggacgatctgtttcgtccggcgaacgagacggaaatcgccggcatgcgcgtacagctacgcgatgcgctgcgccagggagcattagggctcagtaccgggctggcctacgccagcgccttccagtcgaccaccgaggaggtgatggcgctggcggaagagctggcggccgggaagggcgtctataccacccatttacgttcagagtttgagccgattctcgaggcgctggacgaagccttccgtattggccgtcacggcaacgtgccggtggtggtttcgcaccacaagtgcgccggggcaaaaaactgggggcgtaccaaagagacgctggcgtttttcgatgagatgcgccagcagcaggatatcgcctgcgactgttatccctattcagccagctcatcgacgctggatatgaaacaggtgaccgacgagtttgatatcgtgattacctggtccgaagcgcagccggagcaggcggggaaaacgctgcagcagatcgccgatgagtggcaggtgagcctgcacgacgccgcggcgcggctgatgccggcgggcgctatttatcacaacatggatgagcaggacgtacggcgggtgatgcgctatccggtcaccatgattggctctgacgggctgccgaacgatccgatgccgcatccgcgcctgtggggcgccttcccgcgggtgctcggccactatagccgcgacgagcagctattcccgctgactaccgcggtacacaagatgaccgggctgtcggcggcgcgcttccagctggcggatcgcgggctggtgaaaattggctactttgccgacctggtgctgtttgacccgcagacggtgcgcgatgtcgccagtttctccgacccgaaacgaccggcggacggcattgaggcggtgatggtcaacggcgtgatgagctacggcagtgataagaaaattaccggacgggcagggcgtttcctgcgtcgtcggatggactaa

SEQ ID NO: 134568 - DNA, 234 bp, Enterobacter cloacae; identical to SEQ ID NO: 122166

SEQ ID NO: 134569 - DNA, 846 bp, Enterobacter cloacae
atgtccccatttctgagtgcttattttgcccgcacgggctggcagcagcccgtacaggttaatatcgataccctgcgggggctgcatttacaccataactgcgccatccctttcgaaaatatcgatgtcgttttgccgcgtgaaatccatctggatgacgggtgtctggtggataaactggtcaccgcgcgtcgggggggatattgcttcgagcaaaacggcctgtttgagcgggtgttgcgcgaagtcgggtttacggtgcgcagcgtgctggggcgggttgtgctggccaatccgtcgcagatgccgccgcgtacgcaccggttgctgctggttgagctgaacggcgagcgctggatcgccgatgtgggatttggcggacaaacgctgacggcgccgattcgtttgatcgccaacgaggagcaggacaccccgcacgggagttatcgtttgctaagcgagggtaacgactgggtattgcaattccgccatcacgagcactggcagtcgatgtaccatttcgacctggcgacccagtatttcaacgattacgtgatgggaaacttctggtcggcgcactggccgcagtcccatttccgtcatcatctgctgatgtgtcgccacctgccggacgggggcaagctgacgctgaccaactttaattttacccactggcagaacggtcatgtggaggagcagatccatttgccggatgcggaggcgctgtataagctgatgcaggcgcggtttggcctgggcgttgatgacccgaagcacggctttaccctggccgagctgacggcggtgatggcggggtttgatacgcatccacaggcaggcaaatag

SEQ ID NO: 134570 - DNA, 195 bp, Enterobacter cloacae
atgcctaacatcgacaataaggggtggggttttcccgctctgtcgaaaaaagcgcatttctttaattcgggagaagccatatcactttgcggtaaatggatgttcaccggcatcaggattgatgaatggcatgaacaccctgagaactgcgctacctgcatgaagaaacgcaaaaagcaggaaggcgaaagataa

SEQ ID NO: 134571 - DNA, 630 bp, Enterobacter cloacae
atgaatcttgccaaccgagccaaaaagcgcagaacagaactaaacttaactcaggtcgaagttgctaaacgagcgggcataagccagcagtcgattgaagctatagagaatggaaaaacactaaaaccacgtaaccttcttgctttagcgtcagctctagaatgcgatcctaagtggttacttcttgggggcgatgttgtcacagatttcaactatggagcccgaagagtgcctattctaagctatgtacaagcaggagctttcacaagcgctgaacagcttcatgaagaaggtgatttcgaatacatcctcactacagctgaattatcagagagttcatttgctctccgtatacgcggcgattcgatggaaccggaatttaaagagggagacatcgttataattgacactgacgtgtaccctactccgggcgaatttgttgcagcatgcaacggtagccatgaagcaacattcaaaaaataccgcccggtagggattggcgccaaaggtgaagaagacttcgaacttgtacccttaaacagcgattaccccatttgtcgctcttgggaaaaaccagtcaagatcataggaaccatggtagaacaccgcatattccgcagaaagagataa

SEQ ID NO: 134572 - DNA, 225 bp, Enterobacter cloacae; identical to SEQ ID NO: 82355

SEQ ID NO: 134573 - DNA, 276 bp, Enterobacter cloacae
atgccagttgtcgcaacgttcaaaacagactggttccgggttattaacgacatcacgcgcagcggcattcccctccaggagattgccagagagctcgatgtgtcgaagtctgctatcatcggctggaagcagggcgcagcgcctaaccaccacacaggcgaagcgctgatagacttctggtgctacgtcacacagcgcccgcgctccgagctgccggcgcaggtcacatcacggcgattcgtttacgcctggcgttctaagcgtctggcaccatga

SEQ ID NO: 134574 - DNA, 345 bp, Enterobacter cloacae
atgaaaatcaatacaggcggatctagcgtaaatattaatgggcaggaatttaccgggcattcaatcacgattaacaacggcaaggtgagtgttgatggtgtcgagcagtctggttcattggcggagcaaattactgtaacagtgaatggcaatgttgaaagcatcaataccgactttggcacagttaatgtcacaggtagtgtgggtcatgtgaaaacgatgagcggtgacgttcattgcaacattgtgactggtagtgttaatacaatgtcgggatatatcacctgcgatagtatcagcgggaacgctagtaccatgtctggtaatatcatcactaaatcatag

SEQ ID NO: 134575 - DNA, 261 bp, Enterobacter cloacae
gtgctgacctccgcgatatccgggcgtccggcacgctgtctggcgaatgccttctgtgcgctgggggaaggctatccggcgagcgccgtgccggattatccgctggcgtatgatatcggcaaagcactggccgccgccgcgaaagcccagggtgtccatgagtatggcgcccactgggccgggcagggggtggggttgatccgcgagtgtgacgccgccactctggtccgccagctggcggcagagagcggctggaactaa

SEQ ID NO: 134576 - DNA, 672 bp, Enterobacter cloacae
atgcggagtagcatgagctgggaagatttgtggccgttattactctacggcacgctggatacgctctatatggtgggcctggcggccctgtttaccgtgctgatcgggctgcccaccggcgtgctgttgtttatttcccgcgccaacgggctggcgccgatgccgaaactgaacgcgctgttaggcgcggtgatcaacatcggcaggtcgctgccgtttatcgtactgctgatcgccctgatccccttcacccggctgatcgtcggcaccacgctgggcagcaccgccgccatcgtgccggtgaccatcggcgcctttccgttctttgcccgtctgacggaaaacgcgctcgacgaggtggactacgggagaattgaagccattctgtcgatgggcggcaacgtctggcacgtgatttttaaatccctgctgccggaagccctgccaacgctgctggccgggatcacgctgaccatcgtgatgctgattggtttctcctccatggccggtgtgatcggcggcggtggactcggcgacctcgccatccgctacggctatcagcggtttaataatgaagtcatgtttggcacagtgctgatcctggtggcgatggtccagggggtgcaaatggccggcgatcggctggtgcgtagcctggcccaccgccgctag

SEQ ID NO: 134577 - DNA, 792 bp, Enterobacter cloacae
atgataaccatcgaagggctgagcaaaacctacgccggaaccggccgaccggcgctgaacgatatcgcgttgcagataccgaaaggggcaatatacggcattctcgggcgcagtggcgccggcaaaagtacgctcatccgctgtctcaatttactggagcggcccacctcgggccgcattctggtgaacggacaggatattacccagttgaacaaggcggcgctgcgggattatcgcctgcgcaccgggatgattttccagcacttcaatctgctgcatgcccgcaccgtcgctgacaacgtcgcggtgccgctggagattgccggagtgccgagggccgctcgcgaggcccgggtgcgcgaactgctggcgctggtggatctcagcgaaaaggccgccgccttcccgtcgcagctttccggtgggcaaaaacagcgcgtcggcatcgcccgggcgctggccgcccggccggaagtgttgctgtgcgatgaggcgaccagtgcactggatcccgagaccaccgcctcggtgctggccctgctggcggatattaaccagcgcctcaatctgaccattgtgctgattacgcaccagctggaggtggtgaaaaccatctgtgaccacgcggcgctgctggaacagggcgagattgtcgaaagcggtaaacttgccgacctgctggtgaccccatggtcgcggctgcgccagtcgctgctgcacgacccgcaggctgaacaggaatttcttacccgccacggcgttcaggggaggccattatgcggagtagcatga

SEQ ID NO: 134578 - DNA, 807 bp, Enterobacter cloacae
atgaaatatgccgcttttaaactggcaggggtcgcactgtctctttctctggtatggacgtctgcccaggctgccgcgctgcgcgtcgccgcggacccggttccccacgcggagatcctcaactacatcaaaaaaatcgatcccagcctcgatctgaaggtggtggagctgaccagcggggtcaacgccaatgaactgctggccagtggcgatgtggatgccaactacttccagcatgttccctatctgaaggatcaggaaaaagcgctgggtaaaacctttgccgtcgcggccaccgtgcatattgagccgctgggaatttactcgcataagcataaagatttctcatcactgccggaaaacgccacagtggcggtgccgaataacaccaccaacctgagccgggcgctgttcctgctgcaggcgcagaagcttattaagctggaccctaaatttaccgacccggccaccaccctggcgacgccgaaggatattgtcgagaacccgaaacacctgaagattctggagattgaatcgccgcagatcccgcgctccctcgacgatgtcgacctggcggtgattaacggtaactacgcgctggaagccggcctggtgccagcgaaggatgccctggggctggaaagcgccgagcataacccgtacgccaatattctggtgaccaccccagccctggcgaatgacccgcgcattaaggcgctggcgaaagatctgacctcgccgcaggtggcggagtttatccgtaaaacctacaacggctcggtgatcccggtggcccctcagtcatga

SEQ ID NO: 134579 - DNA, 1029 bp, Enterobacter cloacae
atgaacgcgaccaccctgccgattctcgacctggcccgctacgcggaccccgcggataaagcggccttcctggccgacctgcgtcatgccgcccgcgacatcggcttcttctatttgatcaaccacggtgtcgacgacgcgcttcaatatgaagttcagcgccagtcccagcgcttttttgctctcgatgaggcgcaaaaacagcaggtggcgatgatccactccccccattttcgcggctataaccgcgcggcctctgagctgacgcgcggccagcctgactggcgagaacagtttgatatcggcgccgaacgtccggcgctaaccctcagcgacgacgccccgcgctggcagcgcctgcagggtccgaatctgtggcctgccgccctgccgtcgcttaaaccggtattacttcactggcaacagcaaatgacccaggtgggcatccgcctgctgcgcgcctttgccgaagccctgcagctcccggagaatgctttcgatcagctctacggcgacaaacccaacgagcatatcaaactgatccgctaccccggccagcaggagacccaaagcagccagggcgtcggcgcccataaagattcggggtttctcagcttcctgctgcaggacgagcagaaaggactgcaggttgaggtcgcgcctggagaatggatcgacgccgtgccgctggccggcagctttgtggtcaatattggcgaactgctggagctggcgaccaacgggtatttgcgcgctaccgtccatcgcgtggtgtcgccgccggcgcagcagcagcgcctctccatcgccttcttcctcggcgcccagcttgacgcggtggtgccggtttacaccctgccgcccgagctggcgcgtgaagcgcgagggccggacagcgacccgcacaatccgctgctgcgcgatgtcggctggaattatctcaagggccgtctgcgttcccatccggacgtggcggaacgctactatcaggacgtgtttcgcgaacgcgccgagcaattgatcgtttaa

SEQ ID NO: 134580 - DNA, 264 bp, Enterobacter cloacae
atgcacagctcgaaagatcccctgcacggcgtgacgctggaagcgctgctcaatgccctggtggcgcgctatggttgggcggaaatggcccgccaggtcaacattaactgctttaaaagcgatcccagcattaagtccagcctcaaatttctccgccggacgccgtgggcgcgcaaagaggtggaggctatgtatctcgcctcccttgatgatgacgcgccggtggagaaagcggacccctgggcaaactggcagaaaaaataa

SEQ ID NO: 134581 - DNA, 312 bp, Enterobacter cloacae
atgcagagctggagcagtaaagatttcaccgccgaccgcgcgtggggcgcgctggatattgccaatttttccggcaccaccgtgcgtctgcactggaccgaccaaccctatatctggcacatcaatgatggtcaggaggtgtttgccgtgatggatggtcaggtggcgatgcatgtgaaggtcgacggcgaggagcaggtgatcatgctgaacgccggcgatatcttctacgctgaggtgggatgcgagcatgtcgcccacccgcagggggcggtgcgtattctggtgattgagaaagaagggtcggtctga

SEQ ID NO: 134582 - DNA, 756 bp, Enterobacter cloacae
atggcaaccttacagtgggaccacgccgtacagtttgtgaatcagccggaagcggccattcagacctttgccgaccagcagctgcgggcggtggccggtgggcgccatccggggtggggaacccgcaatgcgctgagctattttggcctgacctatatcgaatttctcgccatttccgacccggatgaactgcgcgctgcgacggacaaattcctcctttcgcgcgacgccgcacggctgctgccggagaatgaggcgctgtttcgggtggcgctgcgcagcgacgacatcgacgccacccatgaccagttgcgtcgcacaggggtgacagtgtcaccgattgtcgatggccagcgcaacgatccgcagggcaatatcatccgctggcggatcttcaccatcgatggcgacactgacgggctggtctatccctttgtgctgcagtggggagaagacgacgccacccggctgacgcggctgcgcgcccagaggctggacgcgccgcatccgctgggcgacattacgcttgagcaggcggtgttcgaggtggtcaatccgcaggcggtgcgcgatcgctggcaggcgctgctgggctttccgccactgggggagcagggactggacgtgggcggccggcaatttatattccgtgaaggggctgccaaccagctgaccgaactggtgttccgcgtcgccaacccggcgcttaaggggcagcgctttcgtgtcggcaacggcgtgtatcgctttacataa

SEQ ID NO: 134583 - DNA, 909 bp, Enterobacter cloacae
atgagccagcctgccatcgacctgaccagcgaactgttgcgcggtatgcgcctctccggcgttaactaccggcgcatcgaaaccgcacgcccgttcggcgtcggctttagcgccgtggcgggtaaagcccagttccatttcatcagccgcgggccggtgctgctgcgcatggccagcggagaacagttcaccctcgagagcggcgatgcgctatttattcccaacggcgacgggcacgccctgctctcggatccgcaggccacggtggtcaatgtggcgcagctgcccagcgaaacggtgtgcagcacggtaagttgtatcaacgctggcgaccagcctgactgcccggagcgcgccgtcattttcagcggttgtatggactttgagctcggcggcatgcagccgctggtcaaggccatgccggaggtgatgcgggtcagcagcctgcttaatacctggccggagatccagccgctgctggcggcgatggagcgggaatcgctcacccgccaggcaggctatgccgggatcctcgcccggctggcggacgtggtggccgcgctgattgtccgcggctgggtagcgtgcgggtgcggcaacgccaccggctgggtacaggtcctgcgcgatccccggctggcgaaagcgatctacgccatgcatcagcgcccgggggtcaactggaaagtggaagatctggcgcgggaggcgggtctttcacgctcgctgttcgcggaacgttttctcgccgccaccggcaccacccccgcccgctatctcaccgagctgcgtatgcggctggcggtgcaggccttcagcctcgggtatcaatcgctggcggccttcagccgggctttcaaacgcatcaccggccagccgccgggggccctgcgcgccacggcacgctag

SEQ ID NO: 134584 - DNA, 1239 bp, Enterobacter cloacae
atgagttcctgcatagctgctgacgcgagcctgtcacccgccaaacctgcctggcgcgccgtctatgccctggccctcggggtgttcggcctgatcgtggccgagtttctgcccgccagcctgttaacgccgatggccagcagcctcggcgtcagtgaagggatggccggacaggcggtcaccgcaacggcgctggtggcgttagttaccggcctgctgatcgccaccgccacccgcaatatcgatcgccgctgggtgctgatgttcttttccgtgctgcagatagtctccagcctgatggtcgcttttgccgattcgctggcgtttctcctgctgggccgtctgctgttggggatcgccatcggcggcttctgggcgatgtccaccgccacggcgatgcgtctggtgccggcggcccatgtgccaaaggcgctggcgatcatcttttccgcggtgtctgtcgccacggtggtggccgcgccgctcggcagctacctcggggagctgatcggctggcgcaacgtgtttattctctgtgcgatacccagcctgctggcgctgctctggcagctgtgggtgctgccctccatgcgcccggagagcgtcgggaccttctccacgctgttcagggtgctgcgccgccccggtatgctgggcggcatgctggcgacgatcctgattttcagcggccatttcgccttctttacctacctgcggccgttccttgagaccgtcgcgcaggccagtgtcgaaggggtttcgctgatattgctcggcttcggtatcgctaactttatcggcacttcggtggcgagctatctgctgagccgtagcctgcgtctcaccctggcgctggtgccgttgatgatgagcgttctggcgctgctgatggtgacgtttggccatctgaccgtgctggccgggctgctggtcgccctgtggggatttgccttcggcctggtgccggtggcctggtccacctggcttgccaccaccgtgccggatgaagcagaaagcgcgggcggtctgctggtcgcctctattcagctggccatcagcgccggggccgccggcggcggggcggtgtttgatttgcacggcgccagcggcgtcttcaccggcagcggtctgctgctgttgagcgcgatggtgattgtcttcgccgccgtacgggtgaaaccggtcgcccgcgccgaccagccggtgacgggccgcttatcccgcgagatcgataactaa

SEQ ID NO: 134585 - DNA, 975 bp, Enterobacter cloacae
atgcgcgacatactcccggtggtggtcgatggcctgtggcgccagggcgcgaaaaacctggccgttcgtctggtgagcgccgaggggcaaccgctgccggcgtggacgcccggcgcccatatcgatctccatcttccctgcgggctgatccgtcagtactccctgaccggcagcccggccgaacgggatcgctatctgctctgcatcgcccgcgagtcgcagtctcgcggtggctcccgttatattcatgacaccctgcgcccgggacagccattgatgatctctgccccgcgcaaccactttccgctgcacgagggcggccatgtggtgcttctcgccgccgggatcggcattacgccgctgctggcgatggcacacgcccgggcggcgtccggcgccagctttacgctgcactattacgttagccgtgcgcaggaggccgccttcgccaccgagatcgcccgccagctaacgggtggaatctgccagatccactgctcagacgaggggcagagtccgcgccagcggctggcgcaggatctgggggctccggacgccgacacccgggtctacttctgcggtccgcccggatttatggcccgggttcgcgataccgcgcgggcggtcggatgggaggaggcgcaattgcacagcgaagcgttccagccgcccgccccgacggcggcgtcggcggcggacggaaccttcaccatcaccctcgcctccaccggggagcgctggccggtgccgggggacaaaaccatcgcccaggtgctgcaggagcatggcgtcgcggtgccgctctcctgcgagatggggatctgcggcgcctgcctgacgccggtacgcgaggggaccgtcgaccaccgggataccgtgcagtcggaggcggaaaaacaggccgcagagcagcatattgcgctgtgctgctcccgcagcctgtcggccaatttagttatcgatctcgcgggataa

SEQ ID NO: 134586 - DNA, 1038 bp, Enterobacter cloacae
atgaagacaaccacccccacgccccccgcccattgcacctttgacccggaagactggctgcggctggcccgctgctggcacccggtggcccgcgcctgcgatattgccggcgccccggtgaaagccaccttgttggacgaacagctggttatctatcgtattaaaggccaggtggtagtcgcccgcgacgtctgcccgcaccgcggggtgccgctgaccctgggatttcatgaagaggaaggtatcgtctgcccctatcatggcctgcgttttggcgaggatggccgctgcaaccgtatcccctccagtccggggcaacccattccggccaaactgcatctcaccagcttcgccgtggaggagcgctacgggctgatctggacctgcctggcctgcgatccggacaatccgccgccgttaccgaccatgccgcactgggacgacgccggctttcagcaaatcaactgcccggccttcgaggtaaagggatttgccggccgccaggtcgaaggctttctcgatgtcgcccacttcgcgtggatccacaccgataccttcgccgatccggacaaccagcaggtgccggactacaccccgcaggagacgccgttcggctttgttgccgactactggagctcggtgggcaattacccggccagctctgatttccgcgcgccggaagggttccagtggctgcgtcactttgaaatgcatctgccgttcaccgctacgctgaccatccattttcccgccgacgccaggctggtgatcatgaacgccgcctcgccggtgtcgtcccgggtgacgcggatgtttgcccctattgcccgcaacttcgatctgcacgtgccggtggaagacgtacatgcgttcaacatgcgggtatttgaagaggaccgcctgatggtcgagacccagcgtccggaacggttgccgctggatctgaccctggaggcgcatattccggcggaccgcagctctatcgcctaccggcgcgggctgaagaagatgggctttggcgatttctttctggtatga

SEQ ID NO: 134587 - DNA, 924 bp, Enterobacter cloacae
atgagtccattttcccgtttcgcgcactatttcatcgccgtggcccgctgcggcagtctgcgccgggccgccgagcagctgcatatctccgcctcggcgattaaccgccagatcctgcaggccgaggaggccttcggtaccccgctgttcgagcgcctgccggagggactgcggatgaccaccgccggtgaactgctgtatgacaatctgctgcgctggcagaaggaatttcgtcagacccgacagaaatttgatgagctgcaggggatgaagcgcgggagcgttagcgttggcatggtgcaggcgctggcggaagggggcttcgccgccgcgctggcggagatcatcgccagctggccgtggctggagctggatctgcaggtggctgacagccacaccgtcagccagaaagtgcgtcaggcggacctggacgtcggcctgatcctcgatccgcaggggcaggctggactcagcgtgctggcctttgccgaactggaggtggggattgtgatgcgtccggaccatcccctggcgggggcgaaggcgctgtctttgggcgagctcagcctggagcggcatatcgtgcccggcgcgccgctgatcgtccatgagcgggtggcgctcctctatcgccaccatgactttgcgccggagaataccatcagctgcaatgatatccggcttatcaagtcgttggtgctgcgcggcagcggcgtgacgctccttagcctgctcgacgtgctggacgaggtccagcgtggacagctggcctttgtcccgctgcgcagtacgctgctgcgaccgctgaccctggcgctgtgtactgcgccctcgcgtcagctttcgcggcccgcgcaaatggccattcagacgctgagtgcggtgatcgaatccatggcgacggtcagcccagcggcccgctga

SEQ ID NO: 134588 - DNA, 1155 bp, Enterobacter cloacae
atgaaagcaatcgtgattggcgccggcatcggcggtttaagcgcggcagtggcgctcaaacagtcggggatcgactgcgacgtctatgaagcggtgaaagagatcaaaccggtcggcgcagcgatttccgtgtggcccaacggcgtgaagtgcatggcccacctcggcatgggcgacatcatggagaccttcggcgggccgctgcgccggatggcgtatcgtgatttccgcagcggcgagaacatgacccagttcagtctcgccccgctgatcgaacgcaccggcagccgcccctgcccggtctcccgggcagaactgcagcgggaaatgctggattactggggacgggacagcgtgcagttcggcaaacgcgtcacccgctgtgaagaagacgccgacggcgtgacggtatggtttaccgacggcagcagcgccagcggcgatctgctgattgccgccgacggcagccattccgcactgcgtccgtgggtgctgggctttaccccgcagcggcgctacgccggctacgtcaactggaacggtctggtggagatagatgaagcgctggcgcccggcgatcagtggaccacctttgtcggcgaaggcaagcgcgtctcgctgatgccggtctccgccggccggttctactttttctttgatgtgccgcttccggcgggtctggcggaggatcgtgacaccctgcgcgctgacctcagccgctactttgccggctgggcgccgccggtgcagaagctgatcgccgccctcgacccgcagactaccaaccgcattgaaatccatgatatcgaacctttcagccgcctggtgcgcggccgcgtcgcgctgctcggcgatgccggacacagcaccaccccggatattggccagggaggctgcgcggcgatggaagatgcggtggtgctgggcgccgttttccgccagacccgagatattgcggccgccctgcgcgagtatgaagcccagcgctgcgaccgggttcgtgacctggtgctgaaggcgcgcaagcggtgcgatattacccacgggaaggatatgcagctcaccgaagcctggtaccaggagctgcgcgaggagaccggggagcgcattatcaacggcatgtgcgacaccatcctcagcgggccgctgggctga

SEQ ID NO: 134589 - DNA, 1380 bp, Enterobacter cloacae
atgtctgacgaacatcacagtggcctgctttacggccttgaacagcggatcccaccgcttccggcctttttcagcgctctccagcatgtgctggcgggcctggtggggatcatcacgccgccgctgattatcggcgctaccctcgggcttggcgactggctgccgtatctcatcagtatgtcgctgctggcctcgggcattggcacttttctgcagtccaatcgggtatggggcatcggcgccgggatgatctgcatgcagggcaccagttttgccttcctcggcgtgacggtggccggagggatgtgggtaaaagcccagggcggcgggccgcaggatatgatggcgatgctgtttggcgttaactttgtcgccgctctggtgccggtgattgtcagccgctttatcgaaccgctgaagaaaatctttactcccatcattaccggcagcgtgattgcgctgatcggcatcagcctgatcaaggtcagcgtcatcaactggtgcggtggggaaaaggcagaggatttcgccagcatgagcaacatcgcgctcggggcgggcaccctcggggttatcgtcctgctgagctgcgccaaaaaccgctggctgcggctctcctcggtggtggtgggcattgccgtgggctgcatcgcagcggggctgagcggtcagttccatctccacagcctgggcgacactctgtttcgcctgccgacgctgtttccgttcggctttcagtttaacagcgcgatatttctgccggtcgccctggtgtcgctggtctgtattctggaggcggtgggcgatctgacggccaactcgctgatttcacaacagtctgttgacgatcgcgctttccgtaaccggctgaagggcggtatcctggcggatggcgtcagctgtatggtggcggccatgctctgtgcttttccgaacaccaccttcgcgcagaacaacggcgtgatccagatgaccggggtggccagccgctatgtcggacgctacattggcgtgattctgatcctgctcgggctgttccccccggtgggcgaactgctgcggcagatcccggcgccggtgctggggggcgccacgatggtgatgtttggctgcgtggtggcggccgggatccggattattacccagaccccgctgagccgtcgcgatgtgctgatcgtggggctggcgtttggcgcgggtcttggcgtggagtcggtgccggcgtttctcagccattttccgccgatggtcggcgatctgttcggttcggcggccaccagcggtgggctggtagcgatagcgctgaaccttattctgccgcaggagcaggcggcgacgaaatcgttaaggagtcaggatgatcgcgctgagtcagtttaa

SEQ ID NO: 134590 - DNA, 501 bp, Enterobacter cloacae
atgatcgcgctgagtcagtttaacagcctgagcaaagatgaggcggcggggctgctggccccttgcgtggcgatcccggcctggggcgagacgctggtgagcttgcgacctttcgccagccgccatgcgctgctgcaggccgcccgtaaggcgatggctaactggggagaggatgagctgaacgcggcgctcagcgcccatccgcggatcggtgaaaagccgaccggcggccaggcgcatgcggcgctgtcgcgccaggagcagtcggcggtggacagcgagaatgagcggctcgcgcaggccctgcgggagggcaatgcccgctacgaagcccgctttggccgggtgtttttaatccgcgccaaagggcgcagcggcgaagagattctgcaggcgttgacgcgccggctgcagcataccgctgacgaagaagtggctgaggcgcttgcccagctgcgggaaattacgatgttaagactggaaggagtgattggcgaatga

SEQ ID NO: 134591 - DNA, 327 bp, Enterobacter cloacae
atgagtaccctgagcacccatattctggatatttccaccggtacgccggcagaaggcgtaacggtcagcctgagccgggagggcgagacgctggcgaacctggtgaccaacgcccaggggcgtatcgccacctttagcgccgcgccgctgccggcggggcactattgcttaacagcggaaaccggggcgtggtttgcccgcgccgggcgcgagagcgtctttacccgggcgcagattgattttgttgtcggcgaggcggcagaggaccatttccatctgccgtttctaatcgccccgggcgggtggtcgacctaccgcggcagctaa

SEQ ID NO: 134592 - DNA, 288 bp, Enterobacter cloacae
atgatggtaaggaacaaggcgatgaattccccgcagatatacagtcccgtgcagctggccaattacctgaagctgctgcgccagcagaaccactggacccaggatgcgctggccaggcggatcggcattaagcaggccacgctgtccaattttgaaaatcaccccgacaaaaccaccttaaccacgctgtttaagatcctccagtcgctgggggtggtgatgatgctgaacgccaaagctgctgagacggcgccggctcccgataacaacacggaccttgactggtaa

SEQ ID NO: 134593 - DNA, 1323 bp, Enterobacter cloacae
atggcgacgcttaccacctggatgaacaatgtgcgcgtgggaaccttaacccgccaggctaacggggcgcacagttttcgctatgaggaagagtggctgcgcagccagcgcgccagaccgctctccctctcactgccgctgcagtatggcaatatcactgccgacgcggtgtatcactattttgataacctgctgcccgacagcccgcaggtccgcgaccggatcgtcaggcgctatcaggcgcgctcgaagcagccgttcgatctgctggccgaagtcgggcgggatagcgtaggggcggtgaccctcctgccgccgggggaagaggcgcacctggaaggattacgctggcagacgctggacgaggcgcagctcaccgctttgctgaccgcttaccagtcggatatccccctcgggatgattaccagccaggacgatttccgtatctcggtggccggcgcccaggagaaaacggcgctgctgcggatgggcgagctgtggtgtattccgcagggcgccacgccgaccacgcatatcattaagctgcccatcggcgagataaagcagcccaatgcgacgctggatctgcgtgaaagcgtggataacgagtatctgtgcctggcgctggccagagaactgggcctggcggtgccggaagcggagatcatcgccactccgcggatccgcgccctggcggtaacccgcttcgaccggcgctgggcgcaggagggacgggtgctgctgcgtctgccgcaggaggatctgtgtcaggcttttggtcttccttcagcgatgaaatatgagtctgacggcgggccgggtatcgccgcgatcatgacctttctgctgggctcgagtgaagcgctgaaagatcgctatgactttatgaagttcatggtcttccagtggctgacgggggcgacggacggtcacgcaaaaaacttctcaatttacctgttgcccggcggcagctaccgcttaacaccgttctacgacattatttcggcgtttccggtgctgggcggcacgggactgcatctgcgcgatctgaagctgtcgatggggctcaatgccacaaaagggcgtaaaacagagattaacgccatctatccgcgtcattttctggcgacggccaaagcggtgaactttccccgggagcagatgctggcgatcctccaggagtttgccgggcatgtgccgcaggcaatcgaaagcgctcgccggacgctgccggcggacttttccagccacgtctggcaggccattacagagaacatgctgaagctgcacgcccgcctgcagcaagggctgcaggcgctatag

SEQ ID NO: 134594 - DNA, 1293 bp, Enterobacter cloacae
gtggcgctggcaggcgcggcgctcatcgccgctggcatgctgttcagctgcaccagtaaagcccctaaatcccttgtcacgccgccgaacgctgccgccgtcaaagccgggcaggcgcaccgggagccggtgcgcggcgtgtggctcaccaccgtttcgcgccttgactggccgccggtcgggtcgattatcgccagcacgccggagagccgcatcacgcagcagaagctggcgctgatcgctaaactcgataacctgcagcgcctggggatcaacaccgtctttttccaggtgaaaccggacggtacggcgctctggcggtctgatattctgccgtggtccgatatgctgaccggcaaaatcggcgaataccctggctacgatccgctgcagtttatgctggatgaagcgcacaagcgcggcatgaaggttcacgcgtggtttaacccctatcgcgtctcggtcaacaccaaaccgtcgacgattgccgagctgaacaacaccctcacccaggtaccggccagcgtgttcgtcctgcaccgtaactggatccgcaccgccagcgatcgctttgttctcgacccgggcattcccgaagcgcgtgactggatcaccagcatcgtcgctgaagtggtgcagaactacccgattgacggcgtgcagttcgacgactatttctataccgaaaccgcctcttccccgcttaacgacaacgagactttccgccgttacgggcagggctatgcctcgaagggcgactggcggcggcataacacccagcagctcatagcccaggtttccaccaccatcaaaaagctcaatccgaacgtcgagtttggcgtgagcccggccggggtgtggcgcaaccgctcccacgatccggcggggtccgatacccggggcgcggccgcctatgatgaatcctatgccgatacccgcagctgggtgcagcagggactgctcgactacatcgccccgcagatctactggccgtttgcccgcgatgccgcgcgctatgatgtgctggccaactggtgggccgaggtggttaaaccgacccatacccggctgtatatcggcgtggcgctgtacaaggtgggtgaaccgtccaaaaacgagcctgactggacggtggacggcggcgtgccggagctgaaaaagcagctcgatctcaatgagactctgccgcagatccagggcaccatcctgttccgcgaaaacaacctcaatcagccgcaaacccggcaggcggttaactatttgcgcagccgctgggggcagccgcagagctag

SEQ ID NO: 134595 - DNA, 1005 bp, Enterobacter cloacae
atgtcctttttaactctcctgcgtcgggtcgccctgacgctgttatttattctgttaccggccgccagcggatgggcctgtacgccagtgtttgtccgcggccaggcctccacccttcggctgaacgtggggcagctcacggttccggctgacgccagacccggcaccccgctgtatcataaaagtttcgcctggaaccgccttagcgacggcggcgaacagtggatccgctgcgcggacgatccgcacgggctgtcaccgctgctgctggacagtctgctgtccgggggagtgacgcgaccgacggtttatcaaactaatctcgccggcattggcgttcgcgtatcgctgcgcgctatcggcagctatggcggctttcctgaccggccgacgccctcgccgtttagccaacgggtggacaatcccgccgccttgcccgatgcggtgtggaaactgggctatttccgcctgacgattgagctcattaaaaccggtcccgcggcgacgccgggcgagcttgagtatcacagcgagcgctttttaatggcggagcataccccgctggccgcgttagacttaaccggcaggatcagcaccgcgggatgttcagtgaatgacgccacgccagccctgattaagctccctgcggcgatgcttgaccacttcggcggcgtcggcaaaaccaccggcgacacccctttcgcgctgcaactggattgcaacagcgcggtcacgatttccctgcgagttgacggcgcggagcccctctccgcccgggggcatggcgttctgcgcaatgacgccaccgacgatcgggcgcagggtattggcgtgcagttgctttaccatcgtcagccggtcgtactgaatcatgagatgacgctgggcagcgcgagcgcgggccggttttccctgccgctcactgcccgctactaccagacacgttcccggatcaccgccggtcaggtgtcggccgtcgcgacctataccttgcattatgactag

SEQ ID NO: 134596 - DNA, 2502 bp, Enterobacter cloacae
atgcgccacggcccggctcataccgttaccgtcgtcagcctctccatcctgctgggcggacagagcgcgctcttgcacgcccaggcgacctttaatatggatctgctggagaaaaacgaccatttgccggcagtggatctgcaacgcttcaatcagcaggcgggccagccgccaggcgcctatccggtgagctggcaggtcaacggcgtcacgctggacgcccgtaagaccgtcacgtttcgccagaacgatcgcggacagctcacgccctgccttaagccggaagatctgctgcaggccggagttaacccggccgtgctgtcccaggcgaccggcgcaacgtcccgctcatgtcccgaactcaacgcgcagctgccgggcagcacggtcaatttcgattttgctgatcagcggctggtaatgaccattcctcaggcgctgatgacgcaccgggcgagggataatgttccctctgcgctgtgggacgaaggtattagcgcctttcagagtaactatcgttattcaggcgccagccagcgtacccgcgagggcagcaccgagcgcgataactatctgatgttgaaaagcggcgtgaacgtcggcgcctggcgcctgcgcgccagcaatagcctgaccgccaacagcgatgataagccccagtggacgaccagcggcgcctggcttgagcgcgacctgacgcgctggcagagtgaactgaccctcggggataccttcacgtcgggcgatgtgtttgacgcggtacagtttcagggaatatccctcgcctccagcgatgcaatgctcccggactcgcagaaaggttttgccccgaccatccgcgggattgccagaaccaacgcccaggtcacggttcggcaaaatggctacgtgctgtatcaaacctacgtcacccccggcgcgttcgtgattgacgatctttatcccaccgccagcagcggcaatcttgaagttgccgtcaaagagtcggatggcgaaatccgccgcttcacccagccgtatgcttcggtgaccagcatgcagcgcgaaggcagcctgaaatacaacctggtcgccgggcgctaccatagcgacgatgccagccagcggccgttgatgatgcagctgtcgctgatgcgcgggttcgcccataacctgacgctgtttggcggactgcagagcgcggtgcaataccataacctttcgctcggcgcaggacagggtttgggagaagccggggcgctctcgctgcagctgttaaacgcccgcgaccggcaccagcaggatccgatcgatggccgggcctggcagctccagtacagcaaaggttttgatcgtctcggcacgcagttgactttcaccggctggcgttattcgcatcagcgctatgccacgctgagcgaggcgttttccagcccgggtagcgaagacgacctgcaggatagcgacaacaaaaaagcaaccttgcaaatcaccgccagccagagcctgccgtacgatatcaccctctatctgagcctcgaccaggacagctactggtcagggggcgcctcacagcgtaccgccaatatggggatcagcagccgggttcacggtatcgcgtggtcgctcagctacagcgactcccgcagcagccacggtgacgaggaggatgacgagccgcattccgacaaagtggtgacattgtcactttccgtgccgttgagccacctgctgccggggagctatgccggctataccctgacctcctcccgccacagcgttggcagtcagatggtcagcctcaacggcacattgctggacaatcacgcgcttagctacgccgtcagccaaacccgcgatcggcaaaacgggtccagcggcagcctgacggccgggtacagcagtggaaggggcgatctgaatctcggctacagccacgattcgcaggccgctcgtctgaactacggcgccagcgggggcattctgattcaccgccacggggtagtctttacgccggaaatgaatggcgctgtcgtcctgattgacgccggtggcgccgggggtgtgaccctcgccaaccagaaaaccatcgccaccaatggtgacgggtacgccgtgctgcccttcgccaccgcctatcaccgcaacgacgtctctctcgacagccattcgctgccggagaatgtggatctggccaacagcaccgtgacgctggtccctaccaaagacgcggtggttctggcgcgctttcacacccacattggctataaggcgctgtttacgctgcagtcgcggggacaaccgctgccctttggcagcgaagtacgcgccaaagacaccagcagcatcgttgccagcgagggtcaggtgtacctggccggcctggcgccaaaaggcaccctttatgcgcaatgggggccgggccctcagcagcgctgtagcgcccgctacgatctcaccccgacgctggcgcagaccccccatccactcattttacagcagacgttatcatgtcctttttaa

SEQ ID NO: 134597 - DNA, 645 bp, Enterobacter cloacae
  misc_feature (611)..(620): n is a, c, g, or t
atgcagtgttataaagcggcttttatcctgagccttctcttttgcccgttcctggcgtctgccgccggggttgccattgccggcactcgtgtcatttataatgaacaaagccatgaggcagacatcacggtaaaaaacaccaatcctcacgatccggtgcttattcagagctgggtagacgatctggctgataataataaatcaccgtttatcgtcaccccgccattgttccgtctggatgccggagacagcaacgatctgcgcgtgttattaacctcggcgcaaatgccaaacgatcgggaaagtttgttcaccctgaatatcaaagtgatccctgccaataccgcgccggctggcgagaacattctgcagtttgcaattaagaatcaactgaagctcatttatcgcccggcagggctccctggctcggcgctcgacgcggcgcagcacctgcgctggcgggtcagcggcaaccacctgcaggcggagaatgcctccccctattatgtgactatcaccacgctcacctgcgcgggccagaaccagaaaacgccgcttgagcgcagcgtgattgctcctcacagccgtgaagagtatgccctccccggcgnnnnnnnnnnggcgaggcctgcgcccgcgaggtga

SEQ ID NO: 134598 - DNA, 564 bp, Enterobacter cloacae
atgaaagaaaaaggcaccctgctggttgttggttcactgctggccttaagtctggctactgtgaccaccgcccgcgcggcgggtacactgaatttcaccggtaaaattattaacgagtcctgccagatcgccaataacggtggcgatgttaatgtcgattttggcaacgtcgatatgtcggcgctgaaatcccatgaagcgaaaaccgcagaaacgccgttcactatcaacctcaccggttgcccactggcgcagaacatcagtatcagcctggaaggtactccggacaccaacgctaacggcaccagcgccgccgtgctggcgctctccgacgccgcggataccgccaaaggggtgggcattgaagtcttctcttcccctgacggctcaacggaaggcactcagctgacctttgacaagcagagcaaaacggcggtttcgcaagccgacgaaaacggtgatattgcatttaactttattgccgatctgaagagcgattcctcacaggatgtcactgccggcaatattaatgccacggccaatattgatattgtgtacgaatag

SEQ ID NO: 134599 - DNA, 288 bp, Enterobacter cloacae
atgtctccattccgtctcgctctgctatgtctgtgcctggcgccgctggcgtcgtctgctgcgctttccggccaggttcatttttcaggacgggtcatcaatccggcctgtgttatcgccccccggcacgatcgtatcgatgtctcgtgccagcaccattcaccggaacaggtcgccttgacaaacaaccgtcctcgctacgccatgccggacaatcgtggtgaggtcagtattcactggcgaaatgcgcagcatagtgaagcggatgtcattattcgctatcgctaa

SEQ ID NO: 134600 - DNA, 783 bp, Enterobacter cloacae
atgccatcaataatcattaaaaccgccgacgaactcgcccggcagcgccatgccggccagctgctggcgtcagtgtttgatatgctggatacttttatcgttcccggcgtaacgacgatggcgattaacgatcgagtggaagattttatcgtcaaccagctgcacgcccgcccggccagcaaggggcaatacgattttccctatgtgttgaacacttccattaacgatgtggtgtgccacgggatccccaaagcgaccgaacatctgcgcgccgggatgattgttaacgtcgatatcaccctcgagaaagcgggcatgattgccgactccagtaagatgtacctgataggcgatgtctccccgctggcccgccggctggtaaagactacctatgaagcgatgtggaaaggcattgaggtggtgaagcctggcgcgacgctgggcgatattggccacgctattcagcgctgggtggaggaacatggctatagcgtggtcagagaatattgcggtcacggcgtcggtcaggaaatgcatgaggaaccgcaggtgctgcattatggccgccccggagaaggcgccgtgctgcaggaaggcatggtgttcaccattgagccgatggtcaaccagggcgacagccgtatcaaaaccaaaaaagatggctggacggtggttacccgcgataaaaaactctccgcgcaatgggagcacaccgtggccgtcaccgccaacggttttgaggtgctgacgttacgcgacgatgaacagtcgcggatccgctga

SEQ ID NO: 134601 - DNA, 219 bp, Enterobacter cloacae
atgggaatcgtcaaaatctccgatctgctgcacgatgatattcgtgatgccagcaaagccatgtcccgctccgtcaatgcccaggcggaatactggatccgtctgggcatgatgagcgaactctaccctgagcttaaccaccagcagatcaaactgctgatgctgaaatccggctctgaccgtctgctggaggtgatcaatgccatcaataatcattaa

SEQ ID NO: 134602 - DNA, 249 bp, Enterobacter cloacae
atgttgcgtgattatttaaaagtggaaaaagaagaccagcttgttgaacaacagagtcggcatgacaatagccagcattattcttcggtgaccgaatgggttattttaagtaaagatggccagcgcaaaggccgggtatccctgtttgaccgcttcaccacccgccgctcctggagcgacagtttccgcattacgcagttcgataatgcgggtaaagtggtggtggataaactcactgacgcgctgtaa

SEQ ID NO: 134603 - DNA, 1656 bp, Enterobacter cloacae
atgagtaacgatcacctgacggatattgcctatcgccactttattgaaagcgttaaagattatgccatctatatgctgagcgccgacggcacggtcattagctggaatgagggcgcccgccgggcaaaagggtacctgagcgatgagatcatcggtcgctacttcggtctcttctatagcgaagctgagcaactctccggtgtacccgcaaaaaacctggaaatcgccctgcgtagcgggcagtttgaaggggaaggctggcggtatcgcaaagacgggtcccgattctgggcgcatgtcatgatcgataccatccgcgatgagcagaacaccctgctgggttttgccaaaattacccgcgacattagtgaacagaaggcgattaacgaccgcatcgcctggatggcgcgctacgatgcgttaaccggtttacccaatcgggtggagttttttgaacgggtggagaagctgatcactggaaatgatgcccgccgctttgccattttcacgatcgatttagacaaatttaaagagattaacgatctgcagggccatctgattggtgaccagctgctgcagcgcgttgcgggcgccgtgctcaaaacgctgcagaaggaggagatggtcgcccgcttcggcggcgatgagtttgtggccgttaaacctttttccgatgagggggaagtggatgcctttgctgcgcgcctgtggcactgcttcagcggtaagcagacgtttgccgcgacggaagtggttctctccgccagcattggcatctcagtctacccggaggacggcacggatattaatacgatactgagcaattccgatctggctatgtatcgggcaaaaagcagcctcgaccataagatttgctggtatgaacgtgaaatggatgacaagacgcggcagcgcaatatgatggccgccgatatccggcgcggtattcacgccggggagttttcgctccactatcaggctatccgcaacatcaaagatcgtagcatcaccggttacgaggcgctgctgcgctggcagcatccgcagctggggacgatcccgccggacgtgtttattcccatcgccgaagagagcggcgctatcgtgcccttaggttactgggtgctcgagcaggtgtgtaacgaatcgctggaaaatggtttgaacagaaaagtttcggtcaatatctctccggtgcagttgcgccatcgtagctttatcgaaaaagtccgcgagatcctgatgcgtaccgcctacccggtcagtctgctggagtttgaggtcaccgaaacggcgtttgtgatcaataaacagctggcgttcagcgttctgcatcatctgcaaaaaatggggatcagtattgcgctggatgactttggcaccggttactcctccctgagcatgctgcgcgattttcatttcgacgtcatcaaactcgaccgcagctttatgacagatgtggagagcaaccctcaggtacgctcattcgtgcgagccattatttcgctgggcaattcgatcaatacgccgcttatcgccgagggggtggaaacggctggacaactgcagatcctcgaagaggagggatgtgacgagatgcagggatttctgttcggcgagccggtcgatatcaaacacctgcccgaccggcgctga

SEQ ID NO: 134604 - DNA, 930 bp, Enterobacter cloacae
ttgagttcagggagcatcacaacaggtcgtacgagcgggctgctgacgctggcgattggcgcactcttctacagcagcggcagtattgcccggccggatcttcagccgctggggccgaacattgcggataaagggtcggcgttttaccactttacgcaacgccagtatgactctgccgatggcgaacgtcactaccgggtatggaccgcagtgccggacaaagccccgcccgccgccggctatccggtactgtatatgttggatggcaacgcggtgatggataaactcgacgacgcgtttctgcagcagctcttcgccggctccccgccggtgatcgtcgctatcggctaccagaccgcgctgccctttgataccgcagcccgcgcctgggattacaccccaccgctaaagacgcatgagcctcgcgccgggaaacccgcgctaccgccgcgtaaaaccggcggcaatgatgcttttcgccagctgctgaccgaaacgatggttccccagacggaagctaacctgaaaatagatccccaccagcgcgctatctggggccactcctacggcggattgtttgtgctcgacgcgtggaggaaggcttcgccgttcgggatctactattccgccagcccgtcgctaggtcaggccctgcaatcgcctttgcaggcaagccaaagtcttgatgccgtccgctttcgcgggaaatcgctgtacctactcgagggtgacggtaaagcccgtggagagccgtccgggcacgaggcctcgcttgaggtgttgcgtcaaacccaacagcagcttgccagtaaagggttgaccgtagccttctggcgctaccccggcctgacgcacggtcagatgttcgaggtctcgctgcgctcggcgctgctgcatctttccgggcaggcagcgcttgcgcatcaataa

SEQ ID NO: 134605 - DNA, 141 bp, Enterobacter cloacae
atgacgctggcgatgcagttggtgcttatcagccaccataaagggctgacgctcttgctgatcgtaattattgcgctgctgtttattgcgctcactccgctggtcaaaaaactgttgagtcaccttcacgatcgttcctga

SEQ ID NO: 134606 - DNA, 240 bp, Enterobacter cloacae
atgtgtaatgcgtttaacggtattgcgatcgtcctctgctttcgtggcataagcagcgtcaccggtttcagcgaggcgatctggcaggtcatcatcacgctggctattatcatatcgacctggtacagcgctaactattttgctgcgctggaagctcgacgcgataaacgacgctatctgctgctggcctgggtggtcatgaccattctgttgaattttattcaccttggcggtggttaa

SEQ ID NO: 134607 - DNA, 444 bp, Enterobacter cloacae
atgatcgataacatcacgctggataatctgcatattggctgcaaagccagtaataaagcggaagtcatcgccatgatcggcgcggagtttaaagccaaaggctatgtcaatcaggaatgtgtccactttctgctggagcgtgaacatcaggtctcgacctttttaggcaatggcatcaccctgccgcatttgccgaaatccgcgacggatatcatccttaaaaccgggattgagatctatcagtttcctgatggcgtaatctgggatcggagcaatgtaatgtttattgccatcggcgtgatcgcgaaagagaaagagcatattgacgtactcaaggaaattgcctcgatatttagcgatgagctgatcgctaacgcactgtcattaatctccgacaaacatgatttcctgaaaattctgcagcataacgccttgccccattaa

SEQ ID NO: 134608 - DNA, 1446 bp, Enterobacter cloacae
atgtcatttataacaaacctgaaccagcaacagagaaaacgacttcatcagatcaccttagtggccaccttcggcggcctgcttttcggttacgacaccggcgttatcaacggcgccttttcctcactgaagcagtacatggcgctgaccccaaccaccgaagggctggtaatgagcgttctgctggtcggcgccgcgctgggcagcgtgtttggcggcaaatttgccgattacttcggccggcgtaaatatttactctttctctcctttgtttttctcatcggcgcgttgctttccgccgcggcccccgatatcactaccctgctgattgcccgcgccctgctgggctatgccgtcggcggcgcttcggtcaccgcccccacttttatttcagaagtggcgcctaccgagatgcgcggcaagctgaccggcctgaatgaagtcgccatcgtcattggccagctggcggcgtttgccatcaacgcgatcattggcatcatctggggccatctgccggacgtctggcgctatatgctgctggtacaagcgattccggccatctgcctgttcgttggcatgtggcgcgcgccggaaagcccgcgctggctgatcagcaaaaatcgtcatgatgaagcgctgcatatcctcaaacaaatccgcccggcggaacgcgcgcagaaggagtacgatgacatctctaccctgatcaaaattgaagctggtaataagtacagcgcccagagcacctttgcgacgattgtcaaaacaccctggatcctcaaaattttgctggtcggtattacctgggccgcactgcagcaaaccaccggcgttaacgtcattatgtattacggtacggaaatcctgagtgccgccggtttctcagagcgtacttcgctgatctgcaacgtgctgaacggtgttttctccgtgggcggtatgctgatcggggtgctgttccttgtcgaccgcttcaaacgtaagacaatcatcatctacggtttcgccattatggcaaccctgcatctgattatcgccgctgtcgattacaccctggtgggtgacctgaaagctaccgccatctggctgctgggcgcgctgttcgtcggcgtgatgcagggctccatgggctttattacctgggtggtattagccgaactgttcccgctgaaattccgcggactgtcgatggggatctcggtatttttcatgtggatcatgaacgcggtggtcagctatctgttcccgctgctgcaggcaaaactgggccttgggccagtcttctttatcttcgccgccattaactatttagccattcttttcgtggtctttgccctgcccgagacctccaataaatcgcttgagcagttagaagcagagctgtcagcaaaccatgaagataaaaaatccactcgtctcaccagggaggttggttatgatcgataa

SEQ ID NO: 134609 - DNA, 1329 bp, Enterobacter cloacae
atgaaagataattttgtggtcaccattgccggcggcggcagtacttatacccctgggattgtgatgatgttactggaaaatatgtcgcgctttcccctgcgggagatccgtctgtatgacaaccatcaccagcgtcagaagactatcggcgacgcctgcgccatcctggtggctgaacgcttcccacaggtgaagttcagctataccaccgatccgcaggcggcctttaccgacgtcgatttcgtgatggcgcatattcgcgttggcctgtatgagatgcgggaaaaggatgaaaagatcccgctgaaatatggcgtgccgggccaggagacctgtggtccgggtgggattgcctacggtatgcgctcgattgccggggtgctggagctggtcgattatatgcagcagtacgctccaggggcctggatgctcaactactccaacccggcggctatcgtcgcggaagcgacccgtcgcctgcggcccgacgcgcgcatcatcaacatctgcgatatgccggtggctatcgagggtctgttcgccgacatcctcggcctgccgtcgcgcaaagcgctgaacgttcgttactatggcctgaaccacttcggctggtggaccagcatcaccgataaagccggtaacgatttgatgccggcgctgaagcgtcacgtggcggagcagggatactgcagcccaaaagaagactttcagcataaggcgccgagttggatcgagacctttaaaaaggtgaaggatgtgtttgccctcgatccgacgacgctgcctaacacctatctgaaatactatctctacccggactatgaagtggcgcattccgacccggagtttacgcgggccaacgaggtgatggccggacgcgaaaaagaggtctttgatatggcccgggagatcacccgtcgcgacacggcggaaggcgcgcatttccatgccggggcccatgccacctttatcgtcgacctcgcctgcgccatcgcctttaacacccaggagcggatgctgttgatcgtcgagaacaacggagccatcgccaacttcgatgagacggcgatggtggaagtcccctgcctggtgggcgttaatggtccggaaccgctggcgatggggaaaatcccgtcattccagaaagggttgatggagcagcaggtggcggttgagaaactggtggttgacgcctggattgagggcagttaccagaaactgtggcaggccatcgccctgtcgaaaacggtgcccagcgcttcggtggcgaaagctatcctcgatgaactgatcgttgccaacgaaggctactggcccgcactgcactga

SEQ ID NO: 134610 - DNA, 1533 bp, Enterobacter cloacae
atgattggagtgaaaaagcttcaggatttttccaaggcgatgatcgggccggtgctgtatctgccagctatcggcctgttgatcgccctgttcagcatgacgaccaaccggctgtgggtggatgaaagcagcgggctctacctggtggggaaatttgtctccagtatgctctgggcgctgatgaaccatctagggtttctgttctgccttgggctggccagcggtctggcgaaaacccgcaaggccgaagcggccttcgtggcggccatgacctggctgatgtacctggcggcgaataatagctggctaaccctcacccatcgcctggcgaccggagccaccaacgcgcaactgtacggcagcggacaaacctttatcttcggttttcaggttatcgatatgggcgtattccttgggattatccttggctgcgctgtcgcctttgtccataatcgcgtggttgggattgagtttcgcggcgcgctgtcgatctacggcaacagtaagctggtgctgatcgtgatgctgccgctggttggcatgttcgccatcgccaccgtctatctctggccggtagtggagctgggcatctcggcgctgaccggctttatgaaatcctttggcgccatcggggtcttcctgtacggctttctcaaccggttcctgatccccaccgggctgcatcatctgatctggtcgccgttcgtttttacctctatcggcggtcagctgctgatcgatggtcagaccgtcattggcgctaagcctattttcctggccgaaatcgcccgccaccccgttgacgcgctcagtgattccgcccgtttcctcacctatgggatggtgaagatttttggcaccgccggcatggcgctcgccttctaccgtacggcgaaaccggagaataagcagcggttgaaagtcacgctgatccccttgattgttacctccgtcctggtggggatcaccgaaccttttgaggttctctttatcttcaccgccccattgctgtggcttatctactccctgctggacggttttttccagatgctggcctggctgcttcacgtcagggtctgcgccactaacggtctcatcgatttcgtcgtctataacctcccggcgggagtcagcgcgacgcgctggccggtgtttgtcgccctcggtctgctggaaaccgcgaccatgtacctggtcggcaccttctgtattacccgtctgcggctgctcaccccgggccgcgaaaccgcagccgaagatgagcattcgcaacaggctaatagcgagcatccggataaaggcgcgctggtgattgccgggctgggagggaaagagaatgtctgtgcggtgggcaactgttttacccgtctgcgggttgatgtgcgggaccccgcccttatccagcagacgctgttgaaagagagcggcgggagcagcgtgctgattaaaggaaaccatgtccaggttatctatggcctgggagttaacaaaattcgaacggcggtcaacgccagtctgggtgttattgaataa

SEQ ID NO: 134611 - DNA, 699 bp, Enterobacter cloacae
gtgatttataaaaagattgccactgaactgaggacccgcatcaacagcgacgactatgccgtcggcgatatgctgcccagcgaaaaagcgctcgccgcggagctgaaggtctcggtgatgacgctgcgcaaagcgctggcgctactggaggaagaaaagttgatcgcgcggcggcacggcagcggaacctgcattgtgcgtaaaagtaactatcatggcggggaactggagggctttaactaccagatgcaggtggtgggcgtcaccaactaccgtaacaaagttattgaatttacgctgcttgatgccccgccagccattgcccagcagttaaagatccagccgggggagaaagtgtattacgtcagacggctgcggctgatcgatgaggtcccaatcctggtggaaaacagctatatcccattcgccaccttcccctggctcagcgtgggtaacctcgagcagtctaagttcaactatttcaaaaaagagtgccatatcaccattatcgagagccaccgcagctataccccggtgctggcgacccgtgagcaggcggagctgctgcaggtggcgccaaacagcctcctgctgcgggtgcagtcgatcagctacgcccagaaccgggcgatcgtcgatttctcagagatctaccagaacaccagtaagtacaatgtgaagcacattacccgccgctag

SEQ ID NO: 134612 - DNA, 744 bp, Enterobacter cloacae
atgttcgatttacacacgatctctttcctgttgatctttattgccgccgggctggtcaaaggggtgaccggcatgggattgcccaccgtggcgatgggcctgcttggcctgctgatgccgccgcaggccgcagcggcgctgctggtgcttccctcgctgctcaccaatctctggcagttactggcaggcccggcgctggcgcagattgtacgccgtctctggcttatgatgaccgggattattattggcacgttggccgggtcctcactgctgatcggcctcaatcctcggtggtcggcgctggcgcttggcgccgcattgatagtctatgccgggtatgcgctctgcagtccggtgtttcaggtttccggccgcgtggagaagtggctgtcgccgctcatgggcgggctgaccggcgttatcaccggggcgaccggggtatttgttattccggccgttccctggctacaggcgctgggctttcgtcgcgacgagctggtgcaggccctggggttgtcgttcaccctttccactctggcgttggcggctggcctcgccctgcacgatggctggcatgatgatgcatggctattgtcggcgctggcgctgttgccggcgctgctcggcatgtggctgggacagcggatccgctcgcgtctcagcccgcagcgctttcgtcagggctttctgttgttcctgctggcgctggggatagagctgatcgcccggggatggctggtctga

SEQ ID NO: 134613 - DNA, 885 bp, Enterobacter cloacae
atgcgactggatctggccgatctgcggctatttatcgccatcgtggataccggtagtatcaccggcggagcggcgaatgcccatctggccctggcgtccgccagtgagaggctgcgcaagatggaggccgagatcggcgtgccgctgttgcaccgtcatgcccgcggggtgacgatgacagaggccggggaggtactggcgcgccatgcccgcccgcttcttgcgcagcagcagcgtctgcgccaggcgatgcacgccttcgcctgcggtcagcgggggacgctgcgcctgttcgccaacacctcggcgatgtcggcctttctgccggggaagctcgccgcctggatggcagcgcacccggcggtgcagatcgaaaccgaagaacgcaccagcgcggatatcgtcagctgtatcctggcgggcgtggcgcaggccggagtggtgtccgatgcggtcgaccccgggccgctgcgcctcgatcccgtcgctgacgacccgctggtgctgatcgtgccgccagctcaccctctggccgaaaaacaggaagtggcgtttgcggcggtgctcaacgagccgttggtcgccctctatcagaccagtgcgctacagcagcatatcgaacagcacgcagctgaactcggccaggcgctaaacgttcgggtcaggatgagccattttgcagggctttgcgagatggtggcgcacggcgccggcggggcgatcttgccgcgcgttattgccgagcgttaccggcagcgctattcgtttgccgtgatcgggttacaggaccgctgggcgcagcgccgtttgtgcctgtgctaccaggatgacgccagcctgtcgccagcgatgcgccgcttactggaatggcttcgtcagccttga

SEQ ID NO: 134614 - DNA, 876 bp, Enterobacter cloacae
atgagtacattaccaaaggtcgcggtgctgggactcggcgccatgggacacgcttttgccagtaacctgctgaaaaacggctttaccgttgccggctggaaccgttcgccagcccgcggcgaagatttacaggcgcatgggttatctctgcacgccacgccgcagcaggcggtggccgatgccgaggtgatcatcagtatgctcgccgacggcgaggccaccctcgaggtactggcgcaaatcgcgcccgcctgtcagccgcaggcgatctattgccagatgggcaccattggcctgccggagacccggcaggccatcgcgttgttgcgggaacttcagccagcgatgacctatatcgatgccccggtgtcggggaccaaagcccccgcggagaaggcacagatcctggtgctcgccagcggcgatagggaaaagggcgccgctgccgaaccggtgtttgcggctatctcccgcgggacgcagtggtttggcgaggcgggcaacagccagaaaatgaagctggtcctcaatgcctggctgatttcaatgatgcagggcatcgcggagagcgcccagctggcgaagacgctgggcttcacccccgaccagttgtggagcgccctggaaggcggcccgctggcggcgccctatgtcaaagtgaaactggacgccatcgccagcgagcagtataccccgcagatgcagctggcgcatgccctgaaagatgcccggctggcgctttccctggccgagccgcacaccatgccggggctggaaaacatcgccgaactgtggcagcaggcggcggacgcgggatatgccggagaggatttgtctgcggtatatcagtggctgtcgccgtcgtcaaaagcgtaa

SEQ ID NO: 134615 - DNA, 1140 bp, Enterobacter cloacae
atgattattacaacagcgctggctaatgaaattgtcgcccgggcaatggcgataattcatcataacgtgaatgtcattgaccatcatggacagatcattgcctcaggtgaacggcatcgtatcggcgaacagcatgaagtcgcccgggaggtaatacgcaccgggaaacgcatttgtattaacaacgccgcggaagccgcgcgttttcacaacgtgcatcctggtattaatcatcccataatctatgacgatcgcgtggtgatggtggtaggcatcagcggcgatcccgcggcgataagccgctatgctgaactggcggtgctcaccgccgaactgctggtccgccaggccatagagatgcgggaaaccaactggcggcaacgtctgcgtgacaccttgttttgtcagtatctggaacaaggggctacgcccgccgggcaagaagcgcttcatcgcctgctggaacttggtttcgattttgatacaccgcgggttccgatcgtagtgaccgtgcaggtcgaacagcatcagttaagcgacatactgagtacgctgttgcgggaattctcgcagctctccggcgtaagtgacgttattttgctgggcagccatgaattattgatcctcaacgcgctaagcgaagcccaggaaaccctgctgcggagtaatcagataagccattaccatatcgggattggcgtgcaggcggacagcgccccggacattcgcgaggccattcggttcgcccgctcggtgatcgaagtgggtagcaaagtgcagccgcagcggcagatctactactttcgcgaaatggcaatgctctgcctgttcagggtgctggaagacagctatatggtcaatttttttatcaataacgtacgccagctgcttgagcatgattccggcgaagtgctgctggataccctgagcagctttattgccaataatgccgaaccgggcaaaacgtcgctgctgttggggattcatcgtaatacgctcacctatcggctgcagcaaattaaaaagcatatacagctcgatccgatggtcttcaccgacctgacgcagctggcggtgtcggtacactgttatcgccggctgaatccgcgccagagcgaatggattgatagcttaagctaa

SEQ ID NO: 134616 - DNA, 1194 bp, Enterobacter cloacae
  misc_feature (347)..(356): n is a, c, g, or t
atgaagattgttatcgcgctggattcgtttaaaggtagctgtagcgcgcaggccgcttgcgcagcggtagcccagggattgcgccgggttgaccagacgctggagctggtcgaaatgcccgtgtccgacggcggagagggactgctgtcgactctggcggatagtccgttgcttgagggggcggtgtggcaacagcagcgctgtagctcgccttatggcctctccctgcaggcggatttcctgatcctgcccggcgagcgggccattatcgagatggcgcaaagctgtgggctcgaactcacgccgccagcgcagcgggatgtgcgtcaggccagcagctacgggcnnnnnnnnnnctacgggctaggcgaacaggtaaaggcggcgctggacgccgggtgtcggcacttgattatcggcctgggcggcagcgcgaccaacgatggcggcatcggttttgcccaggcgctcggcgcacgattctggcgtaaggacggcaccctgctgccggctcccgcggcaggtcaggacctggcgcatattcagcacatcgatttgagcggtctggacccgcgtctacagcaaagcgaaatacaggcctcctgcgatgtcactaaccctctgcttggcgagcatggcgccacctgggtgtatggggcgcagaaaggcgcggacgaggcggcgctcagcgagctggaggcgggaatggcgcattatagccagctgcttacgcaaaccctcggattcgacgtcagcggacggcccggcgccggggccgcgggcggtatgggggctgcgcttatcgcctataccggcgccacgctgcgtccgggcattgacctggtgctggagctgcttaacgccgacgaccatcttcgcgatgccgcgctgacgatcgtgggtgaaggctggctcgatcggcagagcgcctttggtaaggccccggtgggcgtggcaggcaaagccgcacgccatggcgtgccggttgtggccctttgcggcgggcgtgatgagagcagccggcaattatatcaacaccatattgacgcaatgtggtctatttgccagcgccctatggcgctggcagagtcgatgaacacatgcgaaccgctcctcgccgacgccgcggagaatgttctacgaacctttctgagcgggtggcacggagaggcacataagcggataactgtatga

SEQ ID NO: 134617 - DNA, 1371 bp, Enterobacter cloacae
atgctgtcgcgacgccgcggagtaaacacgactatgacaacaatcaatcacacacctgccggcgaacaacgtggcaaaaagcggctgatacatcgcttctcctgggtttcgctactggtttgctggctaatctgggtgcttaacgcctacgatcgcgagatgatcctgcgccttggcccggtcatctctaaggagttctcgctctcgccggaacagtggggcaatatcgtcgccctgatcatggtagcccttgcggtgctggatattcccggctccatctggagcgatcgctacgggtctggctggaaacgagcgcgctttcaggtaccgctggtgctgggctataccgcgctgtcttttatttccgggattaaagcgatcagccacgggctgacggcctttgtgctgctgcgcgtgggcgtcaaccttggggccggctggggcgaacccgtcggcgtcagcaacaccgcagagtggtggccgaaagagaagcgtggttttgcgctgggggtgcatcataccggctatccgattggcgcgctgctgagcggcgtggtggcaagcctggtgcttgccacgtttggcgaaggcagctggcgctactgcttcctgctggcgctgctcgtcgccatcccgctaatgatcttctgggcaaaatattctaccgccgaccgcatcaacacgctttatcagcatatcgacagccaggggttgacgcgcccggcgacgcaggaaagcagccatgtcgccaaaggcgaagggatgaagacctttttacgcaccctgcgcaaccgcaatatttcgctgacggcgggcaataccctgctgacgcaaatcgtctatatgggcattaacgttgtactgcccccgtatctttatcacgtctccggcctgtcgctggcggcgtccgccgggctgagtattatcttcacgcttaccggtaccctgggtcaggtaatctggccctggctgtcggatagctttggccgtaaacgaaccctgatcgtctgcggtctgtggatgagtatcggcattgcgctgttctatttcgccaccaatatgccgcgccttatcgccattcagctattttttggcctggtggccaatgccgtgtggcctatctactacgccatggcgtcggactccgccgaagaacgcgccacctctaccgctaacggaattatcaccacggcgatgtttatcggcggcggcatttcgccattgcttatgggctggctcattcagtttggcggcggctgggaaaatccagcgggttatatctacgccttctttaccatggcgggatgtgcgctgctggggatgttattacagctcatgaccaccgataaaacgccgcgcaaagcgcattaa

SEQ ID NO: 134618 - DNA, 879 bp, Enterobacter cloacae
atgcgcattgaagtgttactggatttaaaaacccgactcggcgaaagcccggtctgggatgtcgaacagcagcgtctttggtgggtggacagcctcgacgggcgcctgttcgcctgcaacgcgcagggcggcgcgatcaagagctgggacgtgcgacagaaaattggctctttcgccctgcgccagaacggcgaaggcgcggtggtggcgctgcagaatggcgttcatctgcttgacttcgccagcggcgagctgacgctgttgcaccatccggaagcggaccgaccctttaaccggctcaacgacggcaaagtcgatcgtcagggacgctttctgttcgggtcaatggatatgcgcgaagaggaaccgagcggcgcgctatatcgcctggaccccgatctgtccctgcacgtgctgaagaaagacattatcgtctctaacgccccctgctggagcccctccggcgacaccttctattttgccgatacctggacgggcgaaatctgcgcctgggactacaacaccgcgaccggcgatctttccggcgaacgggtcttttgccatgtcgatcgcagcgaaggcggcgcggcggacggcgccaccgtggacagcgaaggctatctgtggaacgcgctggtctacgcgggcaagctggtgcgctataccccggagggcaaggtcgatcgcatcattgagatgccggtgaaaaaagtgaccagcgtgatgttcggcggcgaaaaccttgatgtgctgtacgtcacctccatggcgcagccgcccctgccgcgcttcccggaagataatcagctgcgcggcagcctgttcgccatttacgacctgggcgtgaccggcgtagcggaacggcgcttcgccggctaa

SEQ ID NO: 134619 - DNA, 1338 bp, Enterobacter cloacae
atgtccgcaataaatgaaaaggcggtaaacgggacgcagctgcaacgcacccataaaaaaatctaccgccatttgatgccgctgcttatcgtggcgtacatcatcagctttattgatcgtaccaatattggcatggcgaaagcgaccatgtcggtggatatcggcctttccgcaaccgcattcggcctcggggccgggttgttttttctcacctacgcagtgctggagatccccagtaacctgtttctcacccggattggcgcacggcgctggatagctcgcatcatgattacctggggcatcctctcctgcggtatggcgtttgttaccgggcctacgtccttttacgtgatgcgccttctgctcggcgccgccgaagcgggactctatccgggcattatttactacctcaccctctggtttggccgcgaagagcgcgcaaaagccaccggcctgttcctgctgggggtctgtctggccaatattatcggcgcgccgctgggcggattgttattaagccttgatggcatgtccggctggcacggctggcagtggatgttctttatcgaagggctgcctgcgatagcgctggcgttcgtcgtctggcgcagactgccggataaaccagccgacgcccgctggctggacagcgacgatgtgcaagccattaacgcggtactggcgaaagaagccgaggaaacacgccatacgccgagccgtttctccctgaaaaccgcgctgtccacccgagtgtttttgttgctggtgctgatttactttacccatcagttttcggtttacggcctgagttatttcctgccggggatcatcggtagctggggccagcttactccgctgcaggttggtctgctgaccgccatcccgtggattgccgccgccgcgggtgggatcctgctgccgcgattcgcccgcacggaacagcgttcccgcagcatgctgatggccggatatctggtcatggcgaccggcatggcgattggcgccattgccggccacggtgtggcgctgcttggcttctcgctggccgctttcatgttcttcgctatgcaatccatcatctttaactggctcccgtccatcatgagcgggcatatgctggcgggcagcttcggcctgctcaactgcctcgggctgtgcgggggctttctcgggccgtttattctcggcgcgtttgaggaccgcaccggtgcggcaacgtccggcttatggttcgctgtcgcgctactgattatcggcgcgctggtgtccctgtttctcaaaagttcttcatccccaggctccgtatcggcgaaacaggcccacggcgaaaaagtgtaa

SEQ ID NO: 134620 - DNA, 1191 bp, Enterobacter cloacae
atgacccaggctaatgatattgtgattgtcagcggcgtccgtaccgctattggcacgtttaacggcagtcttaaacatacccatcagcatgaccttggggccgccgtcattcgcgaagcgatcgcccgcgccgggattgcgccgcaggatatcgacgaaacgatcgtcggcaacgtcgggcaaatcgccgaaagcggttttatcgcccgcatctgtcagctgcgcgcggggatcccgcaggagagcaccgcctattccgttaaccgccagtgcggctccggacttcaggccctggcggacggcatgatgcagctgcaaagcggccaggccgaggtggtcgtcgcctgcggcactgaaaatatgacccagctgccctactacctgcgtaaagcgcgcgatggctatcgcatgggccacggcgagctggaagatggcctgatctccattctcacctggccggaaggcccttatcacaacggcatcaccgcggaaaacgtcgcgcaacgcttcggtattacccgcgaagcgatggacgatttcgcctggtcgagccagcagaaggcgctgaaggcgatcgcggagggtcgctttcgcgagcagatcctggcccttgaggtgccggacggcaaaaaagcgacccgcctgtttgcgaccgatgaacacccgcgcgacaccccgcgtgaaaagctcgccacgctgcgtccggcgtttaaagccgacggcgtggtgacggcggccaactcatcgggcattaacgacggcgcggcggcgctggtgatgatgacccgccagcaggcggaaaaacgcggcttaaccccgcgcatgcgcattcgcggctgggcggtcgccggctgcggggcggagattatggggtttggtccctctcccgccacccgacgcctgatggaccgtctcaatatagatgtgcagtccattgatttaattgaactcaatgaggctttcgccgctcaggcgctggcggtgatgaacgatctgcgtctcgacccggcccgcgttaacgtcaacggcggcgcgatcgctctcggccacccggtaggcgccagcggtgcgatcctgccggtcaaactgatgtatgaaatggcgcgcagcggtgcacgcactggtctggtcaccatgtgcatcggcggcggccaggggatttctatgctgttcgagcgcgaaggcgcttag

SEQ ID NO: 134621 - DNA, 735 bp, Enterobacter cloacae
atgaaacttgccagtaaaaccgccattgtcaccggcgccgcacgcggtatcggctttggcattgcccaggtgcttgcgcgggaaggcgcgcgagtgattatcgccgatcgtgatgcacacggcgaagccgccgccgcttccctgcgcgaatcgggcgcacaggcgctgtttatcagctgcaatatcgctgaaaaaacgcaggtcgaagccctgttttcccaggccgaagaggcgtttggcccggtagacattctggtgaataacgccggaatcaaccgcgacgccatgctgcacaaattaacggaagcggactgggacacggttatcgacgttaacctcaaaggcactttcctctgtatgcagcaggccgctatccgcatgcgcgagcgcggtgcgggccgcattatcaatatcgcttccgccagctggcttggcaacgtcgggcaaaccaactattcggcgtcaaaagccggcgtggtgggaatgaccaaaaccgcctgccgcgaactggcgaaaaaaggtgtcacggtgaatgccatctgcccgggctttatcgataccgacatgacgcgcggcgtaccggaaaacgtctggcaaatcatgatcagcaaaattcccgcgggttacgccggtgaggcgaaagacgtcggcgagtgtgtggcgtttctggcgtccgatggcgcgcgctatatcaatggtgaagtgattaacgtcggcggcggcatggtgctgtaa

SEQ ID NO: 134622 - DNA, 1593 bp, Enterobacter cloacae
gtgagcagcaaatttatcgacgcccatgaggcggcgcggtgggtcgccagcggcgacaccgtctgcaccgtcgggatgacgcttatcggcgcggcggagtccattttaagcgccatcgaagcgcgctttctgaccgcgggcgaaccgcgtgacctgacgctactgcatgccgcggggcaaagcgatcgccagcgcggtatccagcactttgcccatccgggtatggtgacccgccttatcggttcgcactggggcctggcgccgcgctggatggcgatgatcaacaacaacgaagtggaagcctggtgcctgccgcaggggcagatcgttcatctctatagcgcgatggccgccggactgccggggcggctttcccccgtcggtctcggtacctttgtcgatccgcgcatagagggcggaaggatgaacgcccgcacccgcgaacgacccaatctgatcgagcacgtcacgtttcgcggcgacgaatatctgttttatccggctcttcctctggacgtggtcattgtgcgcggcacccatgctgatgaagacggtaacctcacgaccgatgaagaggtgatgaagctggaagtcctgcacgccgttctcgccgccagacgctacggggcgaaggtgctggcgcaggtgaaatatcgcgtagcgaaaggctcgctgcatccgaaaagcatcaccgttcccggcaacctgatcgacgccattgtggtgtgcgaagagccgcagacggatcaccgccagacttcaagctgggccttcgacccagcgctgtgcggcgatatccagctgcccgccgcgcaaaatgcgccgctgccgctggacctgcgcaagcttatcgggcggattgcctgccgctatctgacccccggctgcgtcatcaatctcggcaccggtatacccaatgacgtgattggcgccatcattcatgaggaacagctcggcgagcaggtcaccatcaccgtcgagtcagggatctacggcgggcagcaggcgggtggcgtggatttcggtatcggccgtaatctgagcgcgatgattagccaccaggatcaaatgctctactacaacggcgcaggggtcgacatcacctttatgggcgccggcgagatggacccgcacgggcacgtcaatgccacacggctcggcgcatcctgccccggcgcgggcggttttatcgatatcacccagaatgcccgccacgtcgtgttctgctcctcttttaccgccaaggggctggagatcgcctgtgaacacggggcgctgcatatccgccgcgaaggcgaagtgcgtaaattcgtcgccggggtaaaccagatttcttacaacggcgaactggcccgcgccaaaggacaaaccatgcattacgtcaccgaacgggcggttttcgaactgcgcccggaaggaccggtgctgacggaaatcgcccccggcatcgatcttgagcgcgacatcctggcgcatatggattttcatccggcgatcgccgcggatcttcaggttatggacagccgtttgttcaccccgccgccctgcggtctcgcggaacatctgtcccggaattcatcctctgactcataa

SEQ ID NO: 134623 - DNA, 1557 bp, Enterobacter cloacae
atgaacagcacctccgccgacttccagaatctgtaccaggccctgagccacagcgccgcccgcagcccggatgccctggcgctggcgtttgaggatcggcgctatctgtaccgcgattttcatctgcgggtacagcgggcgatggcgcagcttgatcgcggctggtcgctgcgcaaaggcgaccgtattctgctggcctggggcaatcaccccgctttttgcgaagtcctttttgccgcgctgggtttgggcatcgaagtggtgcctttcagcaccaagcttaagcaggccgaaagcgaggcgctggtaggccatatcgctccccgggttgtcctgttcgatgcgaccgtacaggactggctgaaaaacacccctgacgcgcgtgcggtttctctcagcgaatggcaggcgctctgccttcccgaaccgctgacccgcccgccggtcccggttaaccgtgacgatacggcggtgatgatgttcacctccggcaccaccggagagcctaaaggggcgattatcacccacaataacctgctctgcgcgattgacgcctatacgcaaaaactgaatctcaccgccgcggatagcaccattctggcggtgcctatctatcacatcaccggcctgtcggcgctgctggcgctgtttattagcctcggcgcgagcatctggctgcagcatcggttcaatgccccgcaggtgatcaccaccctgcgcgagcagaacattacctttctgcacggctcgcccaccatttttatccttctttgccaggctgcgcgtgagcagagcgccaaccatcccagcgattttccggcattgcgcacgattgcctgcggcgcgggccacctgagcgatggactgatcaaggagttaaaaaccctgttcccgcataccgcgattcagccgatctacggcctcaccgaaacgacctcgcctgcgacgatttttccgggcgacgtctggggcagcgataaatgcggcagttcaggtcaggcgatcccgggtctcgccattaccatccgcaacgatcgccagcagtccctccccgccgggcaaatcggccatatctggctaaaaggcgatgtggtgatccgcgaatactggcagcacagcgagcgacgcccgagctgcgatgcgcagggctggttttgtaccggcgatctgggctatctcgacgacgaaggctggctgtacatcaaagaccgcagcaaggacatgatcaatcgcggcggcgagaaaatttactcactggagctggaaaacattctctctacctatcggggagtacgggaagttgccgtcatcccgacccccagcccggtctacggcgaagagcccgtggcgtttatcgtgccggatggccagcatcacctgaccagcgaagagatcctcgactggctgaaggtcaaaatcgcccgttttaagctaccggcgcgcattattttcacccgtgctttaccgcgtacccacaacggcaaagtgagtaaacagcagctcaaaacgcgtctcgcagaatccatcatcacgctatcaacggaggataaaaagtga

SEQ ID NO: 134624 - DNA, 390 bp, Enterobacter cloacae
atgcgcgaacttatcaacacgattgctcatattggctatcaggtcagtgacttaacgcgttcgcttgccttctatgaaccgctgggctttcagcgccagcagcggtttagcaagccatcgccacagggcactattgaagttgcgttcctggaaatggcgggcgccgtcctcgagctgtatcagcttcccgctggaacgccctttgacgcccctcgctgcggtatcgatcatctggcgctggaagtcagcgacctggatgcggtgcagcagcggctggcggcgctcggttatcagctcgatgaagggccgatagaagaagacaacgtgcgcttcctgcttattcgcggccccgatggcgaacggctcgagttcgatgcctgtaaacgctaa

SEQ ID NO: 134625 - DNA, 1335 bp, Enterobacter cloacae
atgagtacgctaatcacggataaggtcgataacgcagcggtccaaaaagaaaaactggacaccagtgcgtatttaccccataccccctggctgcaatttttactggtctgttgcctgtttgccctatgggggatggcgggcaacctgaatgatattttgatcgcccagtttaaaaagggcttcgatttaacggatacccagacagcgctggtgcagtcgatttttttcctcggctacttttttgtcgccctgcccgcggcggcgctgattaagcgtttttcctataaagcggcgattattattgggctgtgcctgtacgccctcggctgcttcctgttcgttccggccgcacagatcatgacctacggcgcattcctcgcctgcctcggagtgatcgcctgcggactctcttttctggaaacgtcggcaaacacctactccagcctgctgggtccgattcaatcctccacccagcgtattaacttttcgcagatcttcaactcgctgggcgtgatctccggcgtattaattggccagctgatggtctttggcgaaaacgatccgagtcatgaacaactgctggcgatgcccgccgccgctgcagacgttgcacgccatcagatggttggtcaggtggtcgggccctatctgattatcggctccgtactggtggtgctggcgctggtgttcgtgtttattaaattcccgtcgtgcaagggcgcgcccgctcaacaacagcaactcccgacggaaagcatggggccaacgctgaaacgcctgtttgctatcccgcgctttcgcctcgggatcctgtcgcagtttttgtacgtcggcgcccaggttggcgtatggagcttcacgattcgctttgtgcagctcgtgcagcaaggcaccagcgagcactccgcgacttactggctgctggcttctctggtgatttacgccgtgggaaaaaccgtggccacctggttgatgaaccgtctgaatccggcgatgctgctcggaacgtttgccctggccgccaccgccctgttactgattgccgttttcagcggttcaatgctggcggtctatgcgctcattctggtcagcttctgtatggcgccatgctggccgacgaactttggtctggtgatcaaagggatggggaaagatacccagaccgcaggctcgatcgtggtgatgtcgattatcggcggggccgtaattcctctggtgatgggcattatctcggatatgaacggcggcaatatgcaaatcgcctttatcgctccgctcctgtgctttgtgtatgtcgctttctacggcttctggtgcgtgcgtaagggggtataa

SEQ ID NO: 134626 - DNA, 942 bp, Enterobacter cloacae
atgtcaggaaaagtctgtgtttttggttcattcaatttcgacatggtcgccagggtggatcactttccggtaccaggtgagtcgttagtggcctgcggaagtatgaccagcgccggaggtaaaggggcgaaccaggccaccgccgcgctaaaagcgggagcaaatgtccactatatcggcaagattggcaatgacaccttcggccattttgcccgccgtcatctgaaaggcgtgggcttcaatgctgtgacgctgctggtcgccgaagagatccccaccggcaatgcgctgatttatgtcgccggtaacgatgccgaaaacatgattgccgtcgatcccggcgcgaatatgacggtgaccgatgatgaaatcgccggctgcattcccgctatcggctgcgcggatgtggttctggttcagctggagaacaatctttctgctattgaacaggtcatagacgccggcaaacaagccggggccctggtaatactcaatcccgcgccctggcagcccgttgagcacgcccttctacgcaaagtggatttacttacaccgaacgccacggaggccgggttaatgaccggacgccgggttgacagtctgacggccgcggctgaggccgccgacgtgttacatgctcagggcgcgcgcaacgtcattatcactctcggcgccagcggcgccctgctgagcgagcatggggtgaaatcccctattccctgctttccttctcacccccgagacactaccggtgcgggcgatgccttcaacggcgcgctggcggcgcggctggcctgcggggaaccgctacaggccgcagcccgattcgcggcggcctatgccgccgtcagtgtcgaaaagcaaggcgcctcatctttacctgagtacctggaggcacaggaacggcttctccgtgccgccgctgattatgaaatggcataa

SEQ ID NO: 134627 - DNA, 690 bp, Enterobacter cloacae
atgcgttattacctttctccctcgctgatgtgtatggacatgatgaagctgacggaacagctgcgctttctaaacagcaaagccgacaggctgcatgtcgacatcatggacggccactatgtcaaaaatctggcgttgtcggccagctttgtggcgcagatccgtccctacacctcgcttcctatcgatgtccatctgatggtcgaagcgcccgcttcgtttataccggcgctgttagacgccggcgcagacgccttctcactgcatccggagaccatctgccgcgaagcgttccgggttatcaatatgcttcgtcaggcggggaaagaggtgggaatggtgctcaatcccgccacaccggttgagagcatccagcactatctgcatctgctcgataaggtgacggtgatgaccgtcgacccaggctatgccggtcagccgtttattcctgaaatgctcgccaaaattacgcagcttcatcagctcaaagagaccggcagcctccgcttcttgctggaagtcgatggctcctgtaaccgcaacacctaccgcgcgctgctgggcgccggggcgcagatattggtgatgggcagcagcggtttattccgcgctgatatgccgctcgagctggcctgggaaaccatgtcccgcgaactgtccgccgcgctgcactcccccgagctggtatag

SEQ ID NO: 134628 - DNA, 801 bp, Enterobacter cloacae
atgttgccgctggaacgtcatcgtttgattgttgaactgctgggccaacacggcgtcatgcgggtgaatgagattgcgcaagcgactcgggtctccagggaaacgattcgccgcgatctgagcgagctggaacgcaaagggatcttaacccgaagccacggtggagcgctggcggcggaaaatccgctgccggcgacccgggcggcggcatccgccctgccagttgaagatagccagggaagctttcagcacagaacgctgctgcacagcgaaggcaaaatgcgcgtggcccgtaaagcactgcagtttctccaaccgggacagaccattgtcctggacgggagtagcaccagctggtttttggcccggcagatgccggagatggcgttgacggtgattacgccctccattcgcatcttacaaactctgatgagccgacgctcgttgcatctcgtcgggctggggggcgatttctccccgaccgaagagtcgttcttcggggaaaccgcctcacgaacgctacgcgaatatgccattgatacgctctttttctcctgccaggggctggagcgcgatagcggcttgtatgcgggtacgcaagcccacgccgccctgctgaaacagatgctgctggccgcccgtcagactgtggctttggtcgacggcagcaagctggggcgaacaggcgtcgcgcgtatcggcggactgggcgagctggactgtctggtgactgaaaggtttgtcgatccgctgctggaaaaagagatgacctggcataacgtcagcctgcaaatcgcctga

SEQ ID NO: 134629 - DNA, 714 bp, Enterobacter cloacae
atgaatgaaacaacccgtcgttttgcacgtttagttgatctgagcgcagttcaggccaccagtaccgaagcggatgttcgcgcctgcgccgagctggctgccagatacaacattatttccgtccacgtactgccttgctggacgcgctttctcagtacgttgctgccgcagcagggtacgggagaggtgatgattggcggtccggtcggctttcccggcggtgggcataccaccgataccaaggttcaggaagtgcggcagctgattgccgacggcgctcgggaagtggatatggtcgtgaatatcggcaaagtgctctccggcgattatgactatgtgcgcgaagatttgcgccgcgtggtggaagccgccgccccggtaccggccaaagtgatccttgaaacgcactatcttaatgaggagcagattcgtcgcgtgtgcgaaattgccgtagaggtggggatgaagtgggtcaaaacctctaccggctgggcgcccaccggcgccacggtggaaaaagtcagcatcatcgccgaccagcttaaaggccgaatcgatatcaaaggcgccgggggcattcgcgatctggccacggtgcgtgcgctgtaccagcttggcgtgcgccgctttggcatgagccatggcgcggtaaccaaggtgctggctgaactggagcagcacccggaacgttttcccgagctgaacgccgattaa

SEQ ID NO: 134630 - DNA, 1251 bp, Enterobacter cloacae
  misc_feature (1139)..(1148): n is a, c, g, or t
atgaaagataaaatactcacgattgatgttggcactggcagtacccgcgccgctattgtgcgcattgacggcgcgatgatcggctttgcgcaaagagagtatgagcaaaccacgccgcgtgcaggttggtcagaacaggccccgtctttatggtggcaggccgcctgcgactgtatacgcgaggtgctttaccgctatcctgaaacggcagcgcaaattgcggttattggtgcttgcggacagatgcatggcaccgtccttctggacgaccgtggcgagctggtggaggatagggcgttgctgtggaatgataagcgcagccagccgcaagttgacgcctttaacgcgcgcgaaggttgggaaaagtggctggcgcatttgaataatccgcctgcggcagcatggcccgctttcaagttagcctggtggcgcgaaaatcatccggatcgctggtcgcagctcgccaaagtattaatgccgaaggactatattaatttcatgctgaccggtgccatggcgaccgattatagcgaagcgtcgtgctatttcctgatggacagcgaaacccgtagctggtcttcgcaagcctgcgaaacgtttggtctgcgggtcgatcagctcccggagcttaaactttccagcgacataatcggccaggtgacgcagcgcgcagccgacctgacgggcctgccggcgggtatcccggtggttgccgggacgtcggatatggcggcctctctgctgggctcgggtgtgtatgaaccggggatggcgtctgattcaaccggcacgtcgacgctgatgacggtggtgtcgccgcggccgttacaccatccgctggttaataatcttcatcttgccaacgcggcctggggcggatttacgatcctcgacgccggcggcgatgccgttcgctgggcgcggctggcacttgccgataaccagattacgcatccacagcttttacaggaagcggcggcggtgccggcgggggcagaagggctgctgtttcttccctatctgacgggagaacgtctggccgaacacacgaactcgcgggcacagttttttggcctgcagcgcaagcatcgccgcggtcatttattccgcgccgttcttgaaggggtggcctttgcatnnnnnnnnnncctttgcatcctggcgcaatcttcggcagctgcagaagtgcgggcagtatccgcaacaaatgatcgcttccggcggcggcgcgcgcagctcgctgtggcttga

SEQ ID NO: 134631 - DNA, 318 bp, Enterobacter cloacae
atgatcgcttccggcggcggcgcgcgcagctcgctgtggcttgaaatcaaagccgcagcgtacaatctgccgatattatctacgcgtaatcaggagaatggcgtcaccggatgcggtattatcgccggggttggcgtagggttgtacgccgattttgccagcggcgtgcggcaaacggtgcagttcgacaaactgatctcaccggatccccgtctgcgggattattaccacgcctgctgcgagctttttgatacgctgtaccggcaatccgctgccttatacgacaggctggatgcgctcagcgtaggacccgactga

SEQ ID NO: 134632 - DNA, 774 bp, Enterobacter cloacae
atgtttgcagaagaaagacaggagaagttactcggtattctcagggaaaaacgcaaagttgctgtttctgagatgtgtgacgtctttaatgtatctggcgctaccattcgtgccgatctccgccagctggaagaggaggggttgctgacccgaacgcatggcggagccgttcttcgtacccgagcgagcttcgaacaagcatcggacgcccgcgaaattgtcaatctcagcgcgaaagaacggatcggccagcgcgcggcggcgctggttgaggatggcgatataatcgtgctggataccggtaccacgacgctacatatcgcgcgcaatattcgtgacagacagaacgtcacggtggttaccaatgattaccaaatcgcccgggagcttgaggccagtccctcgattcaaacgattctgctcggggggatcgttaagaagggataccactgcgtggtggcgatcaacggacgttccattctcgacacgctaaacgtcgataaagcatttatgggcaccaattcgctgtcgctgaaacacggcgcctgcgtggccgatatcatgctggcagaaacgaaacgcggcatggtggaacacgccagtcaggtaattattgtctgtgactacagcaagctgaataacacctcgcttgcccaatttaccgccgcagatcgaattgacacggtggtggtggatcgtctgcctgatgatgttcaggcgtatcgtaatgccggcattcaggtgatctcgctggatgaagaggagtatctttag

SEQ ID NO: 134633 - DNA, 240 bp, Enterobacter cloacae
atgcatgagtatttcagttacaactttcggccggtaatcactggcgataccaaacgctttgacattgatctggacgttctcaacgatagcgggcagatctgcttccttgatgttcagctgttcaagacgtgttggcgtaccaatttcttcaaaccacttctcaagcgcagcgatgccgtcgtggcagttaaaaaatggcttaaacctgaacgggttaaatttgctcgcggtgaaccctga

SEQ ID NO: 134634 - DNA, 735 bp, Enterobacter cloacae
  misc_feature (716)..(725): n is a, c, g, or t
atgaaaaagatacttattattgtacccgatggcggcatgctgtttgaatccgccggtattgctgacattctgatgcaggccaaccgcctgcacccggaaggcgcccgggaaatctgctaccaggtcaagctagcgacaactcaaccgcatcaggttatccatggtcagtcaggtttaaatctgctggccgaccatcgtctgcatgagattgaccctcgcgagcccctcgataccatcatgattaccggcagaggtcaaaacccgcaggaggggatggcggtggttgactggttgcgccttgccgctccccatgcccgccgcatagtctccatttgcggcggtgcgatgctgctggcgcaaaccggactgctggacggcagacgggccactacccactggaagctgctggaaaccatgcaggcggaattcccgcagatccgcgtcgagggcgggccgctctatattcaggacgaacatatctggacctctggcggggtcagttccggctttgatcttacgctggcgctggttgaagaagactatggcttcagcctggcgcgcgatatcgcccaggacttcgtcatgtatctgcgtcgcccgggaggccagctgcagtttagccgctataaccttcagcagaccgccacccagggcccgattaacgatctgctggcgtggttgctcgaaaacctcaccgccgacctcagcgtagatannnnnnnnnngcgtagataa

SEQ ID NO: 134635 - DNA, 246 bp, Enterobacter cloacae
atgagtccgcgaaatttcacccgcgtctttacccgggaaaccggcgcttcgccagcgcggtacgtcgcggaagcccgcctggccgccgcgcggcagcgtttggagcagactcacgagacgctggatcgtatcgccgagcaaacgggatttggcagcagtattaacctgcgacgcttgtttgagaaacagcttaacctcactccaggtgaatatcgtcaacgatttcactgtcgcaaaatggcgtaa

SEQ ID NO: 134636 - DNA, 1011 bp, Enterobacter cloacae
atggtaaaggtcggtattaacggttttggccggatcggacgcaatgtactgcgcgcagcactgaataatccggatattcaaattgtggcaatcaacgatttgacggacagcaaaacgctggcgcatctgctgaaatacgactcgcttctcggtaagctggatgcagaggtcaccgcgggtgaaggggggcttgttgttgatggtaaacccattaccgtattcagtgaacgcaacccggccagtattccgtggcgtcagtgtgaagtcgacatcgttattgaggctacaggattattcacggaccgtgaaaaggctgctgtacatatccacagcggtggcgccaagcgcgtgattatctccgccccgggtaaaaacgatgatttaaccattgtgatgggcgttaatgagagcctttactccccggataaacactacgtgatcagcaacggaagctgcaccaccaatggtcttgcacctgctgcacaggtcctgcaccagcatttcggtattaagcatggtctgatgaacaccacccatgcctacaccaacagccaggcgctgcacgatcagccggaaaaagatctgcgcggggctcgcgccgccgcattgtcgattgtgccttactccagcggcgcagcgaaggctctgggtaaagttattcctgagctggatgggcgtttaacgggatactcgctacgcgtccctgtgccagtggtgtccattgttgacctcaccgtcacgcttgagcgagatgtgacggttgaagaggtgaacaatgcttttcgcgaagccgccgcagcgggacctctgaaagggatcctgggttatagcgatgaaccgctcgtctccagcgattaccagggagacccacgctcgtcgattatcgacggtctatcaacgctggtgattggcggtaatatggtcaaaattctggcgtggtacgacaatgaatggggattctctaatcgtctcgttgatctggcattgatgatggcaaagcgtgaaagctaa

SEQ ID NO: 134637 - DNA, 375 bp, Enterobacter cloacae
atggtccgccgtggtggacgttcccagcgacgcaacggcatagttaatgtcgtactgcgccagcgcaacaacatccatatagccttcgacgaccagaagacgcggaggttccgcattatcctgctgtgcctcataaaggccgtaaagctggcggcccttatggaaaatatcggtttccggggagttaaggtatttcggcagggcatcacccagcacgcgaccaccaaaacctatcacccggccacgcttgtcgcggatcgggaacatcacccgttcacggaagcggtcgtagcttcgtccctggtcgttagtgaccagcatgcctgcgtcgatgagggatttacgatcttcgctattgccgccaaaacgctttaa

SEQ ID NO: 134638 - DNA, 804 bp, Enterobacter cloacae
atgcccggtggcgcttcgctgaccgggcctacaatcctgatgacgacaaccaccaccttctcctttacccatcgcccgcttgtgccgttttcgcatgattatgctcatggcgacagcgagccgtggcatcagcacgactgcgcgcagctcctgcacagcctcaccggcgtcgtgcgggtggataccgcatccggctgctgggtggtgccgcccggtcgcggcgtctggctacctgcgggtacgcagcacgccctgcgcatcaccggcaacgttgccgcccgcacgctgtttatcgacccgctggcgcgcgccgatcttccggcgacctgccagatcgtgcagatctcgcccctgctgcgcgagctgatcctgacctcccttacgcttcctgaatcttacgcacccggaagccgcgatgaacgtgtttatgagctgatcctcgatgaaattcgcctcatgtcggtactgccgtttcacctgcccgagccggaaagcgaagcgctgcgacacctctgccagcagattcgaatggccccgggagaaagctggagcagcgcccaggccgcaggtattgtggggatgagcgaacgcacgctgaatcgccattttcagcagcagacaggcctgagctacggcgagtgggtgagaagggcgcgactgctggaagccttggtgcggctggcgcagggccagccggtattacgcgtggcgctggatctggggtatggtagccacagcgcctttacggcaatgtttcgtcgggtgatgggtctctcacccagcgattacttcaggaatgactga

SEQ ID NO: 134639 - DNA, 315 bp, Enterobacter cloacae
gtgcgcggcctggctgtctgtcgaggaaatgtcttcaatgacgcgaccatagcggtctttacgcacgattcgctcgccaggctggccggtaagccacttgtcgaagcttttttcaacgccctcaatcccctggctatccacgttggtaaagccaatcaggtgtgcggtgacttcgccggaaggatagtaacggcgggattcttcccgcagatgaatgccgggcagcttcagtttcttaatgtaatcagccatatcagggttcacctgacgggcaagatagataaagcgccctttcgggttggcgttaacgcgtga

SEQ ID NO: 134640 - DNA, 756 bp, Enterobacter cloacae
atgaggctgccaggtgaggtagacgccgaggctgtccggcgaggagagacccggtcgttcgccaatcaggatcgccaccgcgcgggctttcagggtttcgccaatatcatcccccagcgccacccgcgactgatgcgccagcaccaccggcgccaggccgatacccagcgtccgcagatagggcagcagggcgcggatcaacggcaccgcctggcgctctaccgcccaggaagagaggccgtcgccgatcaccagcagcaggtcggcggggcggacgccgctggcggcgaggtcggcgcgactctcatcggcgagctgccgcccgagatccgggcgccgcagataggtatgacggtccggcgcggcgctgtgcaccgtcagggcctcgaggccgagcgccgccagcggcgccaccaattgttggctggcgaacggctgatgaatggcatcccgcgctctggcatgggccagaccaaagttgaggacttcgcgggtcggcagactggcgccgctgcgccccagggcgatccgcgcatcggtaaattcacgcagcgggttccaggcatcgggacggttcatacggaggctccttgcggcaggacggacagcagcggatggcgggcgtcggtgagccgcagcgcgccgtgcggatcgataatctgcatcttcgccagccagtcggcgaactccggggcatgctttaagcccagcagacgacgggcgtacagcgcgtcatggaacgaggtgctctggtaa

SEQ ID NO: 134641 - DNA, 1389 bp, Enterobacter cloacae
atgtataaaaccacgctatcgggccaggtatggcgctttgatagtctgaaaacgctgatggcgaaagcgtcgccggagcgggccggcgacgccctcgcaggggttatcgccacctcagccgaagagcggatggcggcgaaaatggccctcgccgaggtgccgctgaccgacattctcgacaacccgcttatcccttacgagcaggacgaagtgactcgcctgatcctcgacacccatgatgcgcagggctttgccgccctgcgtcacctgacggtcggcgattttcgcgactggctgctggatgatgctaccgataccgccacgctgcagcgggtcgcccgcgccatcaccccggagatggcggcggcggtcagtaagctgatgcgcaatcaggatctgatccttgccgccagcaaatgccaggtggtgacgcgctttcgcaacaccatcggcctgcccggccacctcagcgtacgcctgcagcccaaccatcctaccgacgacctgaaaggcatcgccgccagtatgctcgacgggctgctgtacggcgccggggacgcggtgatcggcatcaacccggccagcgacagcttaccggtgctggcgcagctgaacgtcatgctggacgatattattcagcgcttcgccatccctacccagtcctgcattctgacccatgtgaccaatacgctgcagctgattgagcgaggcgcgccggtggatctggtgttccagtcggtggccggtaccgaagcggccaacagcggcttcggcatcaatcttgccatgctgcaggaggcccgcgaggcggccctgagcctcaggcgcggtaccctcggcagcaatgtgatgtattttgagaccggccagggaagctgcctgtcggccaacgcccaccacggcgtcgatcagcaaacctgtgaggcgcgggcctacgccgtcgcccgccactttgaaccgctactggtcaataccgtggtcggttttatcggtccggagtatctctacgacggcaagcagattattcgcgccgggctggaggatcatttctgcggcaagctgatgggcctgccgatcggctgcgacgtctgctataccaaccacgcggaagcggatcaggatgatatggacaccctgctgaccttgctgtgcgccgccgggctcaccttcctgatcggcgtgcccggagcggacgatatcatgctcaattaccagagcacctcgttccatgacgcgctgtacgcccgtcgtctgctgggcttaaagcatgccccggagttcgccgactggctggcgaagatgcagattatcgatccgcacggcgcgctgcggctcaccgacgcccgccatccgctgctgtccgtcctgccgcaaggagcctccgtatga

SEQ ID NO: 134642 - DNA, 1380 bp, Enterobacter cloacae
atgacagagcacaccaccaccttaaaaagaacgctcggcagttttcgtttatgggggatcgccgtcggactggtgatatccggggagtacttcggctggagctacggctggtcacaggcgggcacgatggggtttatggtcgtcgccctggcggtcgccgccatgtactgcgcctttattttcagctttaccgagctgaccactgccatcccgcacgctggcggccctttcgcctatgcctaccgcgccttcgggcccaccggcggctttatcgctggttttgccaccctgattgaattcgtcttcgccccgccggccatcgccatggccatcggggcctacctcaacgtgcagtttccggcgctggatccgaaatgggtcgcctgcggcgcctacgtgatctttatgacgctcaatattctcggcgtcggcatcgccgccaccttcgagctgatcgtcaccctgctggccatcttcgagctgctggtgttcatgggcgtggtcgcccccggcttctcctggagccacttcaccactaacggctgggcgggcgcggacagcttcagcggcctggcgctgccggggatgttcgccgccattccgttcgccatctggttcttcctcgccattgagggggcctccatggcggccgaagaggccaaagatccgcagcgcaccattccccgcgccctgggcggcggcattctgacgctgacggtgctggcgatcggcgtgatggtcttcgccggcggcgtcggcgactggcgcgcgctgtccaatattaacgatccgctgccccaggcgatgaagacggtggtgggcaacggcagcggctggctgcatatgctggtgtggctggggctgtttggcctcgtcgcctccttccacggcatcattatgggctactcgcggcagatctactccctcgcccgcgccggctatctgcccgccgggctggcctccctcaaccgccgcacccgcaccccgcatctggcgatcctcgccgggggcgtggtggggatcgccgcgatcttctccgactcgctgatcaccatcagcggcatgccgctaaccgcctgcatcgtcaccatgtcggtatttggggctattgttatgtatatcacttccatggcggcgctgttcaaactgcgccgtagcgagccgaagctgatccgtccgttccgcgccccgctctacccgctggcgccggcctttgccctcggcatggcggtgctctgcctggtggcgatggtctggtataacctgctgctggcgctgattttcgcggcgatgatgctcggcggctacctgtggttccgcaaaaccgcagcggcccgtgaacgggcgccagtggatcctcaactgcgcacggtctcctga

SEQ ID NO: 134643 - DNA, 1410 bp, Enterobacter cloacae
atgcaaagcacaacacaacaacaaggtgggcagctgaagcgcaccatgaaaacgcgccatctgatcatgctgtcgctcggcggcgtgattggcaccggcttattcttcaataccggctatatcatctccaccaccggcgcggccgggacgctgctggcgtatctgattggcgccctggtggtctggctggtgatgcagtgccttggcgaactgtcggtggcgatgccagagaccggcgccttccacgtttacgcggcgcgctatcttggcccggcgacgggctataccgtggcgtggctctactggctaacgtggacggtggcgctggggtcgagcttcaccgcggcgggattctgcatacagtactggttcccgcaggtgccggtctggatctggtgcgtggtgttctgcgcagtgatcttcggtcttaacatcatttcgacgcgcttcttcgccgaaggcgagttctggttctcgctggtgaaagtgatcaccatcgtcgcgtttattattctcggcggcgcggccattttcggcatcattccgatgcaggatggctccccggcgccgggcctgcgcaatatcaccgccgaaggctggttcccgcacggcggcctgccgatcctgatgaccatggtggcggtgaacttcgccttctccgggacggagcttatcggcattgccgccggagagacggaaaacccgcataaggttattccagttgccatccgcaccaccatcgcccggctgattattttctttatcggcaccgtgtttgtgctggcggcgctgattccgatgcagcaggcgggagtggagaaaagccccttcgtgctggtgtttgagaaggtgggcatcccttatgcggcggacatgttcaacttcgtgatcctgacggcgatcctgtcggcggctaactccggcctgtacgcttcggggcggatgctctggtcgctatcgaacgagaagacgctgccggcctgctttgccaaagtcaataaacggggcgtgccggtgaccgccctgtcggtgagtatgctgggcggcgtgctggcgctgttctccagcgtggtggcgccagatacggtgtttgtcgcgctgtcggcgatctccggttttgcggtggtggcggtgtggttgagcatctgcgcctcgcactttatgttccgccgccgccatctgcagcagggtaaggcgctgagcgatctgcagtatcgcgctccctggtatccggtagtgcccgttctgggctttgtgctgtgcctggtggcctgcgtgggcctcgcttttgacccgagccagagaattgcgctgtggtgcgggatcccctttgtggccctgtgctatggtgcctggtatcttactcgttcacggaatatgactcaggagccccaacatgtcgcagactaa

SEQ ID NO: 134644 - DNA, 933 bp, Enterobacter cloacae
atgtcgcagactaatccgtttaccgccctgcttgccgcccagcctttcgtgctgctggacggcgccatggccaccgagctggaggcccgcggctgcgatctggccgacagcctgtggtcggcgaaagtgctgctggagaacccgcagctgatccgcgatgtgcatctcgactactttcgcgccggggcgcaggtggcgatcaccgccagctatcaggccactccggcgggctttgccgcgcgcgggctggatgaggcgcagtcccgggcgctaatcgacaaaagcgtcgagctggcgcgcaaagcgcgcgaggcgtacctcgccgagaacccgcaggccggtacgctgctggtggccggttcggtggggccgtatggcgcgtttctcgccgacggctcggagtatcgcggcgattatcagcgcagcgcggcagagttccaggccttccaccgcccgcgcgtcgaagcgctgctggatgccggcgccgacctgctggcctgtgaaaccctgccgtcattcgctgagatccaggccctggcggccctgctgcaggagtatccccgcgcccgcacctggtactccttcacgctgcgcgacgccgaacatctcagcgacggcacgccgttgcgcgaggtgatggccgccctggcggataacccgcaggtggtggcggtggggatcaactgtatcgccctggaaaatacgcccgcggcgctggcgcatctgcacagcctgacggccctgccgctggtggtctatcctaactccggcgaacattatgatgcggtgagcaagacctggcaccatcatggcgaagcctgcgccagcctggcggattatctgccgcagtggctggcggccggggcgaagctgatcggcggctgctgccgcaccacgccgaaggacatcgccgcgcttaacgcgaagcgctaa

SEQ ID NO: 134645 - DNA, 963 bp, Enterobacter cloacae
atggcattcacatcgcgaattactcttctggcggcgctggctgtcgccgccttccaggcgcaggcggtcaatgtgaccgtggcgtatcaaacctccgctgagccggcgaaagtcgcccaggcggacaacaccttcgccaaaaccagcggggcgaccgtcgactggcggaaatttgacagcggcgccagcgtggtacgcgccctggcctccggcgatgtgcagatcggtaatattggctccagcccgttggcggtggccgccagccagcaggtgccgattgaagtgttcctgcttgcctcaaagctcggcaactccgaagcgctggtggtgaagaaaagcattaccaaaccggaagatctgatcggcaagcgcatcgccgtgccgtttatctccaccacccactacagcctgctgtcggcgctcaaacactggggcatcaagccgggccaggtacagattattaacctgcagccgccggcgattatcgccgcctggcagcgcggggatatcgatggcgcttacgtctgggcgccagcggttaacgaactggaaaaagagggcaaggtgctgaccgattcttctcaggttggggagtggggcgcgccgacccttgacgtctgggtggtccgtaaggacttcgccgagcagcatccggagatcgtcaaagcgtttgctaaaagcgccatcgacgcccagcagccctacatcgccaacccggaggcatggctaaaacagccggacaacatcagcaagctggcgcgcctgagcggcgtgccggaagccgatgtccccgggctggtgaagggcaatacctatctcaccgccgctgagcaggcgcaggcgctgaacgggccggtcaatcaggccatcgtcgataccgcgcgcttcctgaaagagcagggcaaagtgcctgcggcgggaaccgattatcgtcagtacgttactgaccgctttgtgaagtaa

SEQ ID NO: 134646 - DNA, 768 bp, Enterobacter cloacae
atgctgcaaatctcgcatctttccgctgactacggcggtaaaccggcgctggcggatatcaacctgacgctggagagtggggagctgttggtggtgctggggccttcgggctgcggtaaaactaccctgctgaacctgattgccggattcgtgccctatcagcacggcagcatcaccctcgaaggtcagcgggtgaccgggccgggcgcagagcgcggggtggtcttccagaatgaaggtctgctgccgtggcgcaatgtgcaggataacgtggcgctgggcctccagctggcgggcgtggataaagcgcggcgccggcaagcggcggcgcagatgctgaagaaggtggggctcgaaggggcggaaaagcgttttatctggcagctgtccggcggtcaacgccagcgggtgggcatcgcccgggcgctggcggcgaatccgcagctgttgctgctggacgagcccttcggcgcgcttgacgcctttacccgcgagcagatgcagacgctgctgctgaaactgtggcatgagaccggcaaacaggtgctgctgatcacccatgatattgaagaggccatttttatggcgaccgagctggtgctgctgtcgccggggccgggacgagtggtggagaggctgccgcttgatttcagccgtcgctttgtcgcgggcgaatcctgccgcagcatcaaatccgacccgcgctttattgaacagcgggaatacattctgagccgggtgtttgatcaacgggaggctttctcatga

SEQ ID NO: 134647 - DNA, 828 bp, Enterobacter cloacae
atgagcgtggtactgaacgacaaaccgcgtcagtcgacgctgaagtggcgctggcagctctcccgccagctcaccctcagcgtggcgaccctggcggtattgctggccgtctggtgggcggtcgcggcgctgcagctgattagcccgctgtttctgccgccgccgggccaggtgctgcagaagcttatcaccatcgccgggccacagggctttatggaggcgacgctctggcagcacctggcggcgagcctgacgcggatcgttatcgccctgctggcggcagtgcttattggcgtaccggtggggatcgccatggggctcaactcgacggtgcgcgggatcctcgacccgctgatcgaactctatcgtccggtaccgccgctggcctacttaccgctgatggtgatctggtttggcatcggtgaaacctcgaagatcctgctgatctacctggcgattttcgcgccggtagccatgtcggcgctggcaggggtaaaaagcgcgcagcaggtgcggattcgcgccgcccgttcgctgggcgccagccgggcgcaggtgctgtggctggtgatcctgcccggcgcgctgccggagatcctcaccgggctgcgcattggtctcggggtgggctggtcaacgctggtggctgcagagctgatcgccgccacccgcggattaggatttatggtgcagtctgccggcgagtttctcgccaccgatgtggtgctggcggggatcgcggtgattgccattatcgcctttttactggaactgggtctgcgcgcgctgcagcggcgcctgacgccctggcatggagaagtacaatga

SEQ ID NO: 134648 - DNA, 852 bp, Enterobacter cloacae
atgagtgaacgtctgagcattaccccgctggggccgtatattggcgcgcaggtgagcggggcggatttaacccgtccgctgagcgacaaccagtttgaacagctgtatcacgcggtgctgcgtcatcaggtggtattcctgcgcgagcagaatatcaccccggcgcaacagcgcgacctggcgctgcgttttggcgacctgcatatccatccggtctaccctcacgccccaggggtggaggagattatcgtcctcgatacccacaacgataatccgccggataatgacaactggcataccgatgtcacctttatcgacacgccgcccgccggcgccattctggcggcgaaagagctgccgacgaccggcggggacaccctgtggaccagcggcatcgccgcctgggaagcgctgtcagaacccttccggcagctgctgagcggcctgcatgccgaacacgatttccgcaaatcgttccaggagtataagtacaacaagaccgaagccgagcatcggcgctggcaggaagcggtggcgaagcatccgccgctgctgcacccggtggtgcgtacccacccggtgaccggcaagcaggcgctgttcgttaatgaaggctttaccacgcgaattgtcgaggtgagtgagaaagagagcgcagcgctgctgaacttcctgtttgctcatgtcactaaaccggagtttcaggtgcgctggcgctggcagccgaacgatgtcgctatctgggataaccgggtgacgcagcattacgccaacgccgactatctgccgcagcggcggatcatgcaccgggcgacgatcctcggcgataagccgtattaccgggcggggtaa

SEQ ID NO: 134649 - DNA, 1719 bp, Enterobacter cloacae
atgtttagtctcgacaacgtactcgatgacctgtggcctcaggcgaggcccgccccctggcaaaagaaactgttaaaaaagctattttatgaggaagagtttcaacaatttgccgaccgtcaccgccacctgaaggggcttgatacggtcgaacaggtgctggaatacctcaatatccgctgcgccatcccggcgcacgatctcgaacaaatccccgaatatggcccgctggtcattatcgccaaccaccccaccggcaccctcgacggcctggcgctcctgtatgcggtatcccgcgtgcgccgcgatgtcaaagtggtcaccaaccgcatgctcacccaccttgagcccctgagctcgctgtttatcccggtagataatattcatggccgcaccgctaaagcggcgctgcagcagatggaccagcagctgcaggccggcggggtgctgatcttcttcccggcgggggaagtctcccgcctcacccgtcgcggcatccgcgataaaaaatggcactccggctttattaagctggcggcaaaatatcgcgccccgctgctgccggcgtggattgacgcccgcaacagcgccctgttttacgccagtacgctggtctccgacaacctgccgctgctcctgctgatgcagcagatgtttcgccggcgcaacagcagcctgccggtgcgcatcggccagcagatcccctggtcgagctggttcgatgcccagtccagcgctcgcgagcttaccggccgctgctatcagcaccttgaacagctgcgcaaagggctgccggggcggtttaaaaccgaaagcgccatcgcccgtccggaagaccgggcgctgctcaaacgcgaactgcacaaggccgaatgcctgggccgcaccgccgatggcaaagtgatttacctctggcagcgcaacggccaggaggacgcgccgctgctgcgcgagctgggacgtctgcgggaaatcgccttccgcgcggtcggggaaggcagcggcaaacggcgggatatcgacgggtatgacgacgactatctgcatctgatcctgtgggatgaagaagacctcgagatcgtcggcgcttaccgctttatgccgacggccatccagctggcaaagcgcggcctggaggggatctacagttacagtctgttccattacgacgggcggatggacgatgtcctgcagcacggcattgagctggggcgcagctttatccagccgcgctactgggggcgtcgcgggctggactacctgtggtccggcatcggcgcttatctggcgcgctatccgcactatcgctatctgtttggtccggtgtcgatttctggcgggttgccgcccgccgcccgcgatctgctggtggcgttctaccggatgtggttcccggcgacgcatccgctggcggagtcgcgtcgaccttatccggcgtcgctgcccgacgtgctggcgcagtttggcggggaggattacaacgacgacctggcccggctgaagtctctgctcggcaatctcggctgcgcgatccccccgctgtataagcagtattcggaagtgtgcgagccgggcggcgtgcagtttatcgatttcggcagcgatccggatttcaacaactgcgtggatggtctggtgctggtggatctcacctacctgaaggccaatcgctaccagcgctatattggcgcgcatctgggtgcgcaaaaatcggcataa

SEQ ID NO: 134650 - DNA, 975 bp, Enterobacter cloacae
atgacagatttaatcactcgcccccgccgcctgcgtcaatccgctgcgctgcgcgccctgtttgaagagacaacactgagtttgaacgacctggtgttgccgatctttgttgaagaagaaattgatgattacaaagcgatagaggccatgcccggcgtgatgcgcattccggaaaaatatctggcgcgcgagatcgaacgcatcgccaacgccgggatccgctcggtgatgacctttggtatttctcatcacaccgatgccaccggcagcgatacctggaatgaaaatggtctggtggcgcgtatgtcgcggatttgtaagtccacggtgccggagatgatcgtcatgtccgatacctgcttctgcgaatatacctcccacggccactgcggcgtgctgtgcgaccacggggtggataacgacgcgaccctggaaaacctcggcaaacaggccgttgtcgccgccgccgcgggggcggatttcatcgctccttccgccgcgatggacggacaggtgcaggcgattcgccgctcgctggacgccgccggcttcaccaatacggcgatcatgtcctactcgaccaagttcgcttcttccttctacggtccgttccgcgaagcggccggtaccgcgctgaagggcgatcggaaaacctatcagatgagcccgatgaaccgccgggaggccattcgcgagtcgctgctcgatgaagcccagggcgccgactgcctgatggtgaaaccggctggcgcctacctggatattctgcgcgatatccgcgaacgcagcgatctgccgctcggcgcctatcaggtcagcggtgagtacgcgatgatcaaattcgctgcccaggcgggcgctatcgatgaagagaaagtggttctggaaagcctcggcgctatcaaacgcgcaggcgccgacctgatcttcagctatttcgccctcgatctggccgagaaaaagatcctccgttaa

SEQ ID NO: 134651 - DNA, 1161 bp, Enterobacter cloacae
ttgaaacgtagtttgctcatttttgctgcgctgtgcgcggcgtcgtggacctcggtgcaggccgcacagcctaccgttgacccggttttcgcctcggatgtggtcgatcgttacgccaatcatatctactacggcagcggcgccaccggcatggcgctggtggttatcgatggcaatcagcgtgtttttcgcagctttggcgaaacccgcccggggaataatcagcacccgcagctcgactcggtgatccgtatcgcctccctcagcaaactgatgaccagcgagatgctggtgaagctgctcgaccagggggtggtgaaactcaacgatccgctgagtaaatacgccccgccgggcgcccgggtgcctgactggcagggaaaaccaatcaccctggttaacctcgcgacccataccagcgccctgccgcgcgagcagcctggcggcgccgctcatcgtccggtgtttgtctggccgacccgccagcagcgctggaactggctctctaccgcgaccctgaagaccgcgccgggctcgcaggccgcctactccaatctggccttcgatttactggcggacgcgctctccaccgccgccggcaaaccgtatccgcaactgtttgaagaacagatcacccggccgctggggatgaaggacaccacctttaccccgtcaccggatcagtgccagcggctgatgatcccggaaaaaggcgccagcccatgcaacaacaccctggcggcgatcggcagcggcggagtctactcgacgccgggggatatgatgcgctggatgcagcagttcctgtcatccgatttctatacccgcagccagcaggccgaccggatgcagacgctgatttatcagcgtaaccagctgacccgggtgattggtatggacgtgccgggccgcgcagacgcgctgggcctcggctgggtgtatatgaagccgaagaacggccatccggggattattcagaaaaccggcggcggcggcgggtttatcacctatatggcgatgaatccgcaggctaacgttggcgcctttgtagtggtaacccgctcgccgttaacccgcttcaacaatatgagcgatggcatcaacgacctggtcagcgagctgagcggcgcacagcccaacatgcagacggccagccagtaa

SEQ ID NO: 134652 - DNA, 534 bp, Enterobacter cloacae
atgacggctcaacgggtagtgatggtcgtggatatgcaaaacggcgtgttcgccacgccgcgtctggcgcgcgagcgctgcgtcgcgcaaattaatcgtctggtgcgcgcggcggacaaggttattttcattcagcatgatgaagccggcggcctcgaagccggcagcgaaggcttcgccctgcttcctgagctggagcagccggctggcgcgctgtatgtcaccaaaaccgcctgcgatgccttctatcacacctcgctggcgcaggtgctggacgaacacgacattcagcagttcgtcatctgcggctgcgccaccgactactgcctcgataccaccattaaaaatggcgccagccgcgggtacggtattgttattgcggaagatgcccacaccaccgccgaccgccccgccgcgcaggccgcgacgcttatcgcccactacaatgaggtgtggcgtacgctgaccattcctggcaatcctttacaggtgaaacccacagaaacaattctgcacgcatggcagcagaactaa

SEQ ID NO: 134653 - DNA, 1221 bp, Enterobacter cloacae
atgtttaaatcttttttccccaaaccggggccgttttttatttctgcctttatctggtcgctgctggccgtgatcttttggcaggcgggcggcggcgactggctgctgcgggtcaccggggcatcgcaaaatgtggcgatcagcgcggcgcgcttctggtcgctcaactatctggtgttctacgcttactatctgttttgcgtcggcgtgttcgcgctgttctggtttgtctactgcccgcaccgctggcagtactggtcgattctcggcacctcgctcatcatcttcgtcacctggtttctggtggaagtcggggtggcgatcaacgcctggtatgcgccgttctacgacctgatccagagcgcgctggccaccccgcataaggtcagcatcaatcagttttatcaggaaatcggcgtctttctcggcatcgcgatcatcgcggtgattattggcgtgatgaacaacttcttcgtcagccactacgtcttccgctggcgcacggcgatgaacgagcactatatggcccactggcagcatctgcgccatatcgaaggcgccgcgcagcgtgtgcaggaagataccatgcgttttgcttccaccctcgaagatatgggcgtgagctttatcaacgcggtgatgaccctgatcgccttcctgccggtgctggtgacgctctccgaacatgttcccgacctgcctatcgtcggccatctgccgtatggcctggtgattgccgctatcgtctggtcgctgatgggtaccggcctgctggcggtggtggggattaagctgccgggcctggagtttaaaaaccagcgtgtggaagcggcctatcgtaaagagctggtttatggcgaggacgatgaaactcgcgccacgccgccgacggtgcgcgagctattccgcgcggtgcgtcgcaactatttccgtctctatttccactatatgtatttcaatatcgcccgcatcctctatctgcaggtggataacgttttcggccttttcctgctgtttccgtcgatcgttgccggtacgattaccctcgggctgatgacgcaaattactaacgtcttcggccaggtgcgcggctcgttccagtacctgatcagctcgtggacaacgctggtggaactgatgtccatctacaaacgtctgcgcagttttgaacgcgagctggacggcaaaccgctgcaggaagcgatcccgacattacgttaa

SEQ ID NO: 134654 - DNA, 1029 bp, Enterobacter cloacae
atggccgcacgtttatcgcgcattattcccgtttcattgacgctgctggcggccatggcgctgagcgcctgtaccagccagcaggctccggcgctgaaagagggcgagaagcctgttgacgtggcgtcggtggtgcggcagaaaatgccggctagcgtcaaggatcgggaggcctgggcgcaagccatcgccaccgcgtttgacagccagaagctggcgccgacggaagaaaacgtctgctcggtgctggcggtcgcgcagcaagagtctaactatcagtccgatccggtggtgccggggctgaataacacctcgccaaacggtaaaagctatagcgaccgtctggacaatgtgaagacggaaaagcagttgagcgccatttttgatgactttatcgggatggtgccgatggggcagaagctgttcggttcccttaacccggtgcacaccggggggccgatgcaggtcagcattgcttttgccgagcagcacacctccggctacccgtggaaaatgaacggcacggtgcgccaggaggtcttcagtctgcgcggtggcctgtggtttggcacctatcatctgctgaactatccggccagttatagtgcgccattgtaccgctttgccgacttcaacgccggctggtacgccagccgtaacgccgccttccagaacgcggtggtgaaagccagcggggtaaaactggcgctcgacggcgaccttatccgctacgacagcgaggagccgggcagcaccgagctggcggtgcgtcgcctggcgagccagctggggatgagcgacagcgagatccatcgtcagttgaaaaagggcgacagcctggcgtttgagaagaccgatctctatcagcaggttttccgtctcgccgagaaaaagacgggcaaaaccctgccgcgggagatgttgccagggatccagctggagagtccaaaaatcacccgaaatctgacgacggcgtggtttgcgaaacgggttgatgagcggcgggcaaactgtatggcgcggcgttaa

SEQ ID NO: 134655 - DNA, 303 bp, Enterobacter cloacae
atggctgaattcagtttttcaaaatcgcttttgggaaataaaaaaaggggcgcgctgaccggcagccatgtcgcctacgggctgttcgtgttgatttgctgctgggccggcgcgcagatgctcagcatgctgatccacgcccccggggtatttgaacgcctgatgcaagcccaggacgccagccgtccgcaagtcgacatcagcctcgccgtgggtaccctctttggtctgatccctttcctgatcggctgcatgttcatcggggtactggcgcttatcgtgcgctggcgtcagcgccgttaa

SEQ ID NO: 134656 - DNA, 204 bp, Enterobacter cloacae
atgaagctcactgataaaattcgccgcgattggcactactacgccgtggcgctggggttgatttttattcttaatggcgtggtggggctgctggggtttgaaactcaggggtggcaatcctacgccgtcggtctgatcacctgggtcattagcttctggattgcgggctttgtgatccgccgccgcccggcagaagaggcctga

SEQ ID NO: 134657 - DNA, 1098 bp, Enterobacter cloacae
atggcaaagatgagggttgggatcgtttttggcggcaagtcggcggagcatgaagtgtcgctgcagtcagcgaagaatatcgtggaagcgattgataaatcgcgcttcgatgtggttctgttgggtattgataaacaggggctgtggcacatcaacgacgccggcaactacctgctcaacgcacaggatcctgcccgcattgccctgcgcccttccacggtgactctggcgcagatcccgggccgcgaagcgcagcagctgattaacgccgaaagcggccaaccgctggcggccatcgatgtgattttcccgatcgtccacggcacgctgggtgaagatggctccctgcaggggatgctgcgcatggcgaatctgccgttcgtcggctccgatgtgctgggctctgcggcctgtatggacaaagacgtgaccaaacgtctgctgcgcgacgccgggctcgccgtcgccccgtttatcacactcacccgcgccaaccgcgcgcagttcagctttgccaatgtcgaagcgaagcttggcctgccgctgttcgttaagccggctaatcagggctcgtcggttggcgtcagcaaagttaaaaacgaagagcagtaccatcaggcggtggccctggccttcgaatttgaccataaagtggtggtggagcaaggcattaaagggcgggaaattgagtgtgcggtgctgggtaacgaccacccgcaggccagcacctgcggtgaaatcgtcctcaacagcgagttttacgcctacgacaccaagtatatcgacgatcagggcgcgcaggtggtagtcccggccgctatcgcccctgagatcaacgacaaaattcgcgctatcgcggtgcaggcctaccagaccctgggctgcagcggcatggctcgtgtcgacgtgttcctcaccgccgacaacgaggtggtgatcaacgagatcaacaccctgccgggctttaccaacatcagcatgtatccgaagctgtggcaggccagcggtctcgactacaccagcctgatcacccgcctgattgagctggcgctggagcgccatgccgcggaccgggcgctgaaaacctccatgaactaa

SEQ ID NO: 134658 - DNA, 684 bp, Enterobacter cloacae
gtgagaggaaagacgctgctggtgctggccgggctgctcggcgcgggcctgttgggataccacaatctgccgccgcacctgaatccgctggcgccgctggcgctggacgatcccccgggctggctgacgtcgtttaagctgcgcaggctgacggcagaccagtgcgcttccctgctggcggaagccaatcgccggcggcttatcgccagccggccggtggccgacagcgagggaagctgccctctgcgtaacgtggtgcgggtggcgaattttggctcggtgcagttgagcagtagttttctcgccagctgcccgctggcgctgagcagcgcgctgtacatcgagcagcaggcgaagccgctgacccggcagctgatggcgagcgatctgcgtcagatcgatcatctcggcagctttgcctgccgcaatatttaccatcgtcaacaggcgcggcgcagtgaacacgccacggcggacgcgctggacgtcagcggtttccgtctggcggacggtagacgcgttagcgtcctgcagggctggcggagcgagacttcgcgcccctggctggcggcgctgttgagcagcagttgccattacttcggtaacgcgctggggccagagtacaacgcggctcacgccaaccattttcatttcggcatgcgcgggcagggcttctgcttttga

SEQ ID NO: 134659 - DNA, 1200 bp, Enterobacter cloacae
atggaatcctggaaggttaatctcatctccgtctggtttggttgcttttttaccggcctggcgatcagtcaaattctcccctttttacccctctacgtctcccagctcggcgtcacctcgcatgaagcgctatcgatgtggtcggggctgaccttcagcgtcacttttcttgtctcggcgatcgtctcgccaatgtggggaagcctggcggaccgtaaaggccgcaagctcatgctgctgcgcgcctcgttggggatggcgattgccattttactgcaggccttcgccaccaacgtctggcagctgtttatcctgcgggcgatcatgggcttaacctccggttatattcccaacgccatggcgctggtggcctcccaggtgccgcgcgagcgcagcggctgggcgctaagcacgctgtcgacggcgcaaattagcggggtgatcggcggtccgctgctgggcggtttcctggcggaccacgtcgggctgcggatggtcttttttattacggcgatcctgctgaccatcagttttctggtgaccctgtttctgattaaagagggcgttcgcccgcaggtcagcaaaagcgagcgtctcaccgggaaacaagtctttgcctctttgccctatccggggctggtgatcagcctgttcttcaccaccctggtgatccaattgtgcaacggctcaatcggcccgattctggcgctgtttattaagtcgatggcgccggacagcaacaatatcgcttttctggccgggatgatcgccgcggtgcccggcgtgtcggcactgatttctgcgccacggttgggtaagcttggcgaccgcatcggcacctcgcggatcctgctggcgacgctctgctgcgcggtggtgatgttcttcgccatgtcctttgtcaccaccccgctgcaattgggtacgctgcgttttctgctcggctttgccgatggcgcgatgctcccggcggtgcagaccttattgctgaagtacagcagcgacagcgtcaccgggcgtatctttggctataaccagtcgtttatgtatctgggcaacgtcgccgggccgctaattggcgcctctgtgtcagccatggccggcttccgctgggtgtttattgccaccgccattatcgttttcattaacctctggcaactggcgtggatgctgcgtcaaacccgccgggctaacgcctga

SEQ ID NO: 134660 - DNA, 261 bp, Enterobacter cloacae
atgaagaatctcattgctgagttactggttaaactggcgcaaaaggaagaagaagcaaaggaactgacggtgcaggttgaagcgctggagatcgtggtcaccgcattattgcgccatatggagcatgatgcccagcaggcattgattcaggatattgaacaggcgattgaccaggtgacgccctgtccgccggtcaacgaccatgatgcgatgctgctgcagcaatatctaaagaagctgttgcggcatcctcgtagctag

SEQ ID NO: 134661 - DNA, 1416 bp, Enterobacter cloacae
gtgaaattaagcgccctgtttattgccctgattcctctactgggctcgccggttattcatgcagaaactactgctgcgccggttctggaaaatcgcgctgcgcaaggagatatcaccactcctggcggcgcgcgtcgtttaacaggcgatcaaaccgaagcgctgcgcgcctcgctaatcaataagccagctaaaaacgttattctgctgattggcgatggcatgggtgattcggaaattaccgctgcgcgaaactatgccgagggggcgggcggtttctttaaaggaattgatgctctgccgttaaccgggcagtacacgcattattcgctggataaaaaaaccgggaaaccggactacgtgaccgactcggcggcctccgccaccgcctggaccaccggcgtgaagacttataacggcgcgctgggcgtcgatattcatgagaatgcgcatcagaccatccttgagctggcgaaagcggcggggctggccaccggcaacgtttccaccgccgagctgcaggacgccacccccgcggcgttggtagcgcatgtgacatcgcgtaaatgctacggcccgacggttaccagcgaaaaatgccctagcaatgcgctggaaaaagggggcaaaggctccattaccgaacagctgctgaacgcccgaccggatgtcaccctgggcggcggcgcgaagacctttgccgaaacggcgacggcgggcgagtggcagggcaaaaccctgcgcgagcaggcgcaagcgcgcggctaccagattgtgaccgacgcggcttctcttgccgccgcgacggaagccagtcaggataaaccgctgctgggactctttgccgatggcaatatgccggtacgctgggaagggccgaaggcgtcttatcacggtaatatcgataagccgccggtgacctgtacgccaaacccgaagcgtgacgcctcggtgccgacgctggcgcagatgaccgagaaagcgattgacctgctgagtcgcaacgagaaaggtttcttcctgcaagtcgaaggcgcatccatcgataagcaggaccatgcggccaatccgtgcggccagatcggcgaaacggttgatcttgacgaagcggtgcagaaggcgctggaattcgcgcgaaaagacggtaataccctggtgatcgtcaccgccgaccatgcgcatgccagccagatcatcccggcggatagcaaagccccggggctgacccaggctctgaacacgcacgatggcgcggtgatggtgatgagctacggcaactctgaggaagagtcgatggagcacaccggcacccaactgcgcattgcggcctacggtccgcatgcggctaacgtcgtcggcctgaccgatcagaccgacctgttcacgaccatgaaagctgccctgagtctcaaataa

SEQ ID NO: 134662 - DNA, 318 bp, Enterobacter cloacae
atgaaaataactttattgatgaccctactgtttggcttgatctttatcagcgcggttggcgcggcagaaaaaacgcccactcctcagcagcaaaggatgacggactgcaatcagcaagcgtcagccaaaatgctgaaaggtgaggagcgcaaaacctttatgagccagtgtctgaaaaaagagaccacgacctcgcagggaaaggcgctcacccctcagcagcagaaaatgagcgactgcagcaaagcggccacggcgaaatcactgaagggcgatgaacgcagtaccttcatgagtagctgcctgaagaaagcctga

SEQ ID NO: 134663 - DNA, 810 bp, Enterobacter cloacae
atggataagaaaattggctttatcggctgcggcaatatgggtaaggccattctgggcgggctgatcgccagcggtcaggtacagccgggacaaatctgggtctacaccccgtcgccggacaaggttgcagctctgcgcgaccagtatggcatcaacgccgccagcagcgcccaggaagtggcacagattgccgatatcgtcttcggcgcggttaaaccggggatcatgaccaaagtgctgggcgatatcgcctccagcctgaataaagagtcgctggtggtctctatcgccgccggcgttacgcttgagcagctggcgcgcgcccttggccacgatcgcaaaatcattcgcgcgatgccgaatacgccgtcgctggttaacgccggtatgacctccgtcacgcctaacgccctggtgagcagcgaagatgttgccgaagtgctgactattttccgttgctttggccaggcggagcaaattgccgagccgatgatccatccggtggtgggggtaagcggttcggcgccggcctatgtctttatgtttatcgaagcgatggccgatgccgccgtcctcggcggaatgccgcgcgctcaggcctataaattcgccgcccaggcggtgatgggctccgccaaaatggtgctggagagcggagaacacccaggggcgctgaaagatatggtctgttcccctggcgggaccaccatcgaagccgtgcgcgtgctggaagagaaagggttccgctcggcggtaatcgaagccatcacccagtgtatggaaaaatcagagaaactgagccgctcctga

SEQ ID NO: 134664 - DNA, 459 bp, Enterobacter cloacae
atggccatttgggtggatgcggacgcgtgtccgaacgtgattaaagagattttgttccgcgcggcagagcggacccagactccgctgacgctggtggcgaaccagccgctgcgcgtgccgccgtcgcgtttcatccgcaccctgcgggttgagcagggttttgacgtggcggataacgaaatcgtccgccagtgcgcggcgggagatttagtgatcaccgccgacatcccgctggcggcagaggtgctggcgaagggcggggcagcgctgaacccgcgcggggaacgttacagcgaggcgacgatccgcgagcggctgacgatgcgggattttatggagacattacgggccagcggcgttcagaccggcggcccggatagtttatcgcagcgcgatcggcaacagtttgccgccgagctggagaagtggttgctggcggttaagcgtcgccagggttaa

SEQ ID NO: 134665 - DNA, 711 bp, Enterobacter cloacae
atgcaatctgaagaacaacgccttattgatggactgttttcccggctgaaagaggctgaggcgcacagcgcatcgcgcgatgccagcgccgaggagcggattgcccaacacgtgagcgcgcagccggcggccccctactatatggcgcaaaccattcttatccaggaagccgcgattaaacagcttaacgatcgcatccaggcgctggagagtcaggtcagccaactgcaggcggcaaagcccagcagcggcggcttcctctccggcctgtttggcggtggcggctcgtcacgcggttctgaccctatcccgggcgcggagcaatatggtcgcccgcaggccagcgctcagccgcagtatacgccaccaccgcagcagaactatgccccgcaggctgccgcacgcggcggcggctttatggcgggcgcgctgcaaacggccgctggcgtggccggcggcgtggtgctgggcaatatgctgaccaatatgttcagcggctcgcacccgcaggagatagtcaatatcatcgaagagaagccgcagcctgatgccgcctccgcgcaggacagcatcgcgcaggacaccaccgcaggtgacgatccgttccgccagggagacgatcagttccttgccgacaatacctggaacgacgacttcgacgccggctttggcgacgatgattttggcagcgatgacgatagctgggtttaa

SEQ ID NO: 134666 - DNA, 534 bp, Enterobacter cloacae
atgacacaacctatctttcttattgggccacgcggctgcggtaaaaccaccgtcggccatgcgctggcgcgagcgcggcattttcagttctccgataccgatcatcggctacaggcccatgagcagcggacggtggctgagatcgtgcaggcggaagggtgggcgcgttttcgcgaactggagaccctgtcgctgaaggccgtgaccctgccgaatacggtaatcgccaccggcggcggcattgtgctggcggaaggtaaccgtcagtttatgcgggagaatggcgtggtgatttatctgcaggcctcggtgtcggcgctgattgaccgtctggaagcctacccgaaagctgaacagcggccgacgctgaccggaaaaccggtgcgcgaggaagtgggcgaggtgctggcgcagcgcgaagcgttataccgggacgctgcccaccatattgtggatgccacggcctcgccggatcgggtggtggagcagattatgtccatgctatgcagcgcgacggcaaccccggtaagttaa

SEQ ID NO: 134667 - DNA, 192 bp, Enterobacter cloacae
atgccaaacaggcccccatatccgagagaagcgcgcgtggttgcggtagagaaaggtcctcagggtcagacggtgacctggtatcagctccgtgcggattatcctgagcctgattcgcttatcagcgaacatcctaccgagcaggaagccgtggatgccaaacggcgttatgaagatcctgacaagtcgtaa

SEQ ID NO: 134668 - DNA, 666 bp, Enterobacter cloacae
atggcaattttgaccatcggcgttgtgccgctggcgggagtattgccgctcctgaccgaacatatcagggaagaacagatcgcccacatcagcctgctgggcgagatgacgcctgacgaggtaatggccgagtacgccgtaggtgacggcgagaaaggactcctgaccttgctcagtaataaccagttggtgatggtgtcgcgacagaaaattgaacgcgatgtccgcagcgcgatcgcgatgctggatcgacaacattatgatgtgatcctgctgctcagttccgaacagctgaccggttttaccacccaccacgcgatcctcctcgagccgcagcggatcatcccgccgctggtggcatcgatcgtcgatgggcaccaggtaggggtgatcgtgccggtggaagagatcatgcccatgcagcggcaaaagtggctctcgctggaaaagtcgccatactacgcgctggccaatccgtttaccggcagcgacagcgagctattaaccgccggcaaaacgctgctggagcagggcgccgacgtgctggtcctcgactgtctcggttactatcagcatcatcgcgatgtgttacaaaaagccctcgatgttccggttttgctgtcgaatgtgctggtttcccgactggcggcagaactattggtctaa

SEQ ID NO: 134669 - DNA, 285 bp, Enterobacter cloacae
atgcttcaaagcaatgaatactttgacggaaaagtgaaatccattggcttcaccagcagcagtaccggtcgcgccagcgtaggcgtgatggcggaaggggaatacacctttggtacggcgcagccggaagagatgacggtagtcagcggggcgctgaatgtcctgctgccgggtgagactgagtggaaagtttacgctgccggcgaagttttcaatgtgccaggcaacagtgaatttcatctgcaggtggctgagccaacctcttatctgtgccgctatctgtaa

SEQ ID NO: 134670 - DNA, 912 bp, Enterobacter cloacae
atgctgtggttcaaaaatttaatggtttaccgtctcagccgcgatatcgaattgcgcgccgaggagatggaaaaacagctggccgagctgacatttaccccttgtggcagccaggatatggcgaaaaccggttgggtgtcgccgatgggatcgcacagcgacgcgctgacgcatacggcaaacggccagatcattatctgcgcgcgtaaagaagagaagatcctgccgtcgccggtgattaagcaggcgctggaggcaaagatccagaagctggaagccgatcagggacgcaagctgaagaagaccgagaaagattccctgaaagatgaagtgctgcactcgctactgccgcgcgccttcagccgcttcagccagacaatgatgtggatcgacaccgtcaacggcctgatcatggtcgactgcgccagcgcgaagaaagcggaagatactctggccctgctgcgtaaaaccctcggctcgctgccggtggtgccgctgaccctggagaatccgattgagctaacgctgaccgagtgggtccgctccggcaccgtggcgcagggcttccagctgctggacgaagccgagctgaaagcgatgctggaagatggcggcgtgatccgcgccaaaaagcaggatctggttagcgacgaaatcgctgtacacattgaggccgggaaggtcgtcaccaagctggcgctggactggcagcagcgtattcagtttgtgatctgcgacgacgcgtcaattaagcgcctcaagttctgcgatgaactgcgcgaccaaaacgaagatatcgatcgggaagatttcgcccagcgctttgacgccgactttatcttaatgaccggcgagctggctgccctgatccaaagtctggtggaagggctcggcggcgaagcgcagcgctaa

SEQ ID NO: 134671 - DNA, 3138 bp, Enterobacter cloacae
atgaaaatcctcagtctgcgtctgaaaaacctcaactccctgaaaggggaatggaagatagactttaccgccgagccgttcgccagcaatggcctgttcgccattaccggcgccaccggggccgggaaaaccacgctgctcgatgccatttgcctggcgctctatcatgagacgccgcgcctgaataaagtctcccagtcgcaaaacgacctgatgacccgcgataccgccgagtgtctggcggaagtcgagtttgaagtaaaaggcatcgcctaccgcgctttctggagccagaaccgggcccgtaaccagccggatggcaatctgcaggcgccccgcgtcgagctggcgcgctgcgctgacggcaaaatcctcgccgataaagtctcggacaagctggagcaaaccgcgacgcttaccggcctcgactatgaccgcttcacccgctcgatgctgctttcccaggggcaatttgccgccttcctgaacgcgaagccgagcgatcgcgcggagctgctggaggagctgaccggcacggaaatctacggccagatttcagccatggtctacgaacagcacaaagccgctcgccatgcgctggagaagttcgaagcccaggcggcgggcatcgtcctgttgacggaggcccagcagcaggcgctgcaggaaagtttgcaggtacttactgacgaagaaaaagccctgctggcccagcagcagagccagcagcaccagctccagtggctgacccgccgcgacgagctggcgcagcagcagcagcaggccgccacccggcagcagcaggcccgccaggcgctggcggacgccgccccggcgctggcgaagcttgagctggcccagcccgccgcccaactgcgtcccctgtgggagcgccagcaggagcagacggcaggcctggcgcaaacccggcagcggatcagtgaagtaaatgctcgcttacttgccagcacggcgctgcgcgcgcgcatccgccagggcgccttgcgcgctcagcagcagcgtcaggctgaactggccgatctggcgcagtggctggccgcccatgagcgtttccgcttatggggtcaggagatcgccggctggcgagcgcaattctcgcaactgacgcgggataaacaacagctaacggctcagagcacccgcctggccgcgctacgccagaagctggccacgctgccagccagccctctcaccctgagcgcggatgacgttgccgcagcgatagaacagcaaacccaatcgcggccgctgcgccagcgcctgatctccctgcatgagcagcaccagctgctgcgcaagcgtctgcgccagaacgccgagagcgtccagcaggcgcaggcggagcaggtaaaacttaacgctaccctgacgctgcgccgggaacaatataaagacaaaaaccagcactatctcgacctgaaggcgctctgccagcgggaagaaacgattaaagacctggaaagctaccgcgaccggctcgaggcgggtaagccctgtccgctgtgcggcgcctgtgaacacccggcgattgaacaatacgcctcgttgacgctcacggataatcagcgccgccgcgatgcgctggaaaaggaggtcgccgcgctgaaagaagaaggcctgctgatcctcgggcaggtcaaggccctgacgcaacagctccagcgtgacaccgaagcggccgggcggctcgcagaggaagagcaagcgcttactaaagcgtggcaggagacctgcgcctctctgcacatcacgcgggatattgcgcaagagataaacgactggatgcaggagcaggagcgctacgagcagcagctctatcagctcagccagcgcctgatgttgcagagtcagcttaacgatcagcaggcgctggagcgccatgccgagcagcagctggcggccacgcgccagggactggagagcgccctgcaggccctggccctgagcctgccggcagaagggacagaagccgcctggctgcacgctcgcgaaagcgaatttgcccagtggcaggcgcaacagacccaacatgatgccattcagcagcaaatcgctgctctgcggccactgctggagacgctgccgaccagcgacgagacagaggttgaagctgagtcggccatcccggacaactggcgcgaaatccacgaggaatgcctgtcgctgcacagccagcttgtcgcccagcagcagcaggaaacccaggaaaaggcgcgtctggaccagtcgcaggcgcaattcacctccgccctggccgccagccgctttagcgatcgggaggcgttcctcgccgcgctgctggatgacgagaccgcccagcggctgacgcagttaaaacagacgctggagcagcagcttcagcaggcggccgcgctctgcgagcaggcgacccggcaacatgaggcgcacctggcgctgcgtccgcaaggggtggacgctgacgtccccaccctgcaaacccagctgcacgccctggcccagcggctgcgggataacactacccgccagggtgagatccgccagcagctcaggcaggacgcagagagccgtcaacagcagcaggcgctggggcagcagattgcagaggcggcgcagctggcggacgactggggctatctcaattcgctgatcggctccagcaccggcgaccggttccgcaaattcgcccaggggctgacgctggataatctggtctggctggcaaaccagcagctcaaccgcctgcatggccgctatctgctacagcgcaaggccagcgaggcgctggagctggaggttgtcgatacctggcaggccgacgccgtgcgcgacacccgcaccctctccggcggcgaaagtttcctcgtcagcctggcgctggccctggcgctgtcagacctggtgagtcataagacgcggattgactccctgtttcttgatgaaggcttcggcaccctcgacagcgaaacgctggacacggcgctggacgccctggatgcccttaacgccagcggtaagattatcggggtgatcagccacgtggaggcgatgaaagaccgcattccggtgcagatcaaagtgaagaagattaacggcctgggctatagccggctggacaaagcgtttgcggtggagtga

SEQ ID NO: 134672 - DNA, 1206 bp, Enterobacter cloacae
atgcgcctccttcacacctccgactggcacctgggccagaatttttacagtaaaagccgcgcggccgaacacgacgcttttcttacctggctactggaccgcgcgcaggagcatgaagtcgacgccattatcgtggctggcgatatttttgataccggctcgccgccgagctacgcccgcgaactgtataaccgtttcgtcgtccagttgcagcagaccggctgtcgcctggtggtgctggcgggcaaccacgactcggtggcgatgctcaatgaatcccgcgatatcctcgccttcttacacaccaccgtggtggcgaacgccggctacgcgccgattgagctgccgctgcgcgacggcacgccgggcgccatcttctgtccggtgccgtttttacgcccgcgcgagctggtgaccagccaggccggtcactccggtcgggaaaaacagcagcagctgctgcacgccatcagcgactattatcaggagcagtatcagcaggcctgcgcgctgcgcggcgatcggccgctgcccatcattgccagcggccatctgaccaccgtcggcgccagcaaaagcgatgccgtccgcgacatttacatcggcacactggatgcctttccggcgcaacacttcccccctgccgactacattgcgctgggccatattcaccgggcgcagatggtcggcggctgcgagcatatccgctacagcggctcgccgctgccgctgagcttcgatgaaaccggcaaagcgaaatcggtgcatctggtgagctttagcgaggggcgacttagcgccgtggaaaccctggaggtgcccgtgacccagcctctggcggtaatcaaaggcgatctggccgccatcaccgcccagctggagcagtggcgcggcgtcgagcaggacccgccggtgtggctggatatcgaaatcaccaccgaggactatctgcacgatattcaacggcatattcaggcgctgacggaggatctgccggtggaagtgctgctggtgcgccgcagccgcgagcagcgcgagaaaatactgctcaacgcccagcgggagacgctcagtgaactgaaggtggaggaggtattcgagcgccggctggcgctgaccgaaattgacgagatgaagcgcgcccggctgcatgagctgttcgcccatacggtgcatacgctcaccgcggaggacgaaaacgcatga

SEQ ID NO: 134673 - DNA, 690 bp, Enterobacter cloacae
atggcgagaagaattctggtcgttgaagatgaagctccaatccgcgaaatggtctgctttgttctggagcaaaatggctttcagcctgtcgaagcggaagattatgacagcgcggtgaatcaactcaatgaaccctggcctgatttgattctcctggactggatgctgccgggcggttcggggctgcagtttattaaactgctcaagcgcgaggcgatgacgcgggatattccggtagtgatgctgaccgcgcgtggagaagaagaggatcgcgttcgcggcctggagaccggcgcggatgactacatcaccaagcctttctctccgaaagagctggtggcgcgaatcaaagcggtgatgcgccgtatttcaccgatggcggtggaagaggtgatcgaaatgcaggggctgagcctcgacccttcatcgcaccgggtaatgaccggcgacagtccgctggatatgggaccgacggaatttaaattattgcacttctttatgacccatccggagcgggtgtacagccgcgaacagctgctgaaccacgtctgggggaccaacgtttatgtggaagaccgcacggtggacgtccatattcgccgcctgcgcaaagcgctggaacacagtggccatgatcgtatggtgcaaacggttcgcggcacggggtatcgtttctccgcccgtttctga

SEQ ID NO: 134674 - DNA, 1296 bp, Enterobacter cloacae
gtgctggaacggctgtcatggaaaaggctggcgctggagctctttttagcgtgtattccggccctgattctgggggcgtttgtgggtcatctgccgtggtttttactggcggcagtgaccggtttgctgatctggcatttctggaatttgatgcgcctgtcgtggtggctgtgggtggaccggagcatgactcctccgcctggccgcggcagttgggagccgctgctgtatggtctgcaccagatgcagatgcgtaataaaaagcgtcggcgcgagctgggaagcctgattaaacgctttcgcagcggggcggaatcgttaccggatgcggtcgtcctgaccacggaagagggggctattttctggtgtaatggcctggcgcagcagattctaaacctgcgctggccggacgacagtggccaaaacattcttaaccttctgcgctatcctgagttcgccaactatctgaaacagcgcgatttttcaaagccgctcaatctggtgctgaataacgcccgtcatctggaaattcgcgtgatgccctacagcgacaagcagtggctgatggtggcgcgcgacgtgacgcagatgcatcagctggaaggggcgcggcggaactttttcgccaacgtcagccatgagttgcgcaccccactgacggtgctgcagggctatctggagatgatgcaggagcaggtgctggagggggcgacccgagaaaaagccctgcacaccatgcgggagcaaactcaacgtatggaaggcctggtgaagcagctgctgacgctgtcgcgtattgaagccgcgccggcgctggcgatgaatgatcgcatcgacgtgccgatgatgctgcgggtggtggagcgcgaggcgcaaactctcagccaggagaaacagacgctgatcttcaccgtcgatgagcagctcaaggtgctgggtaatgaggagcaactgcgcagcgccatctccaacctggtctataacgcggtgaaccacaccccgccggggaccgaaattcgcgtcagctggcagcgaaccccgcagggagcgctgttcagcgtcgaggataacgggccaggcattgcgccggagcatattccccgtctgaccgagcgtttttatcgggtggataaagcccgttcccggcaaacggggggcagtggcctgggactggcgatcgtcaaacacgcggttaaccatcatgacagccggctggaaatagacagcacggtgggcaagggaacccgctttagcttcctgctcccggaacgattaattgccaaaaatgacgcctga

SEQ ID NO: 134675 - DNA, 1404 bp, Enterobacter cloacae
atggccgctgtatcgtccctgagaggggagcgcggtatttttccatttttttacaacaccacatccacaggcagtaatgaatttatgacccatcagttaaaatctcgcgacatcatagcgttgggctttatgaccttcgcgttgttcgttggcgcaggcaacattattttccctccgatggttggcttacaggcgggcgagcacgtctggacggcggcgatcggcttcctgatcactgcggtgggtctgccggtgctgacggtggtggcgctggcgaaagtcggcggcggcgttgaaagcctgagcaccccgattggtaaagtggccggtatcctgctggcggtggtgtgctatctcgcggtaggaccgctgttcgcgacgccgcgtactgcgaccgtctcctttgaggtcggtattgcgccgctgaccggcgacggcccgctgccgctgctgatctacagcgttatttacttcgcgctggtgattctggtctccctctatccgggcaaactgctggacaccgtgggcaatttccttgcgccgctgaaaattatcgccctgattgtgctggcggtcgccgccatcatctggccagcgggcccgatcagcgacgcgctggaagcgtatcgtacggcgccattctccaatggcttcgtcaacggctacctgaccatggataccctcggcgcgatggtatttggcatcgtgattgttaatgccgctcgctcacgcggcgtcagcgaagcgcgtctgttgacccgttataccgtctgggctggcctgatggcgggcgtcggcctgaccctgctgtatctggcgctgttccgtctgggctctgacagcgctactctcgtggatcagtccgccaacggcgcggcgatcctccatgcctacgtgcagcacaccttcggcggggcgggcagtttcctgctggcggcgctgatcttcatcgcttgcctggtgacggcggtgggcctgacctgcgcctgcgctgagttctttgcccagtatctgccgttctcctatcgcacgctggtctttgttctcggcctgttctccatggcggtctccaatttgggccttagccatctgatccaggtatcgattccggtgctgaccgctatctatccgccgtgtatcgcactggttgtattaagctttacccgcagttggtggcataattcgtcccgcgttatcgcgccggccatgtttatcagcctgatgtttggtatcattgacgggattaagtcatcggcatttgccgcgattctgccggactggaccgcgcgtctgccgctggcggagcagggcctggcctggctgatgcccaccgccgtgatgaccattctcgcggtgatctgggatcgcgcagccggacgtcaggtgacttccagcgcgcattaa

SEQ ID NO: 134676 - DNA, 1374 bp, Enterobacter cloacae
atggaaagtagtaacaagcttaagcgcgggctaagcacccggcacattcgctttatggccctgggttccgccatcggcaccgggcttttttacggctcggccgacgccattaaaatggccggacccagcgtactgttggcctacattatcggcggcgtcgcggcatatatcattatgcgggcgctcggtgagatgtcggtgcataaccctgccgccagctcattctcccgctatgcccaggaaaacctcggcggactggcgggctatatcaccggctggacctactgctttgaaatcctgatcgtcgccatcgccgacgttaccgccttcggcatctacatgggcgtctggttcccgacggtgccgcactggatctgggtgctcagcgtggtgctgatcatctgcgccgtcaacctgatgagcgtcaaggtgtttggcgagctggagttttggttctcgttcttcaaagtggccaccattatcatcatgatcctcgccgggttcggcatcattatctgggggatcggcaacggcggccagccgacggggattcataacctgtggagcaacggcggcttcttcagcaacggctggctgggaatggtgatgtcgctgcagatggtgatgttcgcttacggcggcatcgaaatcatcggcattaccgccggtgaggcgaaggacccggagaaatccattccgcgcgccatcaactcggtgccgatgcgcattctggtgttctacgtcggcacgctgttcgtcattatgtccatctacccgtggaatcaggtgggaaccgacggcagccccttcgtcctgaccttccagcatctgggcattaccttcgcggccagtattcttaacttcgtggtcctgacggcttcgctgtcggcgattaactccgacgtgttcggcgtgggccgtatgctgcacggcatggctgagcagggcagcgcgccgaaggtgttcgctaaaacgtcgcgtcgcggtattccgtgggtgacggtgatggtgatgaccattgcgctgctgtttgcggtatacctaaattacatcatgccggagaacgttttcctggtgatcgcctccctggccaccttcgccacggtgtgggtgtggattatgatcctgctgtcacagatagccttccgccgccgtctgtcgcccgaagaggttaaggcgctgaaattcaaagtccctggcggggtggtgaccacggtgatcggcctgctgttcctggcctttattatcgcccttatcggctatcatccggacacccgcatctcgctgtacgtcggtatggcgtggattgcgctgttgctgctcggctgggtttttaagacccgccgtgagcgccgcctggcgcaggctcagtaa

SEQ ID NO: 134677 - DNA, 1818 bp, Enterobacter cloacae
atgttgaaggcatggcaccttccggttgcaccctttatcaaggtgcaacaggaccgactgtttattactctgtggttaagcggtgagtcgctgccgcagcggatcacgctgcgcgcggaagaggataacgaagagctgtcgctgccgatgcagcggctccgccaggcgccgcagccaggcgtggtggcatggcgcggcgaaatctctctcgccagcggtcagccgcgccgccgctacagctttaagctgctgtgggccgaccatcagcgctggtttacgccacaaggcttcacccgattcccgctggcccgactggagcagttcgccattgacctgccggacgccggcccgcagtgggtggccgatcaggtgttctatcaaattttccccgatcgctttgcccgcagcgccgcgcgtgacgccgaccaggatgcggtctattaccatcacgcggcgggacgggagattgtgcgcaaggcgtgggacgacccgcttaccggcgaggcgggcgggtcgacgttctacggcggggatctcgacggcatcagcgaaaaacttccctacctgaagcagctcggcgttaccgctctgtatctgaacccggttttcgccgcccccagcgtgcataaatacgataccgaggattatcggcgcgtcgatccgcagtttggcggcgacgcggcgctgctccggctgcgccacaacacccagcgggcgggaatgcgcatgatcctcgacggtgtgttcaaccataccggcgattcccatccctggttcgaccgtcaccagcagggcagcggcggcgccggccacgatccggactccccgtggcgcgactggtttaccttctcagaggaggggcaggcgcacaactggctgggctatgccagtctgccgaagctcgactatcggtcgaccagcctggtcaacgagatctatgccggtgaagacagtatcgtacgccactggctgaaggcgccatggagcatggacggctggcgtcttgacgtggtgcatatgctgggcgaaggcggcggggcgcggaataacctgcagcatatcgccggcattacccaggcagcgaagcaagcgcagccggaagcttttgtctttggcgaacattttggcgacgcgcgccagtggctgcaggcggatgccgaagacgcggcgatgaactatcgcggcttcaccttcccgatctggggattcctcgccaataccgatatttcttacgatccgcagaaaatagacgcccagacctgtatggcgtggatggataattatcgcgccgggctgtcgcatcagcagcagctgcggatgttcaaccagctcgacagccatgatacggcgcgttttaaatctcttcttggcaaagacgtagcgcgcctgccgctggcggtggtgtggctgttcagctggccgggggtaccgtgcatctactatggcgacgaggtgggcgtggatggcaataacgatccgttctgccgcaaaccgttcccgtgggatccggcgctgcaggatacccagctgctggcgctgtatcagcggatggcgaaactgcgtaaggcccaccaggcgctgcgctatggcggctgtcaggtgatttacgccgaggataacgtggtggtgtttgtccgcgtctacaaacagcagcgggtgctggtggcgataaaccgcggggaagcctgcgaggtggttatcgaagattccccgctgctgaacgtggccgggtggacgctgcaggagggcgccggcgccttccaggacggggtgctgaccctcccggccatctccgccaacgtctggtccggccgttaa

SEQ ID NO: 134678 - DNA, 903 bp, Enterobacter cloacae
atgcgcgtaaactttgatgttttgatgatccttgatgcccttgaccgccacggatccttcgccaccgccgcggagtcgctgtataaaacccccgctgctctgagctatatgatccagaagctggagggcgatctgaacatcgtgctgttggatcgttccggccatcgggcaaaatttaccgataccggccggctgatgctggagaaggggcgacagcttttaagtgccgccagagatctggaaaagcaggcccagcaactgagcgcgggctgggagcgagagctagccatcgcccttgacgcctcatttcccttttcggccctgctgccgctgatcgccgagttttacgcgcaaaacccacagacgcgactgaacttcagccatcacaccctcgccggttcgtgggaagagctgacccatcatggggcggatattatcctcggcgccatcaatgagccgcccacctccgcggagtggtcatggcaaaccctcggcgcgttggataacatcttcgtcgtcgccccccatcacccgctggctcaggcgaaggagccactggccaataaacagctcagccagcatcgggccatcgtgatccgcgacagcgcccgctattgccatccgctcaacagcaatctcctcgacgagcagccgcaaatcggcatcgatgatttcgccagtaaagtcgaactattgtgcgccgggctgggctgcggctttctgccgcgccatatcgctcgcccgtggctggtaaaaggcagtctggtggagaaaagcgtcgcctgctggcgggaaaaggatattacctatatggcctggcgcagcgggaatgatgggctggctcagcgctggtggcgggaggcgctcctccgcggcgacctgctgagccagctctaccattaa

SEQ ID NO: 134679 - DNA, 153 bp, Enterobacter cloacae
atggtttatattttttgccgcgaccaggatttattcacgcctgttttaatcaaatttttacgccaaactgttctgatttattcactggctttgattattgcgcttaggtacaacagagaaaacaaattaatggatagcttcatatgcgcgtaa

SEQ ID NO: 134680 - DNA, 546 bp, Enterobacter cloacae
atggcgcagcaaaaatcggtgaccctggttatcagccatctgctcgatccgcaacacagccagcgctacgaagagtggctcggtaaaattatgcccattgcggcagaatttcccggccatcttggggcgaatgtgatccggcccgccgcagggcagaatctgtggagcgtcataatccgcttcgataccttggagcacctctacgcctggacgcagtcggaaacccgtcggcaactggtggctgagattgccccactgctgacggaaggcgatcggactgaggtgcggactgaaccggccttctggtttaccccgccgacggtgaacgtacgccagccgcggcgctggaaacagtttctgatcaccctgctggtgattttccccagcaccaacctggtgcctgcggtgaccggcatgctgctgccgtcgcttaaggggagcctgctgctgcacctcatcaatgatgcctgcgtggttgcgctggtggtctggttctggatgcccatcgtgacccgcctgtttgctggctggttgaagaaaaactga

SEQ ID NO: 134681 - DNA, 861 bp, Enterobacter cloacae
atgttagtgtcgatgaaggacatgcttcagcatgccctgcgggacggctacgccgtcggtcagttcaacatttataatctggaatgggtcggcgccgtattaagcaccgcccagcagtgccgctcaccggttattttgggggtgtccggcggcacggttaagcatatgctcgggttaaaatgtattcatgacatcgtggttaacgccatggagtatttgcatattgatgttccggtggcgctgcatctggatcatggcacctcccgggaggcctgcgaagcggcgatcgccgccggcttcagttccattatgtttgatggctcgcatctgccgttcagggaaaacctggccattacccgccacctggtgacgctggcgcacagcaaaggtatctctgtggaggccgaactggggaccatcgccggcagtgaagacggcattgtcaattccgaagtcatctacgccgatccccaggagtgctacaccctggtgacagaaacccaggtggattgcctcgccgccgcgctgggctccacccatggtctgtataaaggtaaagccaggctgggatttaccgagatgaaagccattgccgagcaggtgaaggttccgctggtgctgcatggcggcaccggtattgccgatgaggatatgcgccgggcgattgcctgcggcaccgccaagattaacgttaataccgaaaatatgtacgcctggtgccaacaggtgaaagcaattttcgccgccgacaccggacacgatgtgaacgatccgcggaaagtcatcgcccagggactgcagccggtacgcgagatgattgcccgccgcatggcgctctttggctcagagcagcgctattga

SEQ ID NO: 134682 - DNA, 963 bp, Enterobacter cloacae
atggctattttgtccattggatttgcttgtttcgatcagtttttctttctcaatgaatggccccaggagaataccaaaaacttttgtcatgattttattgaaagcggcggcggtccggcggccaatgcggcctggctgctgggattatggggcgaggaggtttattacattggtcatctgcagcaggacctttacggtcagcgcattatcgatgagtttgccgaggcgggggtggataccagccaggtggttttctccgatgacatgatcaccccgctggcctcggtgctggtcaatcgcttaacgggttcgcggacgattattacccgcaagatgcaaacgccgccttccctgacctacgagcaaaagctcaaactggacgacctcgccgagcgactgattgccagcgaggagccggtcaccattttaattgacggccatgaggcggaaatcagtgaatatttaattaagaaactgcccaacgccagggtcgtgatggacggcgggtcactgcgcgccagcaatattaaactggcggcctggactgactattttgtagtgagcgaacatttcgcccgcgattatatgagctatcgctcgctgagcaccgaagcagaaattaaagcggccctgattgagttgaataaaatttgccgcggtgaagcatttattacccttggcgaaaaaggctgcgcttttttaaaaagcggtatgctgcagatcgtcccgtcctggctgtgcaatgccgttgataccaccggcgccggggatgtatttcacggcgccttcacctatggcgtccattactcatggcatatcgataacattattttatttgccagcctgaccgccgccatttctattgagaaaaaaggggttcgggaatcgatgccggacctggcggtcgtccaccactcgttaaatagctacgagagaaacttaacgcaatattttgaagaataa

SEQ ID NO: 134683 - DNA, 1392 bp, Enterobacter cloacae
atgcaggctattcttagttttttaacggaaatattcagtcaacccgcctttttaatggggcttatcgcctttgttggtttagtggcgctgcgctcccccggtaacaaactgcttaccggcacattaaagccgattttaggctatttgatgttgagcgctggggcaggcgttatcgttgccaatctcaatccgctgggcggtattatcgaggccggatttaatatccgcggcgttattccgaacaatgaagccattgtctccgtcgcccagaaaatgctgggcgtggaaaccatgagtattttgctgttaggctttattttcaacctgattatcgcccgctgtaccaagtataaatatatctttctgaccggccatcattcgttctttctcgcctgcctgttctccgccgttctgcaggcggcggagttccagggctggatgttgatcctgatcggtggattcctgttgggctcatggtcagccatctccccggccatcggtcagcgttacaccagacaggtaaccgaagacggcgggatcgccatgggccatttcggctctctcggctactacctctcggcatggatcgccagccggaccggcaatccggcaaattccttcgccgataccgaaatttcagaaaagtggggctttctgcgcgataccacggtcaccaccggtatcgtgatgtttgttatctactttgtctgcagcgctgtcgccgggtcggcgtacctgagcaccatcaccgaccaaaacatgctgatcttctcggtgctgaccggtctgcagttcgccgttggcgtagccattgtctataacggcgtgcggctgatcctcggcgatctggtgccggcgttccagggcatcagccagaagctgatcccggactccatcccggccgttgactgcgcggtgttcttcacctttagccccaccgcggtggtggtgggattcatcagctcctttgtgggcgggctggtcgggatgctcttgctcggcgggctgggcatggcgctgattattcccggcatggtcccgcacttcttctgcggcggcacgtccggcgtcttcgccgacaaactgggggggaagcgcggatgtatcatcgcctcctttatcggcgggatcttcctcgccttcctgccggcgatgctgctgccggcgctcggcaacctcgggtttgaaaacagcaccttcgccgatttcgacttcgcggtatggggcatcattatcgggaatgcgttcacccagtttggtcagatcactatctatctgatttgtctggcgctgctcgtcgcgctgctggcgcctttctgcttccgtcacgtccaggtggtgggcaacacgctcagctatgaggagctgacggcgaagcagaaaaatgaataa

SEQ ID NO: 134684 - DNA, 288 bp, Enterobacter cloacae
atgttagttatcagaacggtttgtggtaacggtattggcagctcattgatggctgcgaataatgtgaaaaagatttgtgacgaattaggtatcaaagcggacgtcgcctcggtcgattttgctaacgccgtcggggaaaaagccgacctttacgtcacgatcaaagaactggcaaatcaatttccggcccactgtcatgtcgccatcattcgtagctacgtccataaagcgaagatcgccgaggatattaccgacgcgctgatgaaaattgctgcgactcactcttaa

SEQ ID NO: 134685 - DNA, 444 bp, Enterobacter cloacae
atggaaattatttttgacccgtcgttaatcgcccttaagcagaatatttcccgtgcggaagaggccatcgaactggcgggttcattacttgccaggcgccagatttgcagcgccgaatatgtcaacgagatgctgacggtatatgaagattttggcgccgccatcgtgatagatgacgggattgccatgccgcatgcccggccggaaaaaggggcattacagaccgggttctcacttgtcaccaccgccacgccaatctccttcggccacgatgagttcgatccggtttccgtggtcatcgcgatcgccggcgccgatgctgacagtcatatcaaaatgatccaactgatagcctcgctgatcgagtcagatattgtgacctttcttcagcaggaaaatgacgttaattcagtcttacatttcattcaaaaacaaatggagtag

SEQ ID NO: 134686 - DNA, 603 bp, Enterobacter cloacae
atggttctggtcactcgtcaagcgccggattttactgcagccgctgtgctgggtaatggtgagatcgttgagaaattcaatttcaaacagcacaccaacggtaaacctaccgttctgttcttctggccgatggacttcaccttcgtgtgcccgtctgagctgatcgcgttcgacaaacgttacgaagaattccagaaacgcggcgtggaagtggttggcgtttccttcgactccgagttcgtgcacaacgcatggcgtaacaccccggtagaccagggcggtatcggcccggttaaatacgcgatggttgctgacatcaaacgtgaaatccagaaagcttacggtattgagcatccggacgaaggcgtagcgctgcgcggctccttcctgatcgacgccaacggcatcgttcgtcatcaggtggttaacgacctgccgctgggccgtaacatcgacgaaatgctgcgtatggtagacgccctgcagttccacgaagagcacggcgaagtctgcccggcgcagtgggaaaaaggaaaagaaggtatggccgcctctccggaaggcgttgcaaaatacctgaccgaaaacgtttccagcctgtaa

SEQ ID NO: 134687 - DNA, 432 bp, Enterobacter cloacae
atgactgacaacctggcggaagtcaaagaggcgcgggagtggtttcgcccgcagacccgccgcgtcgcccccatcaccctcgacgtcatgtgggatcatttcctgtcccagcactgggcgcagctctcccctgacctgccgctggacgagttcgtacgctacgccgagcggcagatcgtccccatcctgcccgactcgccgccccgcttcgtcaatctcaatcaatatctgtggtcggagcgctggctggagcgctatcgggaaatggattttattcagcgcgtgctgaacggcatggccagccgccgtccacgtctcgaggcgctacgcgactcctggcaggatctggatacccattacgaccgtctggagacgcagttctggcgcttttatccgcagatgatgcgcctggcagaaaacaaacagctgtaa

SEQ ID NO: 134688 - DNA, 132 bp, Enterobacter cloacae
atgaattttctcgcccacctgcacctggcccatctcgccgacagttcgttgcccggcaacctgatggccgacttcgtgcgcggcaacccgcagggcgactatccgtctttatgcatcggcggattgacgtga

SEQ ID NO: 134689 - DNA, 1065 bp, Enterobacter cloacae
atgcgcgttaccgattttgcttttgaactacccgaatctctgatcgcccactatccgatgcctgagcgcagtagctgtcgcttgctctccctggacgggccgacgggcgcgctgacgcatggcaccttcaccgacatcctcgataagctcaatcccggcgatctgctggtgtttaacaacacccgggtgatcccggcgcgtctgttcggccgcaaggccagcggcggcaagattgaagtgctggtggagcggatgctggatgataagcgcatcctggcccatattcgcgcctcaaaagcgccgaagccgggcgccgagctgctgctgggcgatgacgagagcattaaggccacgatgctggcgcgtcatggcgcgctgtttgaagtggagtttaacgacgagcgcccggtgctggagatccttaacgggatcggccatatgccgctgccgccctatattgaccgcccggacgaagacgccgaccgcgagctctatcaaaccgtctatggcaccaggccgggcgcggtagccgccccgaccgccggtttgcatttcgacgaaccgctgctggacaaactgcgcgccaaaggcgttgagatggcgtttgtcaccctgcatgtgggcgcgggcaccttccagccggtgcgcgtcgacagcattgaagagcacaccatgcactccgaatatgccgaagtgccgcaggaggtggtcgatgcggtgctggcggcgaaagcgcgcggcaaccgcgtgatcgcggtgggcaccacctcggtacgttcgctggagagcgcggcgcaggcggcgaaagacgcgctgatcgcgccgttcttcgacgatacgcagattttcatctacccgggttatcagtaccaggtgatcgatgcgctggtgactaacttccatctccctgaatccacactgattatgctggtgtcggcgtttgcgggttatcagcacaccatgaacgcctataaggtggcggttgagcagaaatatcgcttttttagctacggggatgcgatgtttatcacgtacaatccgcaggctatttctgagcgtccctga

SEQ ID NO: 134690 - DNA, 1128 bp, Enterobacter cloacae
atgaaatttgaactggataccaccgacggtcgcgcccgccgcggtcgcctggtgtttgagcgcggcgtggtggaaacaccggcctttatgcccgttggcacctacggcaccgtcaaagggatgacgccggaagaggtggaagccaccggcgcgcagattattctcggcaacaccttccacctgtggctgcgcccgggtcaggagatcatgaagctgcacggcgatctgcacgattttatgcagtggaaaggaccgatcctgaccgactccggcggtttccaggtgttcagccttggcgatatccgtaagatcaccgagcagggcgtccacttccgcaatccgatcaacggcgatccgattttcctcgatccggaaaaatcgatggagattcagtacgatctcggctctgacatcgtgatgatcttcgacgaatgtacgccgtacccggcggactgggattacgccaagcgctcaatggagatgtctctgcgctgggcgaagcgcagccgcgaccgtttcgatagccttggcaataaaaatgcgctgttcggcattattcagggtagcgtttacgaagatttacgcgatatctcggtgaaaggtctggtagagattggctttgatggctacgctgtcggcggtttggcggttggtgagccgaaggaagacatgcaccgtattctggagcacgtctgcccgcagatcccggccgataaaccacgatacctgatgggcgtcgggaagccggaagatctggtggaaggggtacgtcgcggtatcgatatgttcgactgcgtcatgccgacgcgcaacgcgcgtaacggccacctgttcgtcaccgacggcgtggtgaaaatccgcaacgcgaagcacaaaagcgataccgcgccgctggacgccgagtgtgattgctatacatgtcgcaattattcacgcgcttacttgcatcacctcgaccgttgcaacgaaatattgggcgcgcgtctcaataccattcataacctgcgctactatcagcgtttaatggctggtttacgcaaggctatcgaagagggtaaattagagagcttcgtgaccgatttttaccaacgtcaggggcgcaccgtgcctcctttgaacgttgattaa

SEQ ID NO: 134691 - DNA, 333 bp, Enterobacter cloacae
atgagcttttttatttctgatgcggtagcggcaacgggtgcaccggcgcagggcagcccgatgtctctgattctgatgctggtggtgttcggtctgattttttacttcatgatcctgcgtccacagcagaagcgcaccaaggaacataagaacctgatgaactccatcgccaaaggtgatgaagtgctgaccaacggcggtctggtcggtcgcgtgaccaaagtagcggaaactggctacattgctatcgcgctgaacgataccactgaagtggttatcaaacgtgacttcgttgctgccgttctgccgaaaggcaccatgaaggcgctgtaa

SEQ ID NO: 134692 - DNA, 549 bp, Enterobacter cloacae
atggtccccggtcaggatcacccgcttgtacagcactaccggctggccttcacgcgtctgcttcacttccgagtcgcccggcacgcggccagaggcggcggcggactggtccacgttagtattgaccagacggaactcgagggtcgcggtcgcgccaaggatttccttcgcacgcgcggtatcctggatacccggcagctcaaccacgatgcggtcagcgccctgacgctgaaccagcggctcggcgacgcccagctggttcacacggttacgcaggatattaatgttctgctgaaccgcgtactcacgggcttctttcaggcgctcatcggtcatcaccgctttcaggctgttgtcaccctgagaggaaataaccagatcgcgatggcgagggctgagataagagatagcctggtcgcgcgccgcgctgtcgcggaagacgatgctcagaccgtagttgtcttctttacgcacggtcgcgtaaggaatgcctttgtcgcgcagctcgctgcgcaggctatcgatgttctgttcctgcagtttgcctaa

SEQ ID NO: 134693 - DNA, 282 bp, Enterobacter cloacae
gtggccgataccgcccatcgccaccagtttctctgctttttctaccgcgtcatcgaaatctttcgcacggtacattgccagcgtcggggagagtttctcgtgagcaaacggctcactttcatcgacgactttcacttcaccaatcagaatcttggtggtagcagggacgctaaagccagcgagttcagcgattttatacgctggctgacctacgatagccgcgttcagcgcgccatttttcagaattacgtcctgaacagctttcagttctttaccttgtaa

SEQ ID NO: 134694 - DNA, 243 bp, Enterobacter cloacae
gtggtttttgatcactttatcttcaacgatacccatgccggattcggcaacggccattttagcgagagggattcgagcatcagcagcagccagagcggccgcgcggaagattttatcaacctgttcttgggtgaaattggcatattcacgctgggcttttttcacgcgctcgacgagggcgttcagttcagcgatattggtaacagccataatgctctcctgataatgtttaaactcttttag

SEQ ID NO: 134695 - DNA, 2034 bp, Enterobacter cloacae
gtgctgatcggccgctttcagcgcatcgccgagcgagttcatcagcgcggcgcggtgtggccccagccggtcaaacgcgccggacatgatcagtttttccagcacgcggcggttcagttttttggtatcggtgcgggcgcacagatcgaacagctcgcggaaatagccgccgttgttacgcgcttcaatgatcgcctcgatcggcccctcacccacgcccttgatcgcgccgatcccatagacgatttccccgtcatcgttaacgtggaaatggtacaggcccgagttaatatccggcggcaggatcttcagccccatgcgccagcactcgtccaccaggccaaccaccttctcggtgttgtccatatcggcggtcattaccgccgccataaactcagcgggatagtgagccttcagccacagcgtctgatacgaaaccaaagcataggcggcagagtgagatttgttaaatccgtacccggcgaatttctccaccaggtcgaagattttcatcgccagttcgccatcaatgccgtttttcttcgccccatcttcaaagatggaacgctgcttggccatctcttccggctttttcttacccatcgcacgacgcagcatgtctgctccgccaagggtgtaacccgaaagtacctgggcgatctgcatgacctgttcctgatacaggatgatgccataggttggctccagtaccggtttcaggctttcatgctgccactgcacgtccgggtaggaaatctcttcgcgcccgtgcttacggtcgataaagttatccaccatccccgactgcaacggccccggacggaacagggccaccagcgcgatcatatcttcgaagcagtctggttgcagacgcttaatcaaatctttcatgccgcgggattcaagctggaagacggctgtcgtctccgagcgttgcagcatgtcgaaacttttcttgtcatcaagcgggatagccgcgatatccagcggcggttcgccgttcttctcgcgacgggcgttgatcatctccagcgcccagttgatgatggtcagcgtacgcaggccgaggaagtcaaacttcaccagcccggcgtattccacgtcgttcttgtcaaactgggtgaccggatgctggcccgcttcatcgcagtacagcggcgcaaaatcagtgattttggtcggggcgataaccacgccccccgcatgcttaccggcgttacgcgtgacgccttccagcttgcgcgccatgtcgatcagcgctttgacctcttcgtcggcttcgtagatttccggcagctgaggttcagcttcaaaggctttcgccagggtcatgcccggatcgggcggcaccagcttagagattcgatcgacaaaaccgtacgggtggcccagaacgcggcccacgtcgcggataaccgctttcgccgccatcgtaccgaaggtaatgatctgcgaaaccgcatcacgaccgtacatatcggccacgtgctcaatcacctggtcgcgtttttccatgcagaagtcgacgtcaaagtcgggcatggagacacgttccgggttgaggaaacgttcgaacagcaggtcgaattccagcggatcgaggtcagtgattttcagggcatacgccaccagcgagccggcaccggaaccacggcccgggcctaccggcacgccgttatccttcgaccactggatgaactccatcacgatcaggaagtagccagggaaccccatctggttgatcacctggagttcaatatccaggcgctcatcatattcaggacgtttctctttacggaccgcttcatccgggaagaggaattccagacgctcttccagaccctctttcgatttcatgaccaggaaatcttcggtggtcatatcgcccgtcgggaactgcggcaggaagtattcgccgagacgcacggtgacgttacagcgcttggcaatctctacgctgttttccagcgcttccgggatgtccgagaagagctcacacatctcctcttcgctgcgcatgtactgctgcgatga

SEQ ID NO: 134696 - DNA, 357 bp, Enterobacter cloacae
gtggatagcgacgcgaatttcatgtgcgtcaaaatcgcccgcctcaaggaagcgcacatcgttggtggccaccacaggcaggcaacgcgcttccgccagggcgacggccgcatgcagatagctctcttcatccgcacgcccggtacggatcagctccaggtaatagcgatccgggaaatactcttcgtagaacgagacgcactgatccaccagcgcgttgttaccgcgcagcagacatttgccgacatcccccatgcggccaccggagatcagcagcagaccttcgttcagctccgccagccagtcgcggtcaatccatggacccagtgcgccgtagccgcgctggtaggcttttga

SEQ ID NO: 134697 - DNA, 126 bp, Enterobacter cloacae
atgcacccgcaggtgtacgaaacgtggttcagccatcttcaaatcccgcgttacttaattgcttgcgtcttgattcaggacaccagtcccagcgcgcgtttcaccgggccaaagctgcgccgatga

SEQ ID NO: 134698 - DNA, 795 bp, Enterobacter cloacae
atgaaacagtatcttgatttgatgcagaaagtgctcaccgagggcacgccaaaaaatgaccgcaccggcactggcacgatctccattttcggccatcagatgcgttttaacctgcaggaaggcttcccgctggtgaccaccaagcgctgtcatttacgctccatcatccatgaactgctgtggttcctgcagggcgacaccaacatcgcctatctgcatgagaacaacgtcaccatctgggacgagtgggcggatgaaaacggcgacctggggccggtctacggcaaacagtggcgttcctggcctgcgccggatggccgccatatcgaccagatcaccacggtgatgaaccagctgaaaaacgacccggactcccgccggatcatcgtctcggcatggaacgtcggcgagctggataaaatggcgctggcgccgtgccacgccttcttccagttctacgtcgccgacggcaagctctcctgccagctgtatcagcgttcctgcgatgtgttcctcggcctgccgttcaatatcgccagctatgcgctgctggtgcatatggtggcgcagcagtgcgatctgcaggtcggtgatttcgtctggaccggcggagacacccatctgtacagcaaccatcttgagcagaccaacctgcagctaagccgcgaaccgcgtccgctgccgaagctggtcatcaaacgcaagccggcgtctatcttcgactaccgctttgaagacttcgagattgaaggttacgatccgcacccgggcattaaagcgccggtggcgatttaa

SEQ ID NO: 134699 - DNA, 876 bp, Enterobacter cloacae
atgaatagtggctacctgcattttccggagttcgatccggtcattttttctctaggcccggtctccctccactggtacggtttgatgtacctggtgggctttgtctttgcgatgtggctggccacccgtcgggcgaatcgtccgggcagcggctggacgaaaaatgaagtggaaaacctgctctacgcgggcttcctcggcgtcttcctgggcggtcgtatcggctacgtgctgttttacaacctgccggtatttcttgccgatccgctgtatctgttccgcgtctgggacggcggcatgtcgttccacggcggcctgatcggcgtgatcctggtgatgattatcttcgccagacgcaccaaacgcaccttcttccaggtctccgattttatcgcgccgctgatcccgtttggtcttggcgccgggcgtctgggcaactttatcaacggcgagctgtggggccgcgtagacccgagcttccactacacgatgattttcccgggctcccgtgccgaagacctggcgctgctgccgacgcatccggaatggcaatcgctgttcgatacctacggcgcgctgccgcgtcacgcgtcgcagctgtacgagctggcgctggaaggcgtggtactgttcctgatcctcaacctgtttatccgtaaaccgcgcccgaccggctccgtttccggtctgttcctgattggctacggcctgttccgcatcatcgtggaattcttccgccagcccgacgcccagttcaccggcggctgggtgcagtacatcagcatggggcagattctttcgatcccgatggtgcttgcgggtatcattatgatggtttgggcttaccgccaccgtccgcagcaacagaattcttga

SEQ ID NO: 134700 - DNA, 2247 bp, Enterobacter cloacae
atgctcactcggttgcgagaaatagtcgagaaggtcgcgagcgcgccgcgtttaaacgaggcgctggatattctggtgacggatgtctgccaggcgatggagacggaagtctgctcggtttacctggctgacaatgaccgacgctgctattacctgatggccacccgcgggttaaaaaaacctcgcgggcgcaccgttgcgctggcgttcgatgaaggcctggtggggctggttggccgcctggcggaacccatcaacctcgccgatgcgcaaaaacaccccagcttcaaatatatccccgccgtcaaagaggaccgcttccgcgccttccttggcgtgccgatcattcagcgccgccagctgctgggcgtgctggtggtccagcagcgcgagctgcgtcagtttgatgaaagcgaagagtctttcctcgtcaccctcgccacccagatggcggcgatcctctcccagtcccagctgaacgccctgttcggccagtatcgtcaaacgcgcattcgcgctctgccggcctcttccggggtggcgatcgccgagggctggatggacgtcagcctgccgctgatggagcaggtgtatgaagcctcgacgctggacaccgcctcggaacgcgaacgcctgaccggtgcgctggaagaggcggccaacgagtttcgtcgctacagcaaacgctacgccgccggggcgcaaaaagagacggcggcgatcttcgatctctactcgcacctgctctctgacgcccgcctgcgtcgcgagctgtttgccgaagttgacaaaggcgccgtcgccgagtgggccgtcaaaaagatcattgagaagttcgccgaacagtttgccgcgctgagcgacggctatttgaaagagcgggccggcgatctgcgtaccctgggccagcgtctgctgttccatctcgacgacagtattcaggggcccaacacctggccggcgcgcattatcctcgtggcggacgagctgtcggccaccaccctcgccgaagtgccgcaggatcgcctggccggcgtggtggtgcgcgatggcgccgccaactcccatgccgctattatggtgcgggccctcggcatcccaacggtgatgggcgccgatattcagccctcgctgctgcatggccatacgctgattgtcgatggctatcgcggtgagctgctggtggatcctgaacctgtcctgttgcaggagtatcagcgccttatcagcgaagagaacgaactcagccgcctggcggaggacgatctccagcgcgcgtcggagctgaaaagcggcgagcgggtgaaagtcatgcttaacgccggcttaagcccggagcacgaagagaagctcggcagctttgttgacggcattggcctctaccgcaccgaaattccctttatgctgcagagcggcttcccctcagaagaggagcaggtcgcccagtatcagggcatgctgcagatgtttaacagcaaaccggtgaccctgcgtaccctggacatcggcgcggataaacagctgccgtatatgccgatcagcgaagagaacccgtgcctcggctggcgcgggatccgcatcaccctcgatcagccggagatctttttgatccaggtgcgggcgatgctgcgcgccaacgccgccaccggcaacctcagcattttgctgccgatggtgaccagtctggaggaggtggatgaggcccgtcggctgatcgatcgcgccagccgggaagtggaagagatgatcggctacgccatcccacgtccgcgcctgggggtgatgctggaggtcccgtcgatggtctttatgctgccgcagctggccagccggatcgattttatctcggtagggacgaacgacctgacccagtacctgctggccgtcgaccgcaacaatacccgggtcgccagcatgtatgacagcctgcatcctgcggtattgcgggcgctggcgatgatcgcccatgacgcggagcgctttggcatcgatctgcgcctgtgcggcgagatggcgggcgacccgatgtgcgtgacgatccttatcggcctcggttaccgccatctgtcgatgaacggccgctcggtggcgagggtgaagtatctgctgcgccgcattgatatcgaagaggcgcaggagctgtcgcgtcgcagcctcgatgcgcagatgaccgccgaggtgcgccatcaggtggcggcctttatggagcgtcgcggtctcggcggcctgatccgcggcgggcggtag

SEQ ID NO: 134701 - DNA, 531 bp, Enterobacter cloacae
gtgattgatgacgatggctaccgcccaaatgtcggtattgtaatctgtaatcgtcagggccaggtgatgtgggcccggcgctatggtcagcactcgtggcagttcccgcaagggggcattaatccaggagaatccgcagagcaggcgatgtatcgggaattgtttgaagaggtcgggttaagccgtaaagatgtgcggatcctggcctcaacccgtaactggctgcgttacaagttgcctaaacgtttggtgcgttgggacacaaagccggtttgtatcggccagaaacaaaagtggtttcttttgcagttgatcggcaatgatgcggacatcaatatgcaaaccagcagtacacctgaatttgatggttggcgctgggtgagttactggtacccggttcgccaggtggtgtcgtttaagcgcgacgtctaccgccgggtgatgaaagagttcgccagcgtgaccatgtcgctggcggagagcgcacctaagccgcaaaacgcgcctgcttatcgacgtaaaagaggttaa

SEQ ID NO: 134702 - DNA, 696 bp, Enterobacter cloacae
atgcccgctatcgctccgctcgcctcaccgccgcaaagtcaggaacagctgctggcccaggcccgccagctggccggctattcgctgggcgagctggcggcgctggcggggatccccattccgcgcgatctgaagcgcgataaaggctggacgggcattctgctggagctgtggctgggcgccagcgcaggcagtaaacccgagcaggatttcgccgcgctgggggtcgagctcaaaacgatccccatcgacagccggggacgcccgctggagaccactttcgtctgcgtcgccccgttaaccggcaatagcggcgtcacctgggagagcagccatgtgcggcataagctgcagcgcgttctgtggatcccggtggagggtgaacgcaccatcccgctggcggcgcggcgcgtcggcgcaccgctgctgtggagcccggacgaagacgaggagcgccagctgcgcatggactgggaagagctgatggatctcattgttctcggtgaggtcgagcgcattaccgcccgccacggcgaggtgctgcagttaagaccgaaagccgccaacagcaaggcgctgaccgaagccatcggcgcccgcggggagacaatcctcacgctgccgcgcggtttctatctgaaaaagaattttaccgccgctctgcttgcccgccatttcttgttacaacacgattaa

SEQ ID NO: 134703 - DNA, 714 bp, Enterobacter cloacae
atgttatttgcatggataaccgatcctaacgcctggctggcgctgggcacattgacgctgctggagatcgtgctcgggatcgacaatattattttcctctctctggtcgtggctaagctccccaccgcccagcgcgcccatgcgcgccggatcggtttgatgggcgcgatggtcatgcgtctggcgctgctggcctcaatcgcctgggtcgttaagctgaccaacccgctctttaccgttttcggtcaggagatctcgtttcgcgatctgatcttgctgctcggcgggctgttccttatctggaaagccagtaaagagatccatgaatctatcgaaggtgaagaggaggggctgaagaccaacgtccactccttcctcggcgctatcgtgcagatcatgctgctggatatcatctttagcctcgattcagtgatcaccgccgtcggcctgtcggatcatctgttcatcatgatggcggcagtggtgatcgcggtgggggtgatgatgttcgccgcgcgacccatcggcgattttgttgaccgtcatccttcggtgaaaatgctggcgctgtcgtttctgatcctcgtcggctttaccctgatgctggaaagcttcgacgtccatgtgccgaagggatacatctatttcgccatgttcttctctatcgcggtggagagccttaacctgctgcgtaataagaaaaacccgctgtaa

SEQ ID NO: 134704 - DNA, 219 bp, Enterobacter cloacae
atgaagaaatgggcagtattgatttccgccgtaggactggcgttctcggtttccggttgcagcagcgattacgtcatggcgaccaaagatgggcgaatgatcctgaccgacggtaaacctaccgtggatgacgataccggtttaatcagttacgaagatcagcagggtaataaaatgcagatcaatcgtgacgacgtttcgcaaatcattaagcgttaa

SEQ ID NO: 134705 - DNA, 1041 bp, Enterobacter cloacae
atgcagtatcaccgtatcccacacagttctcttgaaatcagcaccctcgggctgggaaccatgacttttggcgaacagaatagcgaggccgatgcccaccagcagctcgattacgcggttgccaacggcatcaacctgatcgatgtcgctgaaatgtacccggtcccgccgcgcccggaaacccaggggctgactgaaacctacgtcggcaactggctggcgaaacgcggcaatcgcgaaaagctggtgctcgcctcgaaagtcagcgggcccgcgcgcaataacgacagcagcattcggcccaatcacgtcctggaccgcaaaaatatccgcgaggcgctgcacgccagcctgaagcggctgcagaccgattatctcgatttatatcaggttcactggccgcagcggccaaccaactgctttggcaagctgggctatacctgggccgacgccgcgcccgccgtgacgctgctggataccctcgaagcgctgaccgagttccagcgcgccgggaagatccgctacatcggcgtgtcgaacgaaaccgccttcggcgtgatgcgttatctgcacctggcggataagcacgacctcccgcggatcgtgactattcagaatccttacagcctgctgaaccgcagctttgaagtcggcctcgcggaagtgagtcagttcgaaggcgtggagctgctggcctactcttgcctggctttcggcacactgaccggcaagtatctcaacggtgcgaagccggcaggggcgcgcaatacgctgttcagccgctttacgcgctacagcagcgagcagtcgcagaaagcggtagcggcctatgtggatatcgccaaacgccacggcctcgatccggcgcaaatggcgctggcctttgtgcgtcggcagccgtttgtcgccagcaccctgctgggggcgacgaccatgacgcagctgcaggccaacgtggaaagtttgcagcttgagctgagcgaagaggtattagcggagattgaggcggtgcatcaggtttatacctacccggcgccgtaa

SEQ ID NO: 134706 - DNA, 1194 bp, Enterobacter cloacae
atgagtgagtcagtacatactaacccttcgctgtactcgaaagggatggtggcggtgatctgcgcccagttcctgtcggccttcggcgacaatgcgcttctcttcgccaccctggcgctgatgaagcagctctattatccggagtggagccagccggtcctgcagatgttgtttgtgggcgcttacatcctctttgccccctttgtcggccagttcgccgatagctttgccaaaggtcgggtgatgatggtggccaacggcctgaaactgctcggcgccggctgcatctgcttcggcgtcaatccgtttatcggctatacgctggtggggattggcgccgccgcctattcgccggccaagtatggcattctcggcgaactcaccaccggcgataagttagtgaaggctaacggactgatggagtcctcgaccatcgcggcgatcctgctgggctccatggccggcgggatcctcgccgactggcacgtgctggcggcgctgatcgtctgcgcgctggtctacggcggggcggtagtggctaacctgtggatacccaggctgccggcggcgcgtccggggcagtcgtggcgttttaagccaatgacgcacagcttcttcagcgcctgccggacgctgtggcgcaacggcgaaacccgcttttcgctgatgggcaccagcctgttctggggcgctggcgtgaccctgcgtttcctgctggtgatctgggtgccggtggcgctgggcattaccagcaacgccatgcccacctatcttaatgcgatggtggcggtggggattgtgctgggtgccggggcggcggcgaagctggtgaccctggagacggtgtcgcgctgtatgccggccgggattttgatcggtatcgcggtgatagcctttgcggtgcagcagtcgctgctgccggcgttcggtctgctgctgctgctcggggtgttcggcgggttctttatcgtaccgctgaacgcgctgctgcaggagcgtgggaaacattcggtcggggcaggtaacgccattgcagtacagaacctcggtgagaacgtggcgatgctgctgatgctggggctctattccctggcggtgagcgtgggcgttccaccggtcgccgtggggataggctttggcgcggtattcgccgtggccattgccgcgctgtgggtctgggggcggcgtaaataa

SEQ ID NO: 134707 - DNA, 2160 bp, Enterobacter cloacae
atgcttttgggatttttcagactgctgttcaaggggttataccgggtcagactgaccggcgacacgcaggctttataccagcaaaaggtcttaatcaccccgaaccacgtctctttcctcgacggcattctgctggcgctgtttttgccggtccgaccggtttttgcggtctatacctcaatcagccagcgctggtttatgcgcgcgctgacgccgattatcgattttgtgccgctggacccgaccaagccgatgtcgatcaaacatctggtgcgcctgattgagcaggggcggccggtggttatttttccggaagggcgaatttcggtcagcggctcgctgatgaaaatttatgacggcgccgcctttgtcgccgccaaatcgcaggcgaccattgtgccgctgcgtattgaaggcgccgaactgacacccttcagccggctgaaggggctggtgaaacgtcgcctgttcccgcgtattcagctgcatctcctgccgcccacccatctgccgatgcccgaggcgccgcgcgcccgcgaccggcgcaaaatcgccggggagatgctgcatcagatcatgatggaagcccggatggcggtgcgcccgcgggaaaccctgtatgagtcgctgctggcggcgcaggaccgcttcggcgcgcgcaaaccctgcgtggaggatatcaacttccagccggatacctatcgcaagctgctgaccaaaaccctgtttgtcgcccgcattctggaaaaatacagccagccgggcgagaagatcggcctgatgctgcctaacgccggcatcagcgcggcggtgattttcggcgctatcgcccgcgggcgtattccggcgatgatgaactataccgccggggtgaaagggctcagcagcgcgatagccgccgcggagctcaacaccattttcacctcgcgcaccttcctcgataaaggcaaactctggcacctgccggagcagctgacccaggtgcgctgggtattcctggaagatcttaaaggcgatatcaccctcgctgacaaactgtggatttttgctcatctgctggcgccgcgtctggcgcaggttaagcagcagccggaagacgcggcgatgatcctcttcacctccggttccgagggcaatccgaaaggggtggtgcacagccataagagtctgctgtccaacgtcgagcagatcaaaactatcgccgactttaccgccaatgaccgctttatgtcggcgctgccgctgttccactcttttggcctcaccgtcggcctgctgacgccgctgcttaccggggcggaagtgtttctctatcccagcccgctgcactatcgcgtggtgccggagctggtctacgatcgcaactgtacggtgctgttcggcacttcgaccttcctcgccaactatgcccgtttcgccaatccgtacgatttctaccgcctgcgctacgtggtcgccggggcggagaagctgcaggagagcaccaaacagctgtggcaggataaattcggcctgcgcattctcgaaggctatggcgtgaccgagtgcgcgcctgtggtctcgattaacgtgccgatggcggcgaaggtcggcaccgtgggccgcatcctgccggggatggacgcccgcctgctggcgatgccaggcattgagcaaggggggcggctgcagctgaaagggccgaacatcatgaaaggctacctgcgggtggaaaaccccggcatgctggaagcgcctgcggcggaaaaccagcacggcgagatggaagcgggctggtatgacaccggggatatcgttaccttcgacgagcagggctatgtccgcattcagggccgcgcgaagcgcttcgccaaaatcgccggcgagatgatctccctcgagatggtggagcaggtggccctcggcgcgtcgccggacaaaatgcacgccacggcgattaaacaggacgccagcaaaggcgaggcgctggtgctgtttaccaccgataatgaactgactcgtgaagccctgctgcgctacgctcgccagcacggcgtaccggagctggcggtgccgcgagatatacgctggctgaaacagctaccggtgctcggcagcggcaagccagactatgtcaccctgaaaaatatggtcgacgaggcggaaacaacccatgagtga

SEQ ID NO: 134708 - DNA, 1014 bp, Enterobacter cloacae
  misc_feature (175)..(184): n is a, c, g, or t
atggcgactattaaggatgtagcccgactcgcaggagtctccgtcgctaccgtctcccgcgtcatcaacaactctcccaaagccagcgaagcttcgcgtcagtccgtgggcgcggcgatggaaaccctgaactatcaccccaacgcgaacgcccgggcgctggcccagcagtcannnnnnnnnngcctggtggtgggcgatgtctccgaccccttcttcggcgcgatggtcaaagccgtcgaacaggtggcctaccgcaccggcaattttttgctgattggcaatggctaccacaacgtgcagaaggagcgccaggcgatagagcagctgatccgccatcgctgcgcggcgctggtggtgcacgccaaaatgatccccgatgaggaactggcggggttaatgaagcagatccccggcatggtgctgatcaaccgcatcctgcccggatatgaaacccgctgcgtggcgctggacgaccgctacggcgcctggctggcaacccgccatttgatccagcaggggcacacgcgtatcggctatctgtgctcaaaccatgatatctccgatgcggaagatcggctgcaggggtactacgcggcgctggaggagagcggcctgccgtgcaacgaccggctggtcacgtttgccgagccggatgaaagcggcggcgaacaggcgatgaccgaactgcttggccgcggccgccactttagcgccgtcgcctgctataacgactcgatggccgccggcgcgatgggggtgctgaatgacaacggcatcgacgttccgcgggagatttcgctgattggcttcgacgatgtcctgatttcgcgctatgtccgcccgcggttgactaccgtccgctatccgatcgtcacgatggcgacccaggcggccgagctggctttagccctggcggagcagcggccggcgccggagatcacccatctgttcagcccgacgctggtccgtcgtcactcggtggtcgccccgcaggaaggcgataagtcatag

SEQ ID NO: 134709 - DNA, 492 bp, Enterobacter cloacae
  misc_feature (151)..(160): n is a, c, g, or t
atgacgatcctgccgctgtacgctgcgccgcagtacgccccgcaggtgaccgactggttgtggcaggcctttggcggcgagacgctgccgcggcaattcttcgccagcatcgtgcagcatagccagacggcggaggcgctgccgttgaccnnnnnnnnnncctttattgccgtggaaggcgagcagttgctcggcacgattggcctctggcgctgcgatttgatcagccgccaggatttgtttccctggctggcggcgctgtacgtcgcgcccgccgcccgcggtcaggggctggccggaaaactgcagcggcatgtgatcgattatgcccgccgcgcgggctttcgggagctctatctctactccgcctgccgggatttctatgaacgcttcggctggcgctacatcggcgaggggctggattacccggccaccgccgtgcacctctatcgctatgacttatcgccttcctgcggggcgaccaccgagtga

SEQ ID NO: 134710 - DNA, 774 bp, Enterobacter cloacae
gtggaaaaagcgatagttccgccggaaaagaagccctatcaggagattggtgatgacctgcgcgcccagatcgcgcaggggcgctacccggtcgggtcgcgtttgccgccggaacgccatattgccgaaacctatggcgtcagccggaccatcgtgcgcgaagcgctgctgatgctggagctgcaggggacggtggatattcgtcagggatccggggtgtatgtcatgcgcattccccacgagaacgacagcgaagaggagcagctgctcagcagcgacgtcggcccgtttgaaattctccaggcgcgccagctgctggagagcaacatcgccgcctttgccgcgaaaatggccacccgcgccgatatcgacaatctgaagcggattattgaacaggagcagcgggcaatcgctctcaacgacaccgcgcaggataacgctcgtctgttccatctggtgctcgccggggcgacgcagaaccagatgctgttggcgacggtagagcggatctggctgcagatggacagcagcccgctgtggcagcagttcaatgtgcatattgccagccgcgcctggcggctgaaatggctcggcgaccggcagaccctgctcgccgcgctgcggcgtcgcgatgtgatgggcgcctggcaggcgatgtggcagcatctggaaaacgtcaaaaacagtctgctggagctgtccgatgaagacgcccccgactttgacggctatctgttcgactcggtgccgatttttcaggggaagctggtatga

SEQ ID NO: 134711 - DNA, 1428 bp, Enterobacter cloacae
atgactaccgtacggatgaccattcccgatgattttatccttggcgcggcggcttccgcctggcagaccgaaggctggagcgggaaaaaaccagggcaggactcctggcccgatctctggtacaaaaacgatcgccacgtctggcataacggctatggcccggcggtggccaccgattttatcaaccgctttcaggaagatgtgcagctgatgaagctggccgggctgacccactaccgcacctcaatcaactggtcgcgctttctgaccgactatgaaaacgtcacggtggatgaggagtatgcggcctattatgaccagctgttcgatgcgctgctggccaacggcatcacgccgatgatctgccttgagcattatgaattgcccggctatctgctggaaaagtatggcggctgggggtcgaaaacggtggttgagctgtttgtgcgctacgcggagaaggtgtttgcccgctaccacccgaaggtaacgcgctggtttacctttaatgagccaattgtggtgcagacccgggtctatctggatgctctgcgctggccctatgagcagaacaccagcacctggatgcagtggaactatcataaggtgctggcgaccgccagcgtcgtgaagcggtttcgcgagctcggctatcccgggaccgtcggctgcatcctcaatccggaggtgacctacccacgctcacgcgccccccatgacctgcgcgcggcggagatctacgatctgttctacaaccgcatgttcctcgacccgctggtgcacggcgtctggccgccggagcttctcgcgctgcttgagcagcatcaggtgacgtgggagaccagcgaggaggatctggcggttatccgcgagcacaccgtcgatgagctggggattaatctttactacccgcaccgggtcaaagccccgtcgcgggcctggcatccgcacaccccgttccatccggcctggtattatgagccgtttgagctgcccggccggcggatgaacgcctcccgcggctgggaaatctacccgcaaatcatctttgatatggcgatgcggataaaaaatgactatcgcaacatcccgtggttcgtggcggagagcgggatgggggtggaaaacgaaggccagttccgtaaccgcgaaggcgtcatcgatgacagctaccgcattcgttttatcagcgaacatctgtggcacaccctgcgcgcccgcgaggcaggggccaactgccagggctatatgctgtgggcgtttaccgacaacgtatcgccgatgaacgcctttaaaaaccgctacgggcttatcgaaatcgatctgcaaaaccatcgcgcccggcgacccaaagcctcggcgcactggtttcgtcaactgggcgaacggcgtgaactggtgctggatatcgatgatgaataccgctag

SEQ ID NO: 134712 - DNA, 1338 bp, Enterobacter cloacae
atggcattacaggacaaactgatcgacgcgctggggcgtttcgcgacgacattcaacagctatcgctacattatggcgatcaaatcggcgtttattaccctgatgccggtgatcatcgtcggggccttttcggtgctgatctccaatatggtgctggatccgaagaatgggctcgccagcttttcctcgctctcctttcttgcggcgctgaagccgatcaccagcgcgcttaactacgctacgctcaacttcctcaatatcggcgccgtgtttctgatcggtattgagctggggcggatcaacggcatcaaaagcctgtttcccggcctgttggcggtgatctgctttatctgcgtcacgccgaccacggtagagatgatggtcgatggccagatgcacgtggtgaaagatgtcctgctgcgccagttttccgatacccgcagtctgttccttgggatgttcatcgccattctgtcagtggagatttactgctggctggaggggcgcaagggactgaagatcaaaatgccggataccgtgccgccgaacgtctctgcctctttttccgcgctgatcccggcgatcatcaccaccaccgcgatcgccacctttggttttctctttcaccagctgacgggaatgtatctctacgatgcggtctaccaggtggtgcagcagccgctggagcgggtggtgcagagcctgccggggatcctgctgctgatgttcgtcgcccagctgttctgggtgatcggcattcacggcaaccagatgatcaagccgatccgcgagccgctgctgctgggagcgatcactgtcaatatgagcgcttttgagcaggggaaagaggtaccgaacatcatcacgatgcccttctgggatgtctacatgagcatcggcggctcggggctgaccatcggcctgctgattgcggtgatgatcgccaccagacgcaaagagatgaaagagatcgccaagctgtcgataggcccggggctgttcaatattaacgagccggtgatcttcgggatgccgatcatgcttaacccgatcctcgccatcccgtttatcatcaccccgctggtgaccggcagcatcggctatttcgccaccctgaccggcttcgccggcaaggcggtggtgatggtcccctggaccacgccgccgctgatcaacgcctggctctccaccgccggctcgatgggggcggtagtgacccagcttatctgcatcgtcgtcgcggtgcttatctatctgcctttcgtcaaaatcgcctcccgccgtgccgatgccgcgcagcgtcaggtagacaatcaacaaaccgccaaccctgtctga

SEQ ID NO: 134713 - DNA, 1011 bp, Enterobacter cloacae
atggctacaatgctggatgtctcaattcgcgcaggcgtctcgaaagcgacggtttcccgcgtgttgaacggcacaggtcaggtgaaagagagcacccgccaacaggtctttaaagcgatggaagagctgggctaccggcccaatttccttgcccgctcgctggccaatcagaccagcaatagtatcgggctggtcgtctccacctttgacggcttttactttggccgtctgctgcagcaggcgtcacgccagaccgaagcctggggaaagcagcttatcgtcaccgacggccatgatacgccggagcgcgaagaggaagcggtgcagatgctcgccgaccggcagtgcgatgcgatcatcctctatacccggcacatgagcgagaaggcgatcatgtcgctgattaattcgatcgccatgccgctggtggtgattaaccgcgatgtggcgcaggcccgcgaacgctgcgtgttcttcgaacagcaggaagccgccttccaggccgtggagtatctgattacccagggccaccgcgatatcgcctgcatcaccgtcccgatgcatacccctaccggccaggctcgcctgcagggctaccgcaacgcgctgataaaacatggtattgagtgggatccgagccgggtgaagtatggggactcgacgatgacccgcggctacgaactgtgccgggaactgctggacgagaaagcccgcttcagcgcgctgttttcctgtaacgatgatatggcgctgggggcgtcaaaggcgctgcatcaggcggggctgcgtattccacaggatgtgtcgctgtttggcttcgacgatgcgccaagcgcgaaatggctggagccggggctgtcgacggtttatctgccgatcgacaacatgatcactacggctatcgaccaggcgatcaagcttgccaatcagcagccgatagaaacgatcccgccgtttaccggcacgctggtgcttcgcgagtcggtgacgacgggacctttttttaaataa

SEQ ID NO: 134714 - DNA, 1263 bp, Enterobacter cloacae
atgccacactcgctttacgccaccgatactgacctgaccgcggacaacctgctgcgcctgccggcggaatttggctgcccggtctgggtctatgatgcgcagattattcgccgccagatagcccagctcagccagttcgacgtggtgcgttttgcgcaaaaagcctgctctaacattcatattctgcgtctgatgcgtgagcagggggtgaaggtggactcggtgtcgctgggggagatcgagcgggcgctggcggcaggctacgatccgcagcagaatcccgaggatatcgtcttcaccgccgatctgatcgacgacgccaccctcgatcgggtgaaggcgttacagatcccggtgaacgccggctcgatcgacatgctgagccagctgggcgaggtgtcgccgggccatcgcgtctggctgcgcgtcaacccgggctttggccacggccacagccagaaaaccaataccggcggtgagaatagcaagcatggcatctggtacagccacctgccggcggcgctggaagtgatgcgtcgctatcagctgcagctggtcgggatccatatgcatatcggctctggcgttgactatggtcacctggagcaggtgtgcggcgcgatggtgcgccaggtcgtcgactttggccaggatctgcaggccatctccgccggcggcggtctgtcgattccttaccgcgaaggtgaagaggccatcgacaccgcccactattatggcctgtggaaccgcgcccgggagcagatcgcggcccatctggggcacccggtgaaactggagattgagccaggacgcttcctggtggccgagtccggcgtgctggtgtcgcaggtgcgcagcgtgaaagagatgggcagccgtcacttcgtgctgattgacgccggctttaacgacctgatgcgcccggcaatgtacggtagctatcaccatatcaccgctctggcgggggatggccgggatctcagcgccgcgccgcaggtcgaaaccgtggtggccgggccgctgtgcgaatccggggatgtctttacccagcaggaggggggcaaagtcgagacccgcctggtgccggcggtggcgcctggggattatctggtgctccatgacaccggcgcctacggggcttcgatgtcgtccaactataacagccgtccgctgctgccggaggtgctgtttgatggcggtaaggcgcggctgatccgccgtcgccagaccatccaggagctgctggccttagagcttatttaa

SEQ ID NO: 134715 - DNA, 927 bp, Enterobacter cloacae
atgccagccgtcaatttgcgtcatatcgaaatctttcacgcggtgatgaccaccggcaacctgaccgaagcggcgaggatgctgcacacctcgcaacccacggtcagccgcgagctggcgcgctttgagaaggtgctcggcctgcagctgtttgagcggacccgcggtcgcctgcagccgacggtgcagggcctgcgtttgtttgaggaggttcagcgctcctggtatggcctggaccgtatcgtcagcgccgccgagagcctgcgcgagttccgccagggcgagctgtcgatcgcctgtctgccggtgttttcccagtcctttctgccgctgctgttgccgccgtttctcgctcgctacccggaggtcagcctgcagatcgtcccccaggagtcgccgctgctggaggagtggctctccgcccagcgccatgaccttggcctgacggagaccctgcatacccccgcgggcaccgaacgcaccccgctgctgacgctgaatgaagtctgcgtgctgcccgccggccatccgctggcggcgcaggcgacactgacccccgccgattttcagggcgaaaactacatcagcctgtcgcgcaccgacagctatcgccagctgctcgacgccctgttccttgagcatcaggttaaacggcggatggtggtcgaaacccacagcgcggcctcgatctgcgccatggtgcgcgccggcgccgggatctcggtggtgaatccgttaaccgccctggactatgccgatagcggcgtggtggtgcgccgcttcagcgtcgaggtgccgtttaccgtcagcctgatccgccccctccaccgcccgcgctcggcgctggtcgacgcctttgttgcccacctgcagcagagtctgccgcagatcctcacgccgctggcgtcggtcctgcagagagcataa

SEQ ID NO: 134716 - DNA, 714 bp, Enterobacter cloacae
atgaaaaccattggcctgttaggcggcatgagctgggagtccacgatcccctattatcggttgatcaatgagggcgttaaggcgcgactgggcggcctgcactctgccagcctggtgctgcacagcgtcgattttcacgacatcgaagcctgccagtccgccggcgactgggatcgcgccggagagatccttgctgaggccgcggtcgggctgcagcaggcgggggccgaaggcattgtcctgtgcaccaacaccatgcataaagtcgcagatgccatcgccgcccgctgccaggttcccttcctgcatattgccgatgccaccggacgggcgattgccgccaaaggtcagcgccgggtcgcgctgctgggcacccgctataccatggagcagaccttttaccgcggtcgtctgcaggagcagtttgccatcgagacgctgatccctgaggctgacgatcgggcgcagatcaatcagatcatcttcgacgaactttgtctcggcaccttcagcgaggcgtcgcgggattattatctgcagacgatcgccgccctggcggagcagggggcggaaggggttattttcggctgtacggagattggcctgctggtgcctgccgagctcagcccgctgccggtctttgacaccgcggcgatccacgcggaagacgcggtcaactttatgctctctgcaggaccgacgccagcggcgtga

SEQ ID NO: 134717 - DNA, 327 bp, Enterobacter cloacae
atgtttatttttcataaagacaccacccttgaagacctcggcaatggcgtaacccgccgcattctggcccacgacggcaaaatgatggccgtggaggtgaattttgccgccggcgccgtcggcccgatgcataaccatcctcacgaacagctcacctatgtgctttccggcgagttcgagttcaccatcggcgaggagacgcgcgtcgtcagcgccggcgatacgttgtataagcggccggggattatgcacggctgcgtctgcctgcagcccggcacgctgctcgatacctttactcccattcgcgaagattttcttgaaggctaa

SEQ ID NO: 134718 - DNA, 891 bp, Enterobacter cloacae
atgaatgaaaacaagctgctgggattggcatggatatcgccctatatcatcgggctgatcgtctttaccgcttttccctttgtttcatctttctttctcagttttaccgagtacgacttgatgagcccgccggtatttaacggcatcgaaaactatcgctatatgttgaccgaggatagcctgttctggaaatcgatgagggtgacctttgcctacgtctttttaaccatccccttaaaactggctttcgccctcggcattgcttttgtgctcaatttcaaactgcgcggcatcggctttttccgcaccgcctattacatcccatcgatcctcggcagctcggtggcgattgccgtgctgtggcgcgccctgttcgccattgacggcctgctgaacagttttctcgccgtctttggcatcgatgccatcaactggctgggggaaccctccctggcgctgatgtcggtcaccctgctgcgcgtctggcagtttggctccgcgatggtcatcttcctcgccgcgctgcagaacgttccgcagtcgcagtatgaggcggcaatgattgacggcgcctcaaagtggcagatgttcatgaaggtcaccgtgccgctgatcaccccggtgattttcttcaactttattatgcagaccacccaggcgttccaggagtttaccggcccgtacgtgataaccggcggcggtccgacctattacacctacctgttctcgctctatatctacgataccgcctttaagtacttcgacatgggctatggcgccgcgctggcgtgggtgctgttcctcgtcgtggcggtctttgcgtcgatcgcctttaagtcatcgaaatactgggtcttctactccgccgataagggaggcaaaaatggctga

SEQ ID NO: 134719 - DNA, 903 bp, Enterobacter cloacae
atggctgatattcaacagatggcgccggtgatgagcgacgccgatcgtgaggtcgcccgtacgctgcgccgggaaaaggtgagccgggtggtgcgctacgtcgtgctgatattcgtcggcctgctgatgctctacccgctggcgtggatgttctccgcctcgttcaagccgaaccacgagatcttcaccaccctcgggctgtggcctgcccatgccacctgggacgggtttatcaacggctggaagaccggcaccgaataccatttcggccactatatgctgaacacctttaagtatgtgatcccgaaagtggtgttaacgatcatttcctccaccatcgtggcgtacggcttcgcacgctttgagatcccgtggaagaagttctggttcgcaacgcttatcaccaccatgctgctgccaagcaccgtcctgctgatcccgcagtacctgatgttccgcgaaatggggatgctgaacagctatctgccgctgtacctgccgctggccttcgccacccagggattctttgtcttcatgctgatccagtttctgcgcggcgtgccgcgcgatatggaagaggcggcgcagatcgacggctgcaactccatccaggtgctgtggtatgtggtggtgccgatcctcaagccggccattatctcggtggcgctgttccagtttatgtggtcgatgaacgactttatcggtccgctgatctacgtctacagcgtcgataagtatcccatcgcgctggcgctaaaaatgtctatcgacgtcacggaaggcgcgccgtggaacgaaattctggcaatggcgagcatctccattctgccgtccatcattgtcttcttcctggctcaacgctacttcgtgcagggcgtgaccagcagcggaatcaaaggttaa

SEQ ID NO: 134720 - DNA, 1128 bp, Enterobacter cloacae
atggctgaagtgattttcaacaaactggaaaaagtctactccaacgggtttaaagcggtgcatggtatcgacctgaagattgccgatggcgaatttatggtgatcgtcggcccctccggctgcgccaaatcgaccaccctgcgcatgctggcgggcctggagaccatcagcggcggcgaggtgcggattggggacaaaatcgtcaacaacctggcgcctaaatcccgtggcatcgcgatggtgttccagaactacgccctctatccgcatatgacggtgcgcgaaaacctcgccttcggcctgaagctgagcaagctgccgaaggcgcaaatcgacagacaggtggaagaagcggcgaaaattctcgaactggaagaactgctcgatcgcctgccgcgccagctctccggcggccaggcgcagcgcgtggcggtgggccgggcgatcgtcaaaaaaccggacgtcttcctgttcgacgagccgctctccaaccttgacgccaagctgcgcgcctcgatgcggatccgcatttccgatctgcataagcagttgaaaaaatctggcaaaccggcgaccaccgtctacgtcacccacgatcagacggaagcgatgaccatgggcgaccgcatctgcgtgatgaagctcggccacattatgcaggttgataccccggacaatctctaccaccagccgaaaaatatgtttgtcgccgggtttatcggcgcgccggagatgaatattcgtcccagccagttggttgagcacggtggtcgcctgcatttgacgctgggcgatcagcggctgccgctcaacgatcggctgcaaagcaaagttgaaacccataagaatcagcaggtgttctttggcgtgcgcccggagtttgtctctctctccgatgaaccgtttgccgaaggttcctgcgcgggtgaaatggtacgcgtagaaaacatgggacatgaattctttgtttatctcagggttgctgattatgagctgaccgcccgcgtgccgtcggacgatgcgaagccgatgattgccaagggactgaatcgcaaagtctatttcacctttgatctcaacaagtgtcacatctttgacgccaaaaccgaacagaacctctctctgtga

SEQ ID NO: 134721 - DNA, 1287 bp, Enterobacter cloacae
atgaaaaacgtgctgataagcgccaccctctccgccaccctgggccttagcgccttctcttcgctagcgcaggatgtcgacctgcgtatgtcctggtgggggggcaacggccgccatcaggtcaccctcaaggcgctggaggaattccacaaacaacatcccgacatcaacgtcaaagcagaatacaccggctgggacggccatctttcacgcctgaccacccagattgccggcggtaccgagcctgacgtgatgcagaccaactggaactggctgccgatcttttcgaaaaatggcgatggtttttacgatctgaataccctgaaagacgagatcgacctcagccagttcgacgccaaagaactgcagtccaccacggtcaacggcaagcttaacggtattccaatttccgtcaccgcccgcgtcttctactttaacgacgaagcatggaaaaaggcgggcatccccttcccgaaaacctgggatgaactcatggcggcgggaaaaactttcgaaagcaagctcgggaaacagtactacccggtggtgctcgaacaccaggacgtgctggccctgctcaactcttatatggtgcaaaaatacaatcagccggccatcgatgagaaagggcgaaaattctcctacagcaaagcgcagtgggcggatttcttcggtatgtataagaagcttatcgacagccatgtgatgccggacacccgctactatgcctccttcggcaagagcaacatgtacgaaatgaagccgtggatccagggcgaatggggcgggacctacatgtggaactccaccatcaacaaatattccgataacctgaagccgccggcgaagctggtgctgggggaatacccgatgctgccgggcgccaccgatgccggactgttcttcaagcccgcgcaaatgttatcgattggcaaatcgacgaaaaacccgcaggcggcggcgaaagtgattaacttcctgctgaacagcaaagaaggggtggatattcttggactggagcgcggcgtgccgctgagtaaagcggcggtcacctacctgaccgaggatggggtaatcaaagccgacgatccggcggtgtccggcctgaagctggcgcaatccctgcccaccgctctgccggtctccccgtacttcgacgatccgcagatcgtcgcccagttcggcaccaccctgcagtacatcgactacggtaaaaagtcggtggaagaagcggccgaggacttccagcgccagaccgaccgcattctgcgccgcgcgatgcgctaa

SEQ ID NO: 134722 - DNA, 1344 bp, Enterobacter cloacae
atgaataaaatctgggtcgggtgttttctgacgtctctgtatctgccatccgttatggcgcaggcgccgttatcgctggaggagcgactggcgcaaatggagcagcggctaaaggcgacggaggcgcgcgccgccagcgcagaggcggaaattaagacgctgaaaggccagcagcaggccgcgacggtcgcccgcgcggcgcctgcttcgccgcgtttgcagctaaatgacaatggcgaattaaaattttatggcgacgtcgaatttaacctcgatggcgccagtcgcaccggcagcctgacgtcggtcaaaaccagcgcgaataaaagctgggcgcccggcgataaagagcgctgggatattaacggtcgtattctgctgggtttcgatggcagacggaatggcgccgacgggcaatatgccggattcagcgtgcagcctctggcggatatggatggcaaaatgaatcttgatgatgcggtatttttcttcggccagcaggatgactggaaaataaaaataggccgctttgaagcctgggatatgttcccgctgaatcaggatacctttattgaatattcaggtaataccgccaacgatctctattccgatggctatggctatatttacatgatgaaagaggggcgcgggcgcagcagcagcggcggtaaccttctgtttagcaaaacggtggataactggtatttcgaagttaacaccctggtggaggacggcagttcgctgtttgtcgatcagaactatcatggtaacgcgctggaaaaccgcaaaaatgtggtgtacgtgcggccggtggcggcgtggcagtccggcgcctggtcggcggccgcggcgatagagagcaatctcgtcaacaatgcttacggctatcagagccagagcggacgctgggtcgaccagtcaaaccgcaccggctacgggctgaccatgagctggaacaccttgaaaagcgatccgcaggatggggcggtggttaatctgagtaccgccctgctggacgcggcggacgaaaccgacttcagcgccgggatcaacgccctttggcatcgcgtggagctgggctatatctatgcgcacaataaaatcgaccagttcaatatggccggggtgaccagcgaatgcgatggcgattgcgctatcctggcgccggggcgctatgacatccataccctgcacacctcctggcagttgccgaatatcatggcgatgccgaacttcaatatttaccttggcgcctatgcctcgtggctcgattccacggcagcgaagagcgggaatcccgatgaacgctacggcgcccgggtgcgctttaaatatttcttctga

SEQ ID NO: 134723 - DNA, 1437 bp, Enterobacter cloacae
atgatgacttacacaatctcccgggctgaacaggtactccagacacaacgccaggcgctgaatctgcgctggtatccgcactatcacctggcggcccgcgccgggtggatcaacgacccaaacggtctggtgtggttcgacggctggtaccatgccttttatcaacatcacccgtactccacccagtggggaccgatgcactgggggcacgcgcgcagtaaggatctggtgcactgggagcatttgccggtagccctggcgccggagggcccggaggataaagacggctgcttttccggctcggcggtggtcgatggcgataccctggcgctgatttacaccgggcataagttccacggcgatcctggcgacgaagccaatctgtatcaggtgcagtgtctggccaccagccgcgacgggatccactttgagcgccaggggatggtggtcgacaccccgccgggtatgcaccacttccgtgacccgaaggtctggcgtgaaggagactgctggcacatgatcgtcggcgcgcgcgaaggcgataccggccaggtgcggctgtaccgttcagccgatctgcgccagtggcaggacgcgggggtgctggatgaagcggaaagcaccatgggctatatgtgggagtgcccggacttcttcaccctcaacggcaaacgcgttctgatgttttccccacaggggatgcaggccgcggggttcagcaaccgcaatctgttccagagcggctatctgatcggcgagtggcagccaggccagcgttttattcgccatggcgaattccgggagatggataacggccacgatttctatgccccgcaaagcttcgccacccccgatggccggcggatcgtgattggctggctggatatgtgggaatcgccgctgccggagcagcaggacggctgggcgggcatgctctccctgccgcgcgagctgagcctgagcgcggatgaccgcctgcagatgcgcccggcgaaagaagtggagagcctgcgcggcgcctggttcccgtggccggtcagcaccctgaacaaccagcagacgacgatggtcgacaactgcgaggcgatggaggtgaatctgcgctgggactgcgcccgcagcagcgccgagcagtatggtctgcgctttggcgatggcctgcgcatctacgtggatgcccaacagcagcgtctggtgctggagcggcattatccgcagtatggcctgtgcgggacgcgcagcgtgccgttgaccgccggggcggatctcaacctgcgaatatttttcgatagctcttcggtggaggtttttgtcaatgacggcgaagcttgcctgagcagccgtatctatccgcaggctccccgccgtgaattagcgttatttgcctggagcggctcggcggcattaaccgaagccggcgcctggcagctcgaataa

SEQ ID NO: 134724 - DNA, 174 bp, Enterobacter cloacae
atggtaacgttaacaaaaaacaaaacgcaggtggattcgctgcgatatatgatgttaatcacaaaagttaacgttaacataatgaagatgcgatcgcgatcaaaaatcaaccgcaacatagctcacgacggcgatagcagaaaatcgtttcactcttttacatcagcgacttag

SEQ ID NO: 134725 - DNA, 996 bp, Enterobacter cloacae
atggcgtccctgaaagatgtagcaaaactggcgaatgtatctctgatgaccgtctcacgggcgctgaacaccccggagcggctgaagcccgagacactggcccgcgtgcaggccgccatcgccgagaccaactacgtccccgacctgtcggcgaagaagatccgcggggcgcgcgccacccccagcaccatcggcgtgctggcgctggataccgtcaccacgcccttttcggtggaaatcaccttatcgatcgaagagacggcccgcgcccacggctggaacagctttgtggtcaatatgttttctgacgatcgtccggaagcggtggtcgacctgctcctctcccaccgtccggacggcattatctttaccaccatgggcctgcgccaggtaccactgccggaaaaactgctgactctgccctgcgtgctggccaactgcgaaagcctcagccagccggtggccagctatatcccggacgatgaacaggggcagtacgacgcggtgaaagccctgcttgccgctggctatcgtcgtccgctgtgcctgcacttacccgccagccagccggcgacgatccgccgccgcctggggctggagcgcgcctgccgggaggccggtatcgaaccggaccatctgagccattcgtatatgggccagggcgatgagcattaccacgatatcccggcggtggtgctggcgcatatccgcgagggtaaacctggctttgactcagtgatctgcggcaacgatcgcatcgcgtttatggtctatcagacgctgctgggccaggggttacgcattccacaggacgtggcggtagtgggatacgacaacatggtgggcattggcgatctgtttctaccgccgctctccacagtgcaactgccgcattatgacatcgggcgcctgagcgccctgcatatcattcacggcgacaaccatcgggagacgcgcaaagtcgccagcccgtggttgccgcgcgcctcacattaa

SEQ ID NO: 134726 - DNA, 762 bp, Enterobacter cloacae
atgattcttgatgcattctccctgcagggaaaagtggccgtcgtgagcggatgcgataccggtttaggtcaggggatggccctcgggctggcggaagcgggctgcgatattgtcggtatcaatatcgtcgaaccggtggagactatcgagcgggtaaccgcgctgggacgccgttttctcagcctgaccgccgacctgcgccagatcgacggtattcctcagcttctggagcgggcggtggcggagttcggccatattgatattctggtcaacaatgccggcctgattcgccgcgaggacgcgctggcgttcagcgaaaaagactgggacgacgtgatgaacctcaacatcaagagcgtattttttatgtcccaggcggcggcgaaacactttatcgcccagggcagcggcgggaagatcattaacatcgcctccatgctgtcgttccagggggggatccgcgtgccgtcgtataccgcatccaaaagcgcggtgatgggcgtcacccgcctgctggccaacgagtgggccaaacacaacatcaacgtcaacgccatcgccccggggtatatggcgaccaacaacacccagcagctgcgcgccgacgagcagcgtagcagcgaaatcctcgatcgcattcccgccgggcgctgggggctaccggccgatctgatggggccagtcgtgttccttgcctcctcagcctccgattacatcaatggctacacggtggcggtggacggcggctggctggcgcgctaa

SEQ ID NO: 134727 - DNA, 1176 bp, Enterobacter cloacae
atggctaaaggcatgcgggtcaaactgaattatcacgtcagccacgatccggataccggggcggaagtcacccgcttaacccccccggaggtcacctgtcatcgcaactacttctatcagaagtgcttttttaacgatggcagccatttactgttcgccggcgagtttgacggccactggaactactatctgctgaatatcgccagcgccgaggccgtccagctaaccgaaggcgccggggataacaccttcggcggcttcctctccccggacgataagtcgctttattacgtgaaaaatgaccgtatcctgctggaagtcaacctgaccaccctcgccgagcgcgaagtttatcgcgttagcgatgactgggtagggtatggcacctgggtggcaaacagcgattgcagcaaactagtgggcattgagattgccaaaagcgactggacgccactcaacgactggcagattttccatgatttcttccataaaggaccgcactgccgcctgctgcgcgtcgacctgcgcagcggtgagagccaggtgatccatgaggaaaaaatctggctgggacacccgatctatcgtcccttcgacgaccataccgtcgccttctgccatgaagggccgcacgatctggtggacgcccgcatgtggctggtcaacgaggatggcagccatgttcgcaaagtcaaagcgcatgctccaggcgaaagctgtactcatgaattttgggtgccggacggttcggcgctgatctacgtctcctatctgaaaggccagcaggggcggacgatctatcgctttgatcccgaaagcggcgtcaacgaggccctgatgacgatgccggcctgctcgcatctgatgagcaatttcgatggcacgctgctggtaggcgatggctcaggtacaccggtggatgtcaaggataccggcggctactccattgataacgatccctggctgtatgtctttaacgtggcggaaaagcgctacttccgcgtcgcgcgccatgatacctcgtgggcgacggtggccaacagtcgccaggtaacgcacccgcacccctcatttaccccggacgatagcgccattctgttcagctccgataaagacggtaaaccggccatctatatcgcgaaattacccgcgcacccgtcaatgctgagcgcctga

SEQ ID NO: 134728 - DNA, 696 bp, Enterobacter cloacae
atgttaaaacgctctctggttctcgccgccctctgcggtatgtcttttgcagcaaccgcggtaacgatagatttacgtcatgaatttattgatggcggaaagagtgataaaagtaatgctgaccgcgtctccgtttctcaccgctttgccaacggcttaggctttaccgtcgaggccaaatggcgttcgggtggcgacaacggttcgcaaccctattcggacgtggtgggcaatggtcatgaagacaccatcagctggcgctggaaagcaacgtcgaacttgttcctcacccccgggtttaccattgagagcaacgacagccgctccatctacaagccgcacctgcacgcgcagtacagcttcgacaacggcttctatgtcgccgctcgctatcgctatgaatacacccgctatccgaacaacgccggcaaagatgatgacaaagttaaccgcggcgacgcgtgggccggatttgtcctcggcgactggcgtacagagctgaactatgtctatgcccgcagctcggaaggggtcagccgcaacgacaataaaccctactcgcaggaatataacgtgaaggtggcctataagctggataataactggtcgccgtatggcgaaattggcaacgtcggggtcaatgaccgcagcgatcgccagacccgcttccgcgttggggtggcttactcgttctga

SEQ ID NO: 134729 - DNA, 1179 bp, Enterobacter cloacae
atgaaggatgtcgtgatcgtcggcgcgctgcgaacgccgattggctgctttcagggcgcattatcgcgccattcagccgtcgagctggggagcgtggtggtgaaggcgctggtggagaagacgggaatcgatccgcacagcgtggatgaggtgatcctcggccaggtgctgaccgcggggaccggacaaaatccggcgcgtcagtccgctattcgcggtgggctgcctaacaccgtatcggctatcaccattaacgatgtctgcggttccggcctgaaggctctgcacctcgctacccaggcgatccagtgcggggaagcggacgtggtgatcgctggcggccaggagaatatgagccgcgctccgcatgtgcttaccgacagccgcaccggcgcccagctgggcaacagccagctgattgacagtctggtgcatgatgggctgtgggatgctttcaacgattatcatatgggcgtcacggcggagaacctggcccgggaatttggcatcagtcgcgagctgcaggacgcctgggcgctcagctcacagcataaggcgcgcaaggcgattgattccggtcgctttcgcgatgagatcgtcccggttgtcaccgagcataacggcgcggcgcgcaccgtggataccgatgaacaaccgcgggtggatgccagcgcggaagggctggccagcctgcagcccaccttcgatcgccttggatcggtgaccgccggtaacgcctcaagcatcaatgacggcgcggcggcggtaatgatgatgagcgaggctaaagcgctggagctggggctgccgatccttgcgcggatccgcgccttcgccagcgtcggcgtcgatccggcgctgatgggcattgccccggtgcatgccacccgtcgctgtctggagcgggccggctggcggctggacgacgtcgatctgatcgaagccaatgaagcctttgccgctcaggcgatctcggttggccgggtactggagtgggatgagcgccgggtcaacgtcaacggcggcgcgatcgccctcggccaccccatcggcgcctccggctgccggattctggtgtcgctggtgcatgaaatgatcaagcgcgatgcccgcaaaggtctggcgacgctgtgcattggcggcggtcagggcgtggcgctggcggtagaacgcgcatag

SEQ ID NO: 134730 - DNA, 798 bp, Enterobacter cloacae
atgcgttattcaccggaagccttaaccgcctttgtcgaggcggtcgacagcggatcgttctccgccgccgcccgccgcctgcgtaaaagtcagtcgacgatcagtaccgccatcgccaatctggaggccgatctcggtgtaatcctctttgacagggcaacgcggcaaccgacgctgaccccgcagggggagcaggtgctgagctatgtcaaagcgattcttgccgccagcgagcggctggacgaactggctgtgtcgctgtccggcgagacggagccgcggctgaccttcgtgctctccgatactctgcacccggacgtgctggaagatctgctggtgcagtttgaccgccgctttcctcataccgagtttgagtgtttgattggcgaagacgaggatgtgatcgatctcctgcaaaaatcccgcgcccaggtggggctgattgaggcgagggagcgctaccccaccgatatcggcagcacccgcctgccgctgcagacggcgatgggcatttatgtagcccctggccatccgctggcggcgcagggtaaggtcgcctgggatgagctgcgcagctggcgcgagctgcgtttgagcacctttctggccagcgccaccgaacctgccgcactgcccagcgcgctggtggcggagtttgcgccgcagggcgggctggtggcgctcgatatccccggctggccgcgggcaatttcagtcgatctgctgtggaataagaaagcgccgccgggagcggccggcagctggctgcgtcagcatctgcagcggcgtgaacgttaa

SEQ ID NO: 134731 - DNA, 462 bp, Enterobacter cloacae
atgcaacagaccccacatcagcgcaagacgctcaccgaacgcgttatccacgccatcaccttcgaaggactggcgacgctgatcctcgcccctaccgccgcctggctgatgcagcgctcggtagtggagatgggcggactgagcattctgctcgccaccctggcgatggtatggaacattatctataacgcggcgttcgatcgcctgtggccagtctcccgcttcccccgccagctgaaagtacgcgccctgcacgcgctcggtttcgaaaccggattcgtcatcattggcgtcaccatggtggcgatcgtgctgggcgtctcgctgctgcaggcgtttatgctggagatcggttttatgcttttcttcctgccctacaccatggcctttaactgggtatgggacaccctgcgcgagcgcgttattcgttaccgccgcccgcgccagacggcgcgcggttaa

SEQ ID NO: 134732 - DNA, 1230 bp, Enterobacter cloacae
atgtctaaaatttggtctaaagaagaaactctatggagttttgccttatatggcactgcagtaggcgctgggacgctatttctaccgatccagctgggttcggctggcgccattgtgctgttcatcaccgcgctggtcgcctggccgctcacttactggccccacaaagcgctgagccagtttattctctcggccaatatcgcgccgggaaccgggatcaccggcgcagttaatcactactatggtaagaaaattggcaacctgatcaccggcctctatttccttgccttctttgtggtggtgctcatctacgccgtggccatcaccaactcgctggccgaacaggtggcgcatcgcacgccgatgaccccagggctgcgtgcgctgctgagtctgggggtcgtgctggtcctcaacctgatctttctcatgggacggcaggtcaccatcaaggtgatgggctttctggtcttcccgcttatcgcctgtttcctgtttctctccctctatttaatccgcgactggcatccggagcatctcaccagccagatgcagttcagcccgcagacgctccaccaggtctggatctctattcccgtgatggttttcgcttttagccatacgccgatcatctcgacttttgctatcgatcagcaggagaaacacggcgacctggccatgggtaaatgcaaaaaaatcatgaaggtggcctacaccatcatctgcgccagcgtgctgttttttgtcttcagttgtctgctggcgatcccggcaacctatatagagaccgcccgcgatcagggggtgactatcctctccgccctgtcgatggtgccaggcgcgccgggatggctggcggtgaccggcatcatcgtcgccgtcgtcgctatgtcgaaatcgtttctcggaacctacttcggagtgattgaaggcgccagcgaaatcgtcaaaagctcgctgggcctgctgggcgtgcgtaagagccgcgctttcaaccgcgcgatgtcgatcctgctggtctccgccttcacttttgcggtgtgctttatcaacccgaatgcgatctcaatgatctacgctatcagcggaccgcttatcgccatgatcctgtttattatgcccacgctgtcgacatggctcattccggcgctgaagccgtaccgctcggtgggtaacgccattacgctggtggttggtctgctctgcgtgtcggtgatgttcttcggctaa

SEQ ID NO: 134733 - DNA, 879 bp, Enterobacter cloacae
atgtccagtgtcaccttatccggtcgcggcacgctcggcgatcgccaggtctatcgcttaggttacggcgcgatgcagctggccggccccggtgttttcggcccgcccaaagatcctgaagaagcggtgcgcgtactacaggccgccgtcgaggccgggataaaccatatcgatacctctgatttctacggtccacatgtcaccaatcagttgatccgcaaagcgctccacccctaccctgacgatctgtgcattgtcaccaaggtcagcgcccgccgtgacgagaaaggcaactggctaccggccatgtcgcccgccgaactgacccaggccgttgaagacaatttgcgtcacctggggctcgaggtactggaagtggttaatctgcgcagtatgctgagcccgcacggcccggtggagggttcgctggaggcgccactcgccaccctgctggaactgaaagagcgaggattaatccgccatatcggcctcagcaacgtgacggcaaagcaggtcgcggatgcgcagaaaatgacgcccatcgtctgcgtgcaaaacctttataacgttgcccatcgcgccgacgacgcgctggtggatgcgctggccgcccagcacatcgcctgggtgccctttttcccgctgggcggttttacgccgttgcaggcgcaggagttgaacgaggtcgcggcttcgcttgaggcgacgccgatgcaggtcgccctcgcctggctgctccagcgagcgccaaatattctgctgatccccggcacctcctcccgcacgcacctcgcggaaaatattgccgctgctgagctggtcctgcccgcggaagcgctgcgcaccctcgataatatcgccaccgccgcgcgccgctga

SEQ ID NO: 134734 - DNA, 705 bp, Enterobacter cloacae
atgacagagggaacgataaagaccagtaagtatgaaattattgctattttcagagaggagttgcgcaaacgtactgaaattgaaatattttttaacaacaccagtatcataacccaactgacgcgcgtggactttgccgagtttcatattcagacccatcgcaaaatcccgtccgggcataaaattcgctttctcctgcatagcgattcagggaaaatagagtttaatgcggccctgacaaaacatgacaatagcggtgtcgataaaggtatccgctacgctttttcattgcctgaatgcctgcaggtagtgcagcgtcgccgcgatccccgctttcgtttacgccatgagcatgacttttattgccgcggccgccataaaaacggcgaaaactatcttttcgatatcaaagacatttcagatggcggttgcgcattgatgaccaaaacgccgaatcttaaatttctcagccacaacgccttactgaaaaacgccgtacttatgcttgcagaatatggcgagatcaccatcgacctggtggtcaaaaatgtcattgttatcactctggataacgctaatgaagagagtgagagctactatcagatatcctgccagtttaagttccgccatctcgatgaccagcgcagaatagagaagatactgctggacctgatcttagaagccaagcgcaaaaagagaatctga

SEQ ID NO: 134735 - DNA, 573 bp, Enterobacter cloacae
ttgctgtacaccaatgacaacctcattggtcactcaatctatcactaccttattgatagccatgaaaatgccacccgtctgagttatgccgatgtcatccatgagaaacatctgccactggcccagacgattattttcaatttaattaataaggatatttctgccatcagaatcgtcgatctgctgaatgcgctccgcctttccctgctgcgctgccagcagccggtgctaatggtgaaaagcgacattgtcgggctgtgcagagagttgataaactttgacaacgctatgattattagtgagaaatctccgctaactcttttttcatctatcgtccagcgcgccaaaggcgtcagcgaactgccgccgcgaggattgcgcaaacagctttcaccacgggagtgtcagatcctcgaactgctcattgccaacaataataataagcgtattgccgccctgctcggcattgctcataaaacggttcatagccaccgcatccatatcatgcaaaaactgggtattgataattcccgcactatgaatcagcgtattgccgctctccatcaatgctaa

SEQ ID NO: 134736 - DNA, 804 bp, Enterobacter cloacae
atggaatatcacaacttccagctggtgaacttctacaaagccgaagccgttgactaccagaaagtgctggatgacgtcatggcgattgctgatattctgaccggtatggttgttgatgtgtccgatctgctggaccaggcgcgcaagcgtggcgatttcgtcatgtttgaaggtgcgcagggtacgctgctggacatcgaccacggtacctatccgtacgtaacgtcctctaacaccaccgcgggtggcgtggcaaccggctccggcctgggcccgcgttatgtcgattacgttctgggcatcatcaaagcgtactccactcgcgtgggtgcgggtccattcccgaccgaactgtttgatgagaccggcgagttcctctgcaagcagggtaacgagtttggcgcgaccaccggtcgtcgtcgtcgtaccggctggctggacgccgttgccgtacgtcgcgcagtgcagatcaactccctgtctggcttctgcctgaccaagctggacgtactggacggcctgaaagaagtgaaaatctgcgtaggctaccgtatgccagatggccgcgaagtgaccaccactccgctggctgctgacgactgggaaggcattgagccaatctacgaaaccatgccgggctggtctgagaccaccttcggtgtgaaagagcgtagtggcctgccaaaagccgcgctggactacatcaagcgcattgaagaactgaccgaagtgccgatcgatattatttctaccggcccggatcgtactgaaacgatgatcctgcgcgacccgttcgacgcataa

SEQ ID NO: 134737 - DNA, 426 bp, Enterobacter cloacae; identical to SEQ ID NO: 114196

SEQ ID NO: 134738 - DNA, 2442 bp, Enterobacter cloacae
atgtcacaagatcctttccaggaacgcgaagccgaaaaatacgcgaatcctatccccagccgcgagttcatcattgaacacttaacaaaacgcgaaaaacccgccaatcgtgaagaacttgccgttgaactgaacattgaaggtgaagagcaaattgaagcccttcgccgccgcctgcgcgccatggaacgtgacgggcaacttgtctttactcgtcgccagtgctacgcgctgccagaacgcctcgacctgctgaaaggcaccgttattggtcatcgtgatggttttggtttcctgcgcgtggaaggccgtaaagacgacctgtacctctcatccgaacagatgaagatgtgtattcacggcgaccagatcctggcgcagccgctgggggcagaccgtaaagggcgccgcgaagcgcgcgtggtccgcgtgctggtgccgaaaaccagccagatcgttggccgttactttaccgatgcgggcgtaggctttgtggtgccggatgacagccgtctgagcttcgacattctcatcccgcctgaagaggtgatgggcgcacgcatgggctttgtggtggtggtggaacttacccagcgcccaacccgtcgcaccaaagcggtgggtaaaatcgtcgaagtgctgggcgataacatgggcaccggtatggccgtcgatatggcgctgcgtacccatgaaattccgtatgtctggccgaaagcggttgaagagcagattgaaaacctgcgtgaagaggtgccggaagagtccaaagcaggccgcgtggatctgcgcgatctgccgctggtcaccattgatggtgaagacgcccgtgacttcgatgatgccgtatattgcgagaaaaaacgcggtggcggctggcgtctgtgggtggccatcgcggatgtgagctattacgtgcgtccgcacacgccgctggataacgaagcgcgcagccgcggtacgtcggtctacttcccgtcgcaggttgtaccgatgctgccagaagtgctctctaacggcctgtgttccctcaacccgcaggtggaccgcctgtgtatggtctgcgaaatgaccatctccagcaagggacgtctgacgggctataagttctacgaagcggtgatgagttcccatgcgcgcctgacctataccaaggtctggcatatgttgcagggcgatcaggatcttcgcgaacagtacgcaccgctggtcaaacacatcgaagagctgcacaacctctacaaaacgctggatcaggcgcgcgaagagcgcggtgggatctcgtttgagagtgaagaggcgaagtttatctttaacgctgagcgtcgtatcgagcgtatcgagcagacccagcgtaacgatgcgcacaagctgattgaagagtgtatgatcctggcgaacatctcggcggcacgtttcgttgagaaagccaaagagcctgcgctgttccgtattcacgacaagccaaccacggaagccgtaacctcgttccgctccgtgctggctgaactcggcctggagctgcctggcggtaataagcctgagccgcgcgattacgccgagctgctggaatccatcagcgatcgtcctgacgcggaaatgctgcaaaccatgcttctgcgctccatgaagcaggcgatttacgatccggaaaaccggggccactttggtctggccttacagtcgtacgcgcactttacctcgccgatccgccgttatccggatctgtccctgcaccgtgcgatcaagtatttgctggcgcacgagcagggtcataaaggcaacacgaccgaaaccggagggtatcactactccatggaagagatgctgcaactgggccagcactgttccatgaccgagcgtcgtgcggatgaagcaacgcgcgacgtggcggactggctgaagtgtgactttatgctggatcaggtgggcaacgtctttaaaggcgtgattgccagcgtcaccggctttggcttcttcgtgcgtctggatgagctgtttatcgacggtctggtgcacgtttccagcctcgataacgattactaccgcttcgaccaggtcggacaacgtctgatcggcgaatccggcggccagacctaccgtctgggcgatcgggtggaagtgaaggttgaagccgtgaatatggacgaccgtaaaatcgacttcagcctcatctccagcgaacgtgctccgcgtaacgtcggcaaaaccgagcgtgagaaagcaaaaaaaggcggcaacggtaaagcgggcggcaagcgacgtcaggcaggtaaaagagtaaactttgagccagacagcgctttccgtggtgagaagaaacagaagcccaaggcggcgaaaaaagacgctcgtaaagcgaaaaaaccgtcgaccaagacccaaaaaatagcggcggcgaccaaagcgaagcgcgcggcgaagaaacagcaggcggagtaa

SEQ ID NO: 134739 - DNA, 732 bp, Enterobacter cloacae
atgagtgaaatgatttacggcatccacgcggtgcaggccctgctggagcgcgcgccggagcgttttcaggaagtttttattctgaaagggcgtgaagacaaacgtctgatgccgctgatccacgcgctggaagcgcagggcgtagtgatccagctggcgaaccgccagtatctggatgagaaaagcgaaggtgctgtacaccagggcattatcgcgcgcgtgaagccaggccgtcagtatcaggagaacgatctgccggatctgatcgccgggctggagaacccgttcttcctgatcctcgatggcgtaaccgacccacataacctgggcgcgtgcctgcgtagcgccgatgcagcaggtgtgcatgcggtgattgtgccaaaagatcgctccgcgcagcttaacgctaccgctaaaaaagtcgcctgcggcgcggcggaaaacgtcccgttgatccgcgtgactaacctggcgcgcaccatgcgtctgttgcaggaagaaaatatctggatcgtaggaacagccggtgaagcggatcacaccctgtaccagagcaaaatgaccggccgtatggcgctggtgatgggagcggaaggcgaaggtatgcgtcgtctgacgcgcgagcactgcgatgagctgatcagcatcccgatggcgggcagcgtatcgtccctgaacgtttctgttgcgacgggtatctgcctgtttgaagcggtgcgtcagcgtagctaa

SEQ ID NO: 134740 - DNA, 402 bp, Enterobacter cloacae; identical to SEQ ID NO: 126981

SEQ ID NO: 134741 - DNA, 699 bp, Enterobacter cloacae; identical to SEQ ID NO: 126982

SEQ ID NO: 134742 - DNA, 1086 bp, Enterobacter cloacae; identical to SEQ ID NO: 126983

SEQ ID NO: 134743 - DNA, 654 bp, Enterobacter cloacae; identical to SEQ ID NO: 126984

SEQ ID NO: 134744 - DNA, 393 bp, Enterobacter cloacae; identical to SEQ ID NO: 126985

SEQ ID NO: 134745 - DNA, 615 bp, Enterobacter cloacae
atggctaaaaagaaaaaaacacggaagtctaatccgattcgatctgcatcaggaagccaaaatgcagcgttccgctcttcaccctcaaagcgcaaaagcgggaagtatttgacgctggccattatgggcggtgcagcatttatcgctctgaaggggtgcgatagttcggctgatgataatgacggtgatggcgtgttttacgcatcgccgcaagcgtgcgttgacggtggcaatagcgctcaggtttgcagcgatgcatggaacaatgcgaaagctaaatttgaagcagatatgccgaaaaaaatgtccagggaagactgtatacgtcaattcgagaactgctattacgacaatatcgaaaacagctggataccggttctgtcaggattcttacttaataaaaaagtcagagaagacgctgatgaagggtacaggtatacaagcggaggttcattttactcttcccgtcctgtgtggcgaagctcttcatcctatgtctggcactccggtaagcaggccagtagtcaaatgggctatacaacaaaacgcgtatcaaccatttctcgtggtggatatgggcgctcatccagtgcgcgtggaagttgggggggataa

SEQ ID NO: 134746 - DNA, 1164 bp, Enterobacter cloacae
atgttacgtcatgacgtccccgttcgtccggggctggacaaaattgcccacgaccatggttttcattttcatatcatcgacgatgaaatttactgggatgaaagccgtgcctaccgttttacgttacagcaaattgaagaacgaatagaaaaacccacggctgaactccatcaaatgtgtctggatgtggtggatcgtgcggtaaaaagtgaagaactgatgacgcagttggccatcccgccgctttactgggatgccattgcggaaagctggcacagccaggatccttcactgtatggccgtatggactttgtctggactgaagaaggtagcgtcaaactgctggaatacaatgccgacacgccgacgtccttgtatgagtcagcctactttcagtggcaatggatggaggacgctcgtcgctccgggatcattccgcgtgacgccgatcagtttaattccattcaggataagcttgttgctcgctttgaagaattagccaccgatattccactttacttctgctgctgcaaagagagtgaggaggatcgcggcacgcttctttatctggaagattgtgccgtccaggccgggctgaacacccgctttatctatatggatgatattggcctgggcaccggcggatttttaacggacattgacgataacgtgatccgccgtgcgtttaagctctatcctctggagtggatgatgcgtgatgaaaatggtccacttctctgcgccagaagagaacagtggctggagccgctctggaaaagcatcatcagtaataagggtattttgcccctcttgtggcggttttttacgggccaccccaaccttctgcctgcgtggtttgaaaatgagttaacgtcgattccaaaaggcgttccgatagttcgtaagcccttgttttcgcgggaagggggaaatgtgactattttcgacgcgcagcgcaatatcattgagagtgaagcaggggattatgcaaacgaacctatgatttatcagggtttccaggcgttaccgcgttttggcaacagctataccttgataggaagttgggtgatcgatgatgaacctgcgggaatcggtattcgggaagacggatcgttgatcacgaaagatacttcgcgttttatcccgcactatatagcgggttaa

SEQ ID NO: 134747 - DNA, 1275 bp, Enterobacter cloacae
atgcaacaggatgcgcacaagcgtgcattaattgcaggctccatcggtaatttcatcgagtggtatgaatttgcggtctacggttttctggcaacggtgattgccagaaacttcttccagcttgagggggaagcggagctcaccagcctgatcctcacctgggcctcgttcgccatcgctttcttcttccgtccgctgggtgcggtggtctttggccgcattggcgacagaattggccgcaaaccgacgctgattattgtgctggtattgatgacgctcgccaccgctgccatcggtatggtgccggtctacgccagtatcgggattgccgcgccgctgatcgttacgctcctgcgtattctgcaaggactgttcgcgggcggtgagtatggcggtgcggtctcgttgatgacggagttcgccccgcgcggcaagcgcggtctttacggggcatggcagtccttcaccgtggcgctcgggctgttagcgggcgcaggcattgtcgcgttgctctctgcccttctctcccctgaagccttgcacgactggggctggcgcattccgttcttcctggcgttgccgatgggtgcggtcgcgctatggctgcgggtgagcatggaagagacgccgagctttgtgcagcaacgggaaaaaccggttgttactcaggccagcaccgccgccacgttcaaaaccatcctgatgggcattggccgcgtgatggtctggtctgcggcgggttatacctatctggtgattatgccgacctatctgcaatctgcgctgcacaccggttttaaccaggcgctgctgattgcggtgatttctaacattgggtttgcgctcacgatcattccatcgggtatgctgagcgacaggatcgggcggcggacggtgatgattatcgccaccgtgctcctgctgatcctcgccctgccgctgctgaaaattttgcaggcggagtccagcacgctggcggttaaagcgattgtggtgctgattgcgggaggtctggtggggatgctggcagggccggggccggcaatgctgtctgagatgttcccgacgcgcgtgcgttataccgggctggggctggcctattctctgtcgaatgcgatcttctcaggctgtgcagggctgatcattaccgggctgattaaagagacgggcaatctggatattccggcgtactacgtgatggcaacggcggtggtgagtattttcgcgctgatgacactgaggaaggatgaccatttgcggtctctggaggagtga

SEQ ID NO: 134748 - DNA, 1623 bp, Enterobacter cloacae
atgcactggcagacacataccgtttttaatcaacctgcaccgctatcgaacagcaacctttttctctctgattgcgccctgcgcgatgcggtaacgcgcgaaggggctgagtgggatgtggatcttcttgccagcatcggacagcagttgggtacagcggagtcgctggagctgggcaggctggcgaacgttaatccgccggagctgctgcgttatgacgccacgggagagcggctggacgacgtccgctttcatccggcatggcatcttctgatgcaggggctttgcgccaaccgggtgcacaacctggcgtgggaggaggaggcgcggaaaggatcgttcgtcgcccgggccgcgcgttttgtgcttcatgctcaggtggaggcgggaacgctatgcccggtgaccatgacctttgcggccacgccgctgttgctacagtcgctgcccaaaccgtttcacgactggttaacgccgctgatgagcgatcgctacgatccccatctcgcaccgggggcgcaaaagcgcggcctgctgatcggcatggggatgacggaaaagcagggcggttcggacgtactcagcaataccaccagggcagagaaatgcagcgatggcagttaccggctggtggggcacaaatggtttttctccgtgccgcagagcgatgcgcatctggtgctggcgcaggcgaagggcgggctttcctgcttttttgtcccgcgtttcttacccgacgggcaacgcaatgccgtgcgccttgagcgtctgaaggacaagctcggcaaccgatcaaatgccagcagtgaggctgagtttcttgatgcttccggctggctgctgggcgaagagggggaaggcgtccggcaaattctgaagatgggcgggctgacgcgctttgactgtgcgcttggcagccacggactgatgcgccgtgcgctctcggtggcgctttatcatgcccatcagcggcagaccttcggcaaaaatctgatcgaccagccgttaatgcgcgacgtgctaagccgtatggcgctggtgctggagggacacacggcactgctgttccgactcgcccgggcgtgggataaccgcaccgacccgcaggaggctgcgtgggcaaggctgtttaccccggccgcaaaattcagcgtgtgcaaagcgggcattccctttgtggcggaggcgatggaggcgctgggcggcatcgggtactgcgaggagagtgagcttccccgcctgtatcgcgagatgccggtgaacagcatctgggaaggatcgggaaatatcatgtgcctggacgtgctgcgcgtgctggcgaagcagccagggatccacgacctgcttgccgatgaatttgcccaggtcaaaggacaggacagacacttcgatcgcagctggcggcagttacagcagaagctgcgtaaaccgcaggaggcgcaggggagggagatcgcgcagcagctctttttactgggcgctggaagtcagatgctgcggcacgcatcgccgcccgtggcgcaggcgtggtgccgcatgatgctggatgcccgtggcggtacgctgatgagcgaacaggtgcaaaacgacctgctgctgcgcgccacgggccgggtcggttaa

SEQ ID NO: 134749 - DNA, 1932 bp, Enterobacter cloacae; identical to SEQ ID NO: 126988

SEQ ID NO: 134750 - DNA, 276 bp, Enterobacter cloacae
atgaaacgaacccttgctttaacgacgctattgctttcagcgggcctgctgagcaccacggcgcagtcggccgaatttgccagcgcggattgcgtcacgggcctgaacgagattggtcagatctccgtcaataatatcacggggagtccgcaagacgttgaacgtgtcgtcgccctgaaggccgatgaacagggcgcatcctggtatcgcatcgtccagatgcaggaagatcaccatgttaatcactggcgcgtgcaggccattctttatgcataa

SEQ ID NO: 134751 - DNA, 303 bp, Enterobacter cloacae
atgcgcaggcttacggctttattgctggtctcgctgctcagcggatgttccgtattgcagggtacgccagaaccggcgccgccggttaccgatcatcctcaggaaattcgtcgtaatcagacggaaggattacaacgcctgggtaccgtatccgcgatggttcgtggttccccggatgatgcagaagacgcaattgaagcacaggccgttgccgcaaaagcagattattacgtcatcacgatgattgatgaaaccattattacgggacagtggtacgcccaaggaattttataccgtaagtaa

SEQ ID NO: 134752 - DNA, 723 bp, Enterobacter cloacae
atgattgaaattgaaactcgccagctgagtgagcatgaaatcatccatgcttttccggctggtaaaggtgaacagccgctgccgacggtagttttctatcatggctttctctcctcgaagctggtctacagctattttgccgtcgcgctggcgcaggccggtttccgggtggtcatgcctgatgcgccgaatcatggggcacgctttacgggcgatgagcaggcgcggctggggctgttctggcaaacgctgcacggcaatctgaccgagttcgccgggctgcgtgacgcgctcttgcaggccgggctggtggaggggaaacggctggcggtcgcaggcgcatcaatgggcggaatgacggcgctggggatcatggccaggcatccggaggtgacgtccgtggcttgcctgatgggatcgggctattttacatcactggcaaagacgctgttcccgccgcaggcccctcaggagattgagaccctgttgtctgaatgggacgtcagccatgcgctttcacagctggccgatcgtccgctgctgctgtggcatggggatgccgatgacgtcgtaccgcccggtgaaacgttccgcctgcaacaggcgctacagcgcgaagggctggacagcaatctgacctgcctgtggggagcaggtgtccggcaccgtattaccccggccgcgctggagtcaaccgtggaattcttacgtcagcacctttaa

SEQ ID NO: 134753 - DNA, 756 bp, Enterobacter cloacae
atgacggaagcgcaacggcatcaaattttactggaactcctggcgcaaacagggtttatcaccgtcgagaaagtgatcgaacgtttagggatctcccccgctaccgcgcggcgggacatcaacaagctggatgagagcggcaagctgaaaaaagtccgcaacggcgcagaggccatcagccagcagcgtccacgctggacgccgatgaacatccaccaggcgcagaatcacgatgaaaaggtgcggattgccagagcggcgtcacagctggtgaatcctggggagagcgtggtgatcaactgtggttcgacggcgtttctgctgggccgtgagatgtgcggcaagccggtgcaaatcattaccaactatctgccgctggccaactatctcatcgaccaggaacatgaaagcgtggtgatcatgggcggccagtataacaagagccagtccatcaccctgagcccacaggacagtgaaaacagcctctacgccgggcactggatgtttaccagcggcaaaggtctgacggcggatggcctgtataaaaccgatatgctcaccgcaatggcagagcagaacatgcttaacgtggtgggcaagctggtggtgctggtcgacagcagcaaggtcggtgaacgcgctggcatgcttttcagccgcgccgagcaaatcagcatggtgatcaccggcaaaaacgccaaccccgagatcctcagcaagctcgaggatcagggtgtcacagtgctgcgcgtttaa

SEQ ID NO: 134754 - DNA, 1065 bp, Enterobacter cloacae
atgagtaaagtgaaaaccatcacccgtgaatcatggattctgagtacctttccggagtggggtagctggctgaacgaagagatcgagcaggaacaggttgctcctggcacatttgcgatgtggtggctgggctgcaccgggatctggctgaaatcagaaggcggcgccaacatttgtgtcgatttctggtgcggcaccggcaaacagagccacggcaatccactgatgaaaaaaggccaccagatgcagcgtatggccggcgttgaaaagctccagccgaacctgcgcaccacgccttttgtgctggatccttttgccattcgccagatcgacgccgttctctctacccacgatcacaacgatcatatcgacgtgaacgtggcggcagcggtaatgcaaaactgcgcggacgacgtaccgtttatcgggccgcagacctgcgtggatttgtggattggctggggcgtgccaaaagagcgctgcatcgtgatgaagccgggcgacgtggtgaaaatcaaagacattgagattcacgcgctggatgcctttgaccgcaccgcgctgatcaccctgcctgccgatcagaaagccgcaggcgtactgccagacgggatggatgagcgcgcggtgaactacctgttcaaaacgcctggcggttccctgtatcacagcggtgactcccactactccaactattacgcgaagcacggtaacgagcaccagattgacgtggcgcttggctcttacggtgaaaacccgcgcgggatcaccgacaaaatgaccagcgcggacatgctgcgtatggccgaagcgctgaacaccaaagtggtgatcccgttccaccatgatatctggtcaaacttccaggccgatccgcaagagatccgcgtcctgtgggagatgaaaaaagaccgcctcaagtatggcttcaagccgttcatctggcaggttggcggcaagttcacctggccgctggataaagacaatcttgagtaccactacccgcgtggtttcgatgattgctttacgattgaaccagacctgccgttcaagtccttcctctga

SEQ ID NO: 134755 - DNA, 1401 bp, Enterobacter cloacae
atggagatcctctacaacgtctttaccgttttctttaatcaggtaatgaccaacgccccgctgttgctgggtatcgtgacgtgcctggggtacatcctgctgcgcaaaagcgtcagcgtgattatcaaaggcaccatcaaaaccatcattggttttatgctgttgcaggcggggtctggcattctgaccagcacgtttaagccggttgttgccaaaatgtcagaggtatacggcattaacggcgccatctctgacacttacgcgtccatgatggccaccatcgatcgcatgggagatgcgtacagctgggttgggtatgcggtactgctcgcgctggcgctgaacatcatttacgtgctcctgcgccgtattaccggtattcgcaccatcatgctcaccgggcacatcatgttccagcaggcggggctgattgccgtttctctctatatcttcggctacccaatgtggaccacggtcatctgtacggcagtgctggtctcgctttactggggcatcacctccaacatgatgtataagccaacgcaggacgttacggacggctgtggcttctccatcggtcaccagcagcagtttgcctcctggatcgcttacaaagtcgcgccgtacctgggcaaaaaagaggagagtgttgaagatctcaaattgcctggctggctgaatatcttccacgacaacatcgtctccacggcgattgtgatgaccatcttctttggtgccatcctgctctcctttggcattgacgtggtgcaggcgatggcgggtaaaacccactggacggtctatatcctgcaaaccggtttctccttcgccgtggccattttcatcatcacccagggcgtgcgtatgttcgtcgccgaactgtcggaagcgtttaacggcatctcccagcgcctgatccctggcgcggtgctggcgattgactgtgcggctatctatagctttgcgccaaacgccgtcgtctggggctttatgtggggcaccatcggccagctgattgcggtcggcatcctggtgggctgcggctcctcaatcctgattattcctggctttatcccgatgttcttctccaacgccaccatcggcgtgttcgctaaccacttcggcggctggcgcgcagcgctcaaaatctgtctggtgatgggcatggttgaaatcttcggatgcgtgtgggcggtcaagctcaccggcatgagcgcctggatgggcatggcggactggtcaattctggcgccgccgatgatgcagggctttgcctccgtcgggctggtctttatggccgtcatcatcctgattgcactgacttatatgttcttcgctggccgttcgctgcaagctgaagaagatgcggaaaaacaaacagcagaagtttctgctcactaa

SEQ ID NO: 134756 - DNA, 306 bp, Enterobacter cloacae
atgaccgtacgtatcctggctgtgtgtggcaatgggcaaggaagctccatgatcatgaaaatgaaagtggatcagtttttaacccagtcaaacattgaccacacggtgaacagctgcgcagtgggtgaatacaaaagtgaactgaacggcgcggacatcatcatcgcctcaacgcacattgccggtgagattagcgtctcggggaacaaatatgtggtaggcgtacgcaacatgctgtcgcctgcggattttgggccaaaactgctggaagtgatcaaagaacacttcccacaagacgtgaagtga

SEQ ID NO: 134757 - DNA, 468 bp, Enterobacter cloacae
atgaaactacgtgattcgctggcagagaataactccatccttttacaggccgaagccagcacctggcaggaagcggtgaagctgagcgtggatctgctggttaaggcggacgttgtcgagccgcgttattaccaggccatcctggatggcgtggcgcagcacggtccctattttgtgattgccccggggctggcaatgccgcacggccgcccggaagagggtgtcaagaaaaccggttttgcgctggtgacgctgaaaaccccgctggtgttcaaccatgaagataacgacccggtcgacattctgatcactatggcggctgtcgatgccaacacccaccaggaggtgggcatcatgcagatcgtcaacctgtttgatgatgaagctaattttgaccgtttacgcgcctgccgtaccgcgcaggacgtgctggatttaattgataacgccactgcggcggccgtttaa

SEQ ID NO: 134758 - DNA, 651 bp, Enterobacter cloacae
atgtcattaccaatgttgcaggtcgcgctggataaccagactctgtctcacgcttacgaaaccacccgtctgattgcggaagaggtggacatcatcgaagtcggcaccattctgtgcgtgggcgaaggagttcgtgcggttcgtgacctgaaggcgctctatccgcataaaatcgtgctggcggatgccaaaatcgccgacgcgggcaaaatcctctctcgcatgtgctttgaagccaacgccgactgggtcaccgtgatctgctgtgcggatatcaacaccgcgaaaggcgcgctggacgtggcgaaagagttcaacggcgacgtgcagattgaactgaccggtttctggacctgggagcaggcgcaggagtggcgcgaagcgggtatccagcaggtggtttatcaccgcagccgtgatgcgcaggccgcaggcgtggcgtggggcgaagccgatatcagcgcgatcaaacgtctggccgatatgggcttcaaagtgaccgtcaccggtggcctggcgctggaagatctgcctctgttcaaggggattccaattcacgtctttattgccggtcgtagcattcgcgatgcggaatctccggtggaagctgcgcgtcagtttaaacgctcaatcgctcagctttggggttaa

SEQ ID NO: 134759 - DNA, 861 bp, Enterobacter cloacae
atgttgtcaaaacaggtcccgcttggcatctatgaaaaggcactccctgcgggggagtgctggctggagcggttacagctggcgaagcagctgggtttcgattttgtcgaaatgtcggtggatgagacggacgagcgtcttgctcgcctggactggagccgcgaccagcgtctggcgctggtgagcgccattgccgaaaccggcgtgcgcgtgccatccatgtgcctgagcgctcatcgtcgttttccgcttggcagcgaagatgatgccgtacgcgccgaagggctggagatcatgcgtaaagccattcgctttgcacaggatgtcggcatccgcgtgatccaactggcgggttacgatgtttactatcaggaagccaacgatgaaacgcgccgtcgtttccgtgacggcctgaaagagagcgttgagatggcaagccgtgcgcaggtgacgctggcgatggagatcatggattatccgttgatgaactccatcagcaaggcgctgggctacgcgcactatctgaataacccgtggttccagctttatccggatatcggcaacctgtcggcatgggataacgacgtacagatggagcttcaggcgggcatcgggcatatcgtggcggtacacgtaaaagatacccgtcctggcgtgttcaaaaacgtaccgttcggtaccggggtggtggacttcgaacggtgcttccagacgctcaaacagacaggttattgcgggccttacctgattgagatgtggagcgaaaccgcggacgacccggcggcagaagtggcgaaagcccgggactgggtgcgcgagcgcatggcgcgggcagggctgatggaggcggaacatgcttaa

SEQ ID NO: 134760 - DNA, 687 bp, Enterobacter cloacae
atgcttaagctgaaacagcaggtctttgaagccaatatggatctgccgcgctatggactggtgacgtttacctggggcaacgtaagcgccatcgatcgcgagcaggggctggtggtcattaagccgagcggcgtggcctatgacgccatgaaagtggacgatatggtagtggttgacctggagggacgcgtcgttgaaggcaaatggcgaccttcttctgatacggcaacccatctggcgctgtaccagcgttacccgtccctggggggcgttgtgcatacccattccacgcacgccaccgcctgggcacaggccgggctggcgatccctgctttgggtacgacgcacgcagattacttcttcggcgatattccctgcacgcgagcgttaacgcaggctgaggtcgaaggcgagtacgaacttaacaccggcagggtcattatcgaaacgctgggtgagacggaaccactgcatacgccgggtattgtggtgtaccagcatggtccgttctcctggggtaaagatgcgcatgacgccgtgcataacgcggtggtgatggaagaggtggctcgaatggcgtggattgcgcgcggcattaacccacagcttcagggcattgacgattacctgatgaacaagcatttcatgcgtaagcacggcccgaatgcttattacgggcagaagtga

SEQ ID NO: 134761 - DNA, 276 bp, Enterobacter cloacae
atgaaaagaatcgcaatcgccattttggctgcgcttttgctcagtgcaaacgcgatggcagccatcagaatagacagccaacaggccagaaacatggatgatgtgcagagcttaggcgttatttacatcaatcataacttcgccactgaaagtgaagcagatcaggcgcttaatgaagaaaccgatgcgcagggcgcaaaatactatcacgtcatgctgacacgtgagcccagcagcaacggtaatatgcacgccagtgcagatatttaccagtaa

SEQ ID NO: 134762 - DNA, 396 bp, Enterobacter cloacae; identical to SEQ ID NO: 114178

SEQ ID NO: 134763 - DNA, 315 bp, Enterobacter cloacae
atgaccaaccgtctggtgttgtccggcaccgtgtgcaggaccccccttcgaaaggtcagcccatcaggaattccgcattgccagttcgtgcttgagcatcgttctgtgcaagaggaagccgggtttcaccggcaggcgtggtgccaaatgcccgtgattattagcggacacgaaaaccaggccattactcacagtttaacggtcggtagcgcagtaatcgttcaggggttcatttcttgccacaaggcaaagaacggtctgagcaaaatggttctgcatgccgagcagattgatttgatagattctggagactag

SEQ ID NO: 134764 - DNA, 228 bp, Enterobacter cloacae; identical to SEQ ID NO: 114176

SEQ ID NO: 134765 - DNA, 450 bp, Enterobacter cloacae
atgcaagttattctgcttgataaagtagcaaacctgggcagcctgggtgatcaggtaaacgttaaagcgggttacgctcgtaacttcctggttccacagggtaaagctgttccagctactaagaaaaacgtagagtttttcgaagcacgtcgtgctgaactggaagccaaactggctgacgttctggcggctgctaacgctcgcgctgaagcaatcaacgcactgggcaccgttactatcgcgtctaaagctggcgacgaaggtaaactgttcggttccatcggtacccgcgatatcgctgatgcagttactgcggcaggcgttaaagtggctaagagcgaagttcgtctgccgaacggcgttctgcgtaccactggtgagcacgaagttgacttccaggttcacagcgaagtgttcgctaaactggttgttaacgtagtagctgagtaa

SEQ ID NO: 134766 - DNA, 930 bp, Enterobacter cloacae
atggataccgctctgcccacgcccgtctttgcccgtcgacatgtggcctatgcctgcgccacgctctgctgtctgctttggggaagctcgtacccggccattaaaagtggctacgaactctttcagatcgcgaccgacgatatcccctccaaagtcgtttttgccggataccgttttctttttgccggtgcgttgctgctgctttttgccctggcccagcgaaagccgattggcaggctcacgcccacgcagtttggccagctcacgctcctcggactgacccagacctccctccagtacaccttcttttatatcggcctggcctacacgaccggggtgaacggctccatcatgaatgccaccgggaccttcttcagcgtgctgctggcacactttatctaccacaacgacaaactcagctataacaaaacgctgggctgtgttctgggctttgccggggtgatgctggtgaacttccacagcgggttaagcgatttccagtttgtctggaaaggtgacggatttgtggtgctggcggcctttattctctctgcggccacgctttacgggaaacgcatttcccagaccgttgacccgacggtgatgactggctggcagctggggattggcggggcggcactggttgcgggaggctatgccacgggcgggacgctggaggtgcacagcatgaaagccgtcgccgtgctggggtatctgacgctgctctcatccgtggcgttcgccctgtggagcgcgctgctgaaagtgaaccgcgtgagtatgattgccccgttcaactttgtcattcctgtagcaggaacggtgctctccgccatcttcctcggcgaaaacattctggacatcaaatacgcgattgcgctggtgctggtctgctcggggatcgggtgggtgaataaacggcgtgcctga

SEQ ID NO: 134767 - DNA, 639 bp, Enterobacter cloacae
atgcccgggcgatttgaactgaaacctaccctggcgaaaatctggcatgcgccggataactttcgcatcatggacccgctgccgcctttgcaccgcagaggcattatcatcggcgcgttgctgatcgtcatcggcttcctgcttccttccggcagtgacaacgttgataccgcgccggtcagccggaatgctgagctcgatatccagtcgcaaagccagccgcagcctgattcacagccgatgcagacgcagctggtcacaccgtctaacgatccgggccaggttgcgccggttgagcctgaaccggttcaggaagatcaggagcaggccgccgccccttcagagccacaggcgcaacagcccaccggcattgagcagcagtggcgttcgtatcgcgtagagccagggaaaacccttgcccagctgttccgcgaccacaatctgccagcaacggatgtgtatgccatggcgcaagtcgagggggcaggcaagccgctcagcaacctgcaaaatggtcagatggtgcagatccgccagaacgccagcggcgtggtgaccgggttaacgatcgataccggaaacgggcagcaggtactgtttacccgccagccggacggcagttttatcagagcacgttaa

SEQ ID NO: 134768 - DNA, 621 bp, Enterobacter cloacae
atgaccaccccgacttttgacactatcgaagcgcaggcaagctacggcatcggcttgcaggtaggacagcagctgagcgaatccggcctggaaggtctgttaccggaagcgctggtggcgggtatcgctgacgcgctggaaggcaagcagcccgctgtgccggttgacgttgtgcaccgtgcgctgcgtgaaatccacgaacgtgctgacgccgtacgtcgcgcgcgtttcgaagagatggcggcagaaggcgtgaaatatctggaagagaaccgtgagcgtgaaggcgtgaacagcaccgagtccggcttgcagttccgcgtaatcaatcagggtgatggcgcaatcccggcgcgcaccgaccacgttcgcgtacactacaccggtaagctgatcgacggtaccgtgttcgacagctccgtcgcgcgtggcgaaccggctgaattcccggttaacggcgttatcgcaggctggatcgaagccctgaccctgatgccagtaggttccaaatgggaactgactatcccgcacaacctggcttacggcgagcgtggcgctggcgcttccattccgccattcagcaccctggtgtttgaagtcgagctgctggaaatcctgtaa

SEQ ID NO: 134769 - DNA, 1410 bp, Enterobacter cloacae
atggtagatcaggtcaaagtcgccgccgcagaagaggcgacgtctgaacagtcgctacggcgaaatctcacgaaccgtcacattcagcttattgccattggcggagccatcggcaccgggctgtttatgggctcgggcaaaaccatcagtcttgccggcccgtcgatcatcttcgtttatatgatcatcggttttatgctctttttcgtgatgcgtgcaatgggtgaattgctgctctcgaatctcgaatacaaatccttcagcgacttcgcgtcagacctgctcggcccgtgggcgggctattttaccggctggacctactggttctgctgggtggttaccggcatggcggatgttgtcgctattacggcctacgcccaattctggttccccggcctgtcggactgggtggcctcgctggcggtgattgttctgctgctgagcctgaacctcgccaccgttaaaatgttcggtgagatggagttctggttcgcgatgatcaaaatcgtcgccatcatcgcgctgattgtcgtcgggctggtgatggtgctgacgcacttccagtcgccaaccggcgtacaggcgtcgtttgcccatctgtggaatgacggcggctggttcccgaaagggatcagcggcttctttgccggcttccagattgcagtgttcgcgtttgtcgggattgagctggtgggcaccacggcggcggaaaccaaagatccggagaaatccctgccgcgcgcgatcaactccattccgctgcgtatcatcatgttctacgtgttcgcgctgatcgtcattatgtccgtgacgccatggagctcggtggtgccaaccaagagcccgttcgtcgagctgttcgtgctggtggggctgcctgctgccgcgagcctgattaacttcgtggtgctgacctctgcggcctcttccgcgaacagcggcgtcttctccaccagccgtatgctgttcggtctggcgcaggagggcgttgctccgagcgcgtttgccaaactgtctaaacgcgcggtaccggcgaaagggctgaccttctcctgcatctgtctgctgggcggtgtggtgatgctctacgtcaacccgagcgtaatcggcgcgttcaccatgatcaccacggtgtcggcgatcctgttcatgttcgtctggaccatcatcctctgctcgtacctggtgtaccgcaaacagcgtccacacctgcatgaaaagtcgatctacaagatgccgctgggcaagctgatgtgctgggtgtgcatggcattcttcgtcttcgtgctggtgctgctgacgctggaagaagatacccgacaggcgctgatcgtcacgccgctgtggtttatcgcgctggggctgggctggttgtttatcggtaagaaacgtatggcgggcatgcgctaa

SEQ ID NO: 134770 - DNA, 663 bp, Enterobacter cloacae
atggccttccgcgaccaacccttaggcgagctggcgctctccatccctcgcgcttctgcgctgttccgtaaatacgatatggattactgctgcggtggtaagcaaacgctggcgcgcgcagcgtcgcgtaaagagctggatgtggaggctatcgaagcggagctggctcagctggctgaacagcccgtcgacaaagactggcgcaccgcgccgctggctgaaatcatcgaccacatcattgtgcgttaccacgaccgtcaccgcgagcagctgccggagctgattttacaggcgaccaaagttgaacgcgttcatgccgataaaccttccgtaccgcgcggcctggcgaaatacctgaccatgctgcacgaagaactttccagccacatgatgaaagaggagcagatcctcttcccgatgatcaaacagggcatgggcagccaggccatggggcccatcagcgtgatggaaagcgaacatgatgacgccggcgaactgctggaagtgatcaaacacaccaccgacaacgtcacaccgccgccagaagcgtgcaccacctggaaagccatgtacaacggcattaacgagatgatcgacgatctgatggaacacatcagtcttgagaataacgttctgttcccgcgtgcattatcgggtaaataa

SEQ ID NO: 134771 - DNA, 966 bp, Enterobacter cloacae
atgattagcggcgtgttgtatgccctgcttgcgggtttgatgtgggggctgatttttgtcggcccgctgattgtgccggagtacccggcaatattgcagtcgaccggacgttacctggcgctggggctgattgccgtgccgctggcgtggctggggcgcgcgcgtctgcgtcagctgggccgccaggactggctcaccgcgctggcgctgaccatgatgggtaatctgatctactacgtctgtctggcgagcgccattcagcgcaccggtgcgccggtgtcgaccatgattatcggcacgctgccggtggtcatcccggtgttcgcgaacctgctttacagccagcgtgacggcaaactggcgtggtcaaaaatggcgccggcgctggtctgcattgccgtggggctggtgtgcgtgaatattgccgagcttcgccacggcctcgaaaacttcagcttgtggcgttacggttcagggatctttctggcgtttatttcggttgtctgttgggcctggtatgccctgcgcaacgcacgctggctgcgggaaaacccggataaacatccgatgatgtgggcgacggcgcaggcgctggtcaccctccctgtctcgttgctgggctatgtgggcgcgtgtgtctggctgggtagccagcaaccggcatttaccctgcccttcggaccgcgcccgtgggtattcgtcgggctaatggtcgccattgccgtgctctgttcgtgggtgggcgcgctgtgctggaacattgccagccagaagctgccgacggtgatactggggccgctgattgtctttgagacgctggccgggctgctctataccttcctgatgcgtcagagcgtgccgccgctgctaacggcctgcgggatcgcgctgctggtcgttggggtggtgattgcggtgagagcgaagccggaaaaaccgatggtcgttccggcgtcggaggggtga

SEQ ID NO: 134772 - DNA, 825 bp, Enterobacter cloacae
gtgcaaggcgtaccggaacagttcactgatgagagagacagcgcgcgctttcgccatctggcgcagctgccgggcctggagctctatcacgcccatatctctgactacgcctttgagcctcatactcatgaagccttcggtatcggcaccatcgaaaccggtgccgaacgcttccgctatcgcggcacccagcatcttgccgcggaaaaatccgtcgtgaccatgaacccggacgagatccacaccggggaatccgccaccgaaggcggctggcgctaccggatggtctacatcgaacccgacctgctggaagaggtcaccggcctgcgccactggtggtttaatgatgtcacgcgccacgaccctttgcgctcgcagctgattggccggttaatttacggcttgtggcacaccaacgatccgctggcgcagaaggggctgctactggatttaattcagacttttcagccgctggcccaccatgcgccggtggtgcaggaggccgcgcaccgcttcgaacgcgttcgcgactatctgcacgacaactatatgcgctcgctgaccctggacgagctggctaacgttgtctcgctcagcccgtaccattttcagcgccagttcaaagcccatttccacgttacgccccaccagatgctgatggccatccggctgtggcgcgcaaaagcattcctcacccacggcatgcctgccgccgaggtggccgccgcgaccgggctgaccgatcagtcgcacctgacccgcgccttcacccgtcgctacggcatcacgcccgtgcgctaccagaagcaggttatgccgcgctaa

SEQ ID NO: 134773 - DNA, 849 bp, Enterobacter cloacae
atgatcgctcttaccggtgccaccggccagcttggccactacgttctgcaagacctgcttaacaccgtccctgccagccagattgtggcgattgtccgcaacccggccaaagcccaggcgctcagccaacagggcgtggttgtccgccaggccgactacagcgacgaagcggcgctgaccgccgcgctgcagggcgtggataaactgctgttaatctcctccagcgaagtcggccagcgtgctgtacagcaccgcaacgtcattaacgccgccaaagccgccggggtgaaattcatcgcctataccagcctgctgcatgccgacacttcgccgctgggtctgcacgtggagcacgtcgaaaccgaaaatgccctggcggcctccggcgtgccttacgccctgctgcgtaacggctggtataccgaaaactatctggccagcgcgccgccggcgctggaacacggcgtatttctgggggccgcaggcgaaggcaaaattgcctctgcgacccgtgccgattacgcggcggcggcagcgaaagtgatttctgaagaggggcatgccggtaaggtgtatgaactggcgggtgataatgcctggacgctgagcgaactggctgcggaattgagcaagcagagcggtaagccggtaacgtatcagaacctcagcgaagccgatttcgccgctacgctgaagggcgttggtctgcctgccgggctggcggagatgctggcggactccgacaccggcgcgtccaaaggcggcctgttcgacgacagccgtaccctgagcaaactgatcggccgcccaaccacatcgctggcggaaagcgtcaaagccatcctgtag

SEQ ID NO: 134774 - DNA, 372 bp, Enterobacter cloacae
atggccgaaccgacgctgagcgagaaactgcgcaccggcaatttgtttgcggaacagtgcccgtcgcgcgatgtgcttaaacatgtcaccagccgctggggcgtgttgattctggtggcgctgcgcgagggaacccaccgtttcagcgatctgcgccgtaagatgggcggggtcagcgaaaagatgctggcgcagtcgctgcaggcgctggagcaggatggttttatcgatcgcgtctcttatccggtggtgcccccgcacgttgaatatagcctgacgccgctcggcctgcaggtgagcgagaaggtggccgccctggcggattggatcgaggttaatctgccctcggtgctggctaaccacggggagtga

SEQ ID NO: 134775 - DNA, 1944 bp, Enterobacter cloacae
atgattaagtttagcgcaacgctcctggccacgctgatcgccgccagcgtcaacgccgcgacggtcgacctgcggatcatggaaaccaccgatctgcacagcaatatgatggacttcgactattacaaagatgccgccacggagaaattcggcctggtgcgtaccgccaccctgatcgaacaggcgcgggcagaagttaaaaacagcgtgctggtggataacggggatgtgatccaggggagcccgttaggcgactatatggcggcaaaagggctcaaagagggcgatgtacatccggtgtataaggcgatgaacaccctgaattacgccgtcggcaacctgggcaaccatgagttcaattacggtctcgacttcctgcgcaaggcgttggccggggcgaagttcccctacgtgaacgccaatatcatcgatgccaaaaccggcaaaccgatgtttacgccgtacctgatccaggatacccgggtcgtggacagcgacggtcaaatccacaccctgcgcatcggctatatcggctttgtgccgccgcagatcatgacctgggataaagccaatcttaacggcaaggtgacggtcaatgacattaccgaaaccgcgcgcaaatatatcccggagatgcgggcgaaaggggctgatgtggtggtagtggtcgctcactccggcctctccgccgacccgtatcaggcgatggccgagaattcggtttactacttaagccaggtgcccggcgtggacgccattatgttcggccatgcccacgcggtgttcccgggtaaagacttcgccaacatcaaaggcgcggatatcgccaaagggacgctgaacggtgtaccggcggtgatgccgggaatgtggggcgatcatctcggggtggtcgatctggtgctaaataacgacagcggtaaatggcaggtaactcagagtaaagcggaagcgcggccaatctatgacgcggtggcgaagaaatcactggcggccgaagatggcaagctggtggcggtgctgaaagccgatcatgacgccactcgcgaattcgtcagcaagccgatcggcaagtccgccgacaacatgtacagctatctggcgctggtgcaggacgacccgacggtgcaggtggtcaacatggcgcagaaagcctacgtcgaacactatattcagggcgacccggatctggcgaagctgccggtgctctccgccgccgcgccgtttaaagtcggcgggcgtaaaaacgatccggcgagctttgtcgaagtggagaaaggccagctcaccttccgcaatgccgccgacctctatctctaccccaacaccctggtggtgatgaaggtcagcgggaaagaggttaaggagtggctggaatgctctgccggacagtttaaccagatcgatcccgccagcagcaagccgcagtcgctgatcaactgggacggcttccgcacctacaacttcgacgtcattgacggggtgaactaccagatcgacgtcactcagccggcccgctacgacggcgaatgtcagatgatccatccgcaggcagagcgtattaagcacctgaccttcaatggaaaaccggttgatccgcaggctactttcctggtcgcgaccaataactatcgcgcttacggcggcaaattcgccggcaccggtgagagccatatcgccttcgcctcaccggatgaaaaccgttcggtgctggcggcgtggattggcgcgcaatcgaagaaggaaggcgcgatccatccggcggcggataacaactggcgtctggcgccgatccacagcaacacgccgttggatattcgttttgagacctcgcctggcgacaaagccgcggcgtttatcaaagagaaagcgcagtatccaatgcgccaggtggccaccgatgatatcggcttcgccatttatcagctggatttgagcaagtaa

SEQ ID NO: 134776 - DNA, 744 bp, Enterobacter cloacae
atgttagaacaagtatgtcagcttgcacggaatgcgggcgatgccatcatggaagtctacgatggaaaccagccgatcaacgtcgccagcaagaaagatgattctccggtcactgcggcggatatcgcagcgcataaagtcattgtcagcggcctgcaggcgctggatccggataccccgatcctctccgaggaggacccgccgtcctgggaagtgcgccagcactggcagcgctactggctggtcgacccgctggacggcaccaaagagtttattaagcgtaacggcgaattcaccgtcaatatcgcgctgattgaaaacggcaagccgacgctgggcgttgtctatgcgccggtgatgaaggtgatgtacagcgcgcaaaatggcaaagcctggaaagaagagtgcggcgtacgcaagcagatccaggtccgcgatgcccgtccgccgctggtggtgattagccgctcccatagcaacgatccggagctgcaggagtatcttgagcaacttggcgaacaccagaccacctcaatcggttcgtcgctgaaattctgcctggtggcggaaggtcaggcccagctctatccgcgcttcgggccgaccagcacctgggacaccgccgccggccatgcggtcgcggtggccgccggggcgcatgttcacgactggcaggggaaaaccctcgactacacgccgcgtgaatccttccttaaccccggcttccgggtctctatttattaa

SEQ ID NO: 134777 - DNA, 558 bp, Enterobacter cloacae
atgaccctacgtagcatactggccgcctcgttactgcttctcccgctgctggccacagcgcataacttcgtcgacggccagcgcgtggcgcccgttggcgtcgcggatcggggagagcttattctggataaggaaaagtttagctataaaaactggaatagcgcccagctggcgggaaaagtgcgcgtggtccagcacatcgccggacgctcgtcagcaaaagagaaaaatgccaatctgatcgaggcgattaaagcggcgggcttcccgcacgatcgctatcagaccaccaccattgtaaacactgacgacgccatcccgggcaccgggatgtttgtacgcaacagcattgaaagtaataaaaagctcttcccatggtcgcaatttatcgtcgacagcaacggcctggtgcggaaggcctggcagctggacgagaagagctcagcgatcgtggtgctggataagaacgggcgtgtgcagtgggctaaagacggcgccctcacccaacaagaggtgcagcaggtgatcgacctgctgcataaattgcttaataaatag

SEQ ID NO: 134778 - DNA, 207 bp, Enterobacter cloacae
atgaaaattttccaacgctacaatccgctgcaagtggcgaagtacgtgaagatcctgtttcgtggacggttgtacatcaaggacgttggcgcatttgaatttgataagggcaaaatccttatcccgaaggtcaaggacaagctgcatctgtcagtgatgtccgaagtcaatcgtcaggtgttgcgtctgcaaactgagatggcatag

SEQ ID NO: 134779 - DNA, 873 bp, Enterobacter cloacae
atggaactggatatcaatgagctactcaatttctcgccattgatgaagacctttaccttcaatgcctgggtcgtcgcaggcttcacgccgattacccgcggctccacgctggactactacattaatcgcccgcaggggatgaaaggttacatcattaatctgaccctgcgcggccaggcgcgggcgaaagcgggcgatggcttcctgctgtgccgggaaaacgatctgttgctgtttcctcccggcgtgccccatcattacggcagggacgaacacagcgagtactgggaccatctgtggatctactttatcccccgcccctactggatagactggctgaagtgggaccaaaccacccacggtatcggcaaaacaaccattaacgatcccgaccagctccagcaactgcgcgatctgttctacgaagtgatacgccaccactctgcgtccgtaccgctgtcagaagcgctggcaatgaacgcgctggagagattaattctccgctgttttcaacagcaacccattagcaaccgccatgcccacgacccacggattaacgccatctgcgactatcttaacgcccacattgcacaggaggtaaaaatcgagactctggcggcgatggtgtttatctccccttcacgtctggcgcaccttttcaaaaatgaactggggcaaacggtctatgcgtggcgggaaacgcagcgcatcaaccgcgccaggtggcttattcagagcacttcgctcccacttaacaaaattgctttatcggtgggctacagcgatccggtctatttcacccgcttgtttcgtaaacataacggcatcccgccgggtgaatatcgcaaacgctatgcggaaatgaagggctaa

SEQ ID NO: 134780 - DNA, 2010 bp, Enterobacter cloacae
atgtctcatttattttatggcgtggcgtattacgatgaatatatgccggaagatcggctggctaaggatatcgccttaatgcgcgaaaccggcattaacgtggtgcgtattgccgagtccacctggagtacgctggagcctgaagagggccagtataatttctaccatatcgaccgggtgctggaggcgatgcatgaggccggcattgcggtcatcgtcgggacgcccacctacgcggtcccggcctggctggcggcgaaacatcccgatattctggtcaccaccgtcgcggggcagcaaaaatatggtccgcggcagatcatggatatcgtcaacccgacctttcgccgctatgccgaaaaaattatccgcacgctgatggcccatgtgcaacaccatccggcgattatcggctggcaactggataacgaaaccaagcattacgacaatattggccgctatatgcaggagggcttcgtgcgcagcctgcaggagaaatatcctgacctccggcagctgaatcacgatttcggcctggattactggagcaaccgcattgaccgctggcaggattttccgccggtggaaaacaccatcaacgccagcctcgcctgcgccttctcccgctatcagcgtcagcaggtcaccgagtatctggcctggcaggcggccatcgttcgggaatacgcccagccgcaccagttcgtcacccacaacttcgatttcgaatggcgcggttactcttacggcgtgcagccgcgggtcgaccattttgcggcggcgcaggcgctggatatcgccggcgtcgatatctatcacccgagtcaggcacacctgaccggacgggaaatcgcctttggcggcgccatcacccgctcgcttaagccgggccagaactacttcgtgctggaaacccaggctcagggtttcgcccagtggacccccttccctggccagctacgcctgcaggcattcagccatatcgcctccggcgccgccatggtctcctactggcactggcattcgattcataacgcctttgaaacctactggaaggggctgctcagccacgacttctcgcgcaacccaacctggcaggaagctaccaccatcggcgccgatttcgcccgcctgtccccgcagctggcggagctgaaggccgaaaatgacgtcgcgttgctaataagtaatgaggcgatggacgctctcaatcacttccttcccggcgacgccaggggcaacatttataacgatatcttccgccgcttccacgatgcgctgtatgaccacaatatcagcctcgacatcatccacgatgtgaacgaggaaacctcgcgctaccgggtgctgatcgttcctggtctgtacgccgccgatgagggcctgctaacgcggattaacgactatatcgcccggggcggcagagcgctgatcggctttaaatcaggctttagcgatgaaaacgtcaaggtgcgcagcagcgcgcagccgggggttttgcgccagagctgcggcgtcagctacagccagttcaccctgccggaagagacgacggtaagctcttgctgcgcagagattgattgccgcaatgacaatcaggctgagctgtggatggaattgctgacgcccgatgacgggacccgtaccctgctgcgctatcagcacccggcatggggcgaatacgccgccgcaacggaggcggattacggtcagggtcgcgccctgtacgttggctttatgccgcagaagggcctgattagccagctgtttgatgtcctgacggcggatctcacgctgaactcgcgaacttccgcctatcgctatccgttagtggttaaaaagatgcgtaaccgcgccggaaataatatccacttcctgttcaattactccggcgaggcgatggatgttgtcagcgagaccctgggtaccgcgctgctgagcggggagacagtatacgtcggccagccgttgcgcctcagggcctgggaatttactatcatcgaaagctaa

SEQ ID NO: 134781 - DNA, 1233 bp, Enterobacter cloacae
atgataacgtcaaataaaaattactttatcagctgtctgtttttcctgttcttctttataggttggggatgctgctacccttatttatccctgtggttgacggaaaccatcggtattaactacacagacgtcggcctggtttattctttcaccgccattgtcgccgtctgcgttcagccattattcggcttcatctccgataaactggtgtatcgtaagaatctgatgtggatgctggcgattattatcacgttattcgccccttactggatttatgtctttgctcccctgttaaaaataaatgtgttcctcggcgcgctggctggcggcctttatattggcatggcctacggcgccggctgcgggatttgcgaagcctacattgataaagtcagccgcgcctccggcttcgaatttgggcgggcgcggatgttcggtggcatcggcgctgcgatcggtacctttgcggcaggaaaactctacggcattgatcagaatatgattttctggttggccagcggcgcaggcgtctgcctgctggtcattgtctggaaaatgcagatcagcgcccacccgcagcagggattgctgtctggcaaagcctcgccggttaccctccgcgatgccgtctcgctgttaaaaattaaaaaattctggttcttcgccctctatgtcattggcgtcggggcggtctatgaaacctatgaccagcagttcgctatctactacagccatttttttgagagtaaagcccggggtgcagaagtcttcggttatttaaccacgggtcagattttccttgatgccatcgtgatgttctttgcgccatggtttgtgaataaaatcggccccaaaaatgcgctgttatactgcgggctgattatgagcttgcgtattatcggctccgcgtgggctattggccccgtctccatcagtctgataaaactcctccacggttttgaaagctcggtgctactcgtcgcggcgttaaaatatattacggctaactttaatcctctgctgtcagcgaccgtttacttaattggcttccaattttcgaaaagctttagctctatttttctctcgaccggtatcggccatatgtaccagagcatgggctttaccagtagctatatcgtactcggcggtatcgctctgtgcttcacgcttatttcttttattacgctggataaagcgcgtgtcttctcttcacaaccggtgcccgcgaattaa

SEQ ID NO: 134782 - DNA, 1338 bp, Enterobacter cloacae
atgttaaacagtattttagtaatactctgtctgatagccgtcagtgcgtttttttcgatatcggaaatttcactggctgcctcacgtaaaatcaaactgaaactgctggccgatgaaggcaacgtcaacgcacagcgggtgctgaagatgcaggagaacccgggcaccttctttaccgtcgtgcagattggcctcaacgccgtcgccattcttggcggtattgtgggcgacgcggctttctcaccggcgtttcatagcctgctcagcgggtatttgtcaccggagctctccgagcagctgagcttcatcatctcttttaccctggtcaccagcttgttcatcctgtttgctgacctgactccgaaacgcatcggtatgattgcgcccgaaacagtggccctgcgcatcatcaacccgatgcgcttctgcctgttagtcttccgcccgctggtgtggttgtttaacggcatggccaacatgatcttccgcatcttcaaactgccgatggtgcggaaagacgatatcacttccgatgatatctatgccgtggtcgaggccggcgcgctggccggggtgctgcgcaagcaggagcatgagctaattgagaacgtgttcgagctggagtcccgcaccgttccttcctccatgaccccgcgtgaaagcgtcatttggtttgatttgcacgaagacgagcagagcctgaagaataaagtggccgaacatccgcactcgaagttcctcgtctgtaatgaagatatcgaccacattatcggttacgtcgattcaaaagatctgctgaaccgcgtgctggcgaaccagagcctggtgctgaccggcggcgtacagatccgcaacacgttgatcgtgccggacaccctgaccctgtcggaagcgctggaaagcttcaaaaccgccggggaagacttcgcggtgatcatgaatgaatacgcgctggtggtcgggatcatcactctcaacgacgtgatgaccaccctgatgggcgacctcgtcggccaggggctggaagagcagatcgtcgcccgcgatgaaaactcgtggctgatcgatggcggtacgccgattgatgacgtgatgcgcgtgctggatatcgacgagttcccgcagtccgggaattacgagaccatcggcggctttatgatgtttatgctgcgtaaaatccccaaacgcaccgacgcggtgaagttctccggctataagtttgaggtcgtggatatcgataactaccgtatcgaccagctgctggtgacccgcatcgataacaagccaacggtgctggtgccgaagcaggcggaaacggcggaaagccagaacgcctga

SEQ ID NO: 134783 - DNA, 639 bp, Enterobacter cloacae
gtgagtctatttgataaaacgcatcttgtcgcccaggcggatgcgctgcctggacgcaatacccccatgccagtggcgacgctccacgcagttaacggccactcgatgaccaacgtcccggcggggatggaagtggcgctgttcgccatgggctgcttctggggagttgagcgcctgttctggcaattaccgggggtttacagcaccgccgcaggttacactggcggctatacgcccaatccgacctatcgcgaagtatgcagcggtcagaccggtcacgcggaagcggtacgcgtggtttatgatccgcaggtgattagctatgagcagttattgcaggtgttctgggaaaatcacgacccggcgcagggtatgcggcagggtaacgaccacggcacccagtaccgctcggcgatttacccgctgaccccggaacagacggaggcggcaaaggccagcctcgcgcgcttccaggcggcgatgaacgacgcgcacgatacccgtcacatcaccaccgagatcgccaccgccaaaccgttctactatgccgaggacgatcaccagcagtatctgtataaaaacccgcacggctattgcggcatcggcggcattggcgtctgcctgccgcctcaggcgtaa

SEQ ID NO: 134784 - DNA, 1734 bp, Enterobacter cloacae
gtgctaaaaatccgccagttatgtgtcaccagccttttgctggtcagcggggtcgccagcgcagcgaatgtgcgtttgcaggttgagggattatccggggagctggagaaaaacgttcgcgcccagctttccaccatccagagcgatgaagtcacgccggatcgtcgctttcgcgcgcgcgtcgatgacgccattcgcgaaggtctgaaagcgctgggttattacgagccgacgattgaatttgatttgcgtccgccgccgaaaaggggacgtcaggtgctgatcgccaaagtgaccccgggagaaccggtgcgcattggcggaaccgaggtgattctgcgcggcggcgcccgcaccgatagcgactacctggcgctgctgaaaacgcgcccggccatcgggacggtgctcaaccacggggattacgacggcttcaagagctcgctgacccgcgtcgccctgcgcaaaggctactttgacagcgagtttcttaagagccagctcggggtctccctcgaccgtcatcaggcgttctgggatatcgattacgacagcggcgaacgctatcgctttggccacgtcactttctctggctcgcaaatccgcgatgaatacctgcaaaacctcgtgccgtttaaagagggcgactactacacctcgcaggacctggccgagctaaaccgccgcctggcggcgaccggctggttcagttcggtggtggtggcgcctgattttgctaagtcgcggaaaaccaaggtgctgcctctgcagggcgttgtctcgcctcgcaaagagaacaccgtggaaaccggggtcggctattccacagacgtcggtccgcgggtgaaagccacgtggaaaaaaccatgggtcaactcgtatggccacagcctgacctccagcgtcagcctctccgccccggagcagcagttcgactttacctataaagtcccactgctgaagagcccccttgaacagtattatctgatgcagggcggttttaagcgtaccgacctcaatgatacccaggccgactctaccaccctgggtgtctcgcgtttctgggagatgtcgagcggctggcagcgagcgattaacctgcgctggagcctggatcactttacccaggcgaacgtcaccaacaccaccatgctgatttatcctggggtctcggtgaaccgcactcgctcccgcggcggcctgatgcctacctggggcgattcccagcgctactcggtggattactccaacaccatgtggggctcggacatcaacttcatcgtgatgcaggcccaggacgtctggatccgtaccctctatgaccgccaccgctttgtggtgcgcggcaaccttggctggatcgaagcggacaactttgacaaggtgccgccagatctgcgctttttcgccgggggcgaccgcagtattcgcggctataaatacaaatctatctcgccgaaggacgatgacggcaagctgatcggggcctcgaagctggccaccggctcgctggagtatcagtacaacgtcagtggcaaatggtggggcgccgtctttatcgatagcggcgaagcggtcagcgatattcgcgagagcgatttcaaaaccggcgccggggtgggcgtgcgctggcagtcgccggtgggaccgatcaagctggatatcgcccggccgatcggcgacaaagaagagcatggtttacagttttacatcggtctggggcctgaattatga

SEQ ID NO: 134785 - DNA, 528 bp, Enterobacter cloacae
atgcagtcccgggattttccactgcagatagctgttaccctgcagcgagcccgccacatccactttgttctgcttcacgttgccggtaattttcagctccggcaccgacatctgccagctgccgccgtacaggctgccctgggtcttgatccggccgttaagcttcgacggccagtccggcacctctttggcggtgttgatgccgtcgagggtcagctcgccgcgccagctgatcgcctgctgccagtcgagcagcgccttcagctcggttttcccttccagggcgttgaccgtcagcttgtcgagattgatctgccgttcattgcctttggcgttgagggcgattttcgccggcggcagcgattgacctttcaccgcggtggagaaggccagcgcatagtcggtcattttgccgctgaacttcagctggacatcgtcggcctggaactgcttctcgccgctgaacggcagcccggcctccgccagctgcgcatccgcgcgcagcgtggccgcgaccggcccgcttaa

SEQ ID NO: 134786 - DNA, 1218 bp, Enterobacter cloacae
ttgcccctggcgggtgttcaccgtcccctgcagggtcgagcgcgtgccgttgaagttcatcgccagctggctcggctgcatatcaaacggcataaagttgccgtcgatatccaccccgctcagctgcatctggccgaacagctgcggacttttcacattgccgcccagacgcagacgggcgttgagccttccctctgccttttcaccacgagcgaaaatcgggttgatcatcgccagcgagaagttgctgatattgacgttgccgccgagattacgccgcccctgcgggtcggtaacctgcacttgcccatccagttgaccattgttggtcaggcggataagccagcccagctcggcgcgattgttgtgcaggtcggcgctgaggttcagcgtatcgaacgccaccggcaacggcgcgtcgttgacgacctgggtcaccttgacgttgcgcccgctgagggtcactttgccctgcggcagtccctctttggtggtgtcccagctcacatcggcattaccagtaaacacgccgctggcctgggtcgcctccggcataaacggcttgagcatcgccagatcgaagcggttgagattcacccgcgcccgtccgctggcgcccgcgtcaatggtttcaggcacgcagagctcggcgttcgggttggtccagcagtgtggcccgatgctgattttctgctccagattgcgatagtccagcgcaatgctgcgcgtcagcgctaccggccccaccggcgtctggaagcgggtatcgctcagcgagcctttccagcgttcggcctgacgatcgaagctgcctgccagcgccagctggccggaaaccggatcgccctgcacgcgcagccgcagctcatgctgtttctctgtacctttggcattgagctgcaccaggctgatattgacccccggctggctgatgcgatccacccgcacgtccaggttaccgccaatctgatcggaggatttcacatcccctttgacgttgacctgggcgatggtcagctcctgccagcgcagcgcccgggcggtgatatcggccagcagctgcggcgcatcgacagtgccgcgcacttttaccaagcccttcgccgtcccgccgagccccggcagcgcattatccaggtgcggcgcatcgatggtggcgtcgagattaagatccttcacccccagctcgcctttgatatcagcgctgttcgggcctaa

SEQ ID NO: 134787 - DNA, 624 bp, Enterobacter cloacae
gtgaacaggcagcgtaccggaacgcatgccgcgctcgtgaccgccgccgtgcatctgtgcttcgatgcggatacgtggcttacgacgaacgtacagcgcgccaatacctttcggtccataaattttgtgaccggagaaggacatcaggtccactttcagctggctcaggtcgataggcagtttgcccacgctctgggtcgcatccacgtggtagatgatgccgcgcgcacggcacatttcgccgatggttgcgatgtcctgcacaacgccgatttcgttgttaacgtgcatgatggaaaccagaatggtgtcatcgcgcatcgccgcttcgagctctttcaggtcgatgatcccgttgctctgcggcgccaggtaagtcacttcgaacccttcacgctccagctgacggcaggtgtccagcacggctttgtgttcggttttgctggtgatgatgtgcttgccttttttctgataaaagttggctgcacctttgatcgccaggttgtcggattcggtcgcaccggaggtgaaaacaatttcacgtgggtcggcaccgaccaggtcagcaatctgattacgggcgatatctaccgcctcttcagcatgccagccaaaacggtgtga

SEQ ID NO: 134788 - DNA, 387 bp, Enterobacter cloacae
gtgaacggtagtcatcagaccttcgatgatgccgaagttgtcgttgataactttagccagcggtgccaggcagttggtggtgcaggatgcgttggaaacgatgtcctggccagcgtaagtttcgaagtttgcaccgcgaacgaacattggggtgttgtctttggaaggaccagtcagaacaactttcttcgcacccgcagtgatgtgtttacgagcagtttcgtcggtcaggaagataccggtagcttcagctacaacgtcaacaccgatttcgttccatttcaggttagctgggtctttctcagcagtaacgcggatggttttgccgttaacaaccaggtggccgtctttcacttcaacggtgccgtcgaaacgaccgtgagttga

SEQ ID NO: 134789 - DNA, 567 bp, Enterobacter cloacae
atgccagaacaccatacccggcgcttcttcctgcatatgatacaggtcaagctgcttaccgattttacggtggtcacgcttagccgcctcttccaggcgttgaaggtatgcgttcagggctttcttatcggcccacgcggtaccatagatacgctgcaacattttgttgttgctgtcgccacgccagtaagcgcccgcgattttcatcagtttgaagtgatgacagaagcgcatgttcggcacgtgcggtccacggcacatgtcgacgtattcctggtgatggtacaagcctggcttgtcatcatgagcgatgttttcatcaagaatcgagactttgtagctctcgccgcgcttcacgaaggtttcacgcgcttcgtgccagctgactttcttcttaatgacgtcatagttggtttcggcgagctcgtgcatacgtttttcgagcgcgtcgatatcttcctgggtcagggtgtggtcaaggtcaacgtcgtagtagaaaccgttgtcgataaccgggccgatcgccattttggtgtttggccacagctgcttgatagcatggcctaa

SEQ ID NO: 134790 - DNA, 300 bp, Enterobacter cloacae
atgcagatcaattcaacgtggcttccgatgctgagtgataaatggaatatcacaagggaaaagcttatgactgatccatgtcagaacgtgtacgtaggggcttacatactggctatgaatataagcaagaatggggtaaattggcaaagtattggcgcttataatgcagggcttaaagaagggcgtgatgcagctcgcattaaatatgcaaaaaaagtttatagcgtatatttagatcttaaaaatggaaaccgaatggatatcattgccaaagctactaaaggtgaaagagtaaaatga

SEQ ID NO: 134791 - DNA, 222 bp, Enterobacter cloacae
atgaaaaaattaaatattgcacttatttttattactggcgtggcatttgtaagtggatgcgaggataaagagcccactcaaacaatagagtattatatgaaaaataaagatgagcgcatgaaagtcattcaggaatgcaaggtgcaacctaagaatgaacaaaactgtgaaaatgcttcaaaggctaatatgcgagttggtaacgatacacctcgattctaa

SEQ ID NO: 134792 - DNA, 543 bp, Enterobacter cloacae
atgaaacttaaaaatttagtatatctttcgatgctcattggtttttcagctaatgcagcagataataatcaactcctcacaggagaggttgcgctttcctgtgaggcaattttatgtctttcaacaagcaagactccaggtgaatgcaatgaggcgctctctcacttctatagcatcaatgccaaaaaactcaaagataagatcaagaaaaggaagaaatttctaagcttgtgcccggcttcgagtgaagagggaatgccagcacttaatgatgcaatagcgaacggagcgggaagatgtgatgctaattatttgaacagaactatgcaacaagaaaaaattacgcgcgagtgccgtggtgggaatagatatgagacatgcaaggtaattacatggaaaagaatatcttctgatctaccgggctactgcaaaatatatcgagataatgattttacagatcttggtctaaatttcgttggtcaatccgtttggcaaaaagaaaaagatttcaataaaagccctaacggacactggacaaattag

SEQ ID NO: 134793 - DNA, 474 bp, Enterobacter cloacae
atgtttaaacttttgacgagaattgcattcgtttcattcttttcgctgtttacaacatctttgtttgcaattaccaaaaatgatgtaaaggtgatacgtgttatagatggagatacatttattattagtgataatctcaaccacatacgtatggctaacatcgatgcaccagagaaaaaacaaacctatggatatcaatcttatttggttttaaaagataagcttgagggaagggtggtaacattggatatcttatctaaagataagtatggacgtttaatttctaacgtttatattaatggtgagagtatcaatgaatacatggtttctaaaggagctgcttgggtttacaaatattattgcaaagatgaaagactctatgctttggagtacaagtctaagattaataaaatagggttgtgggcatctgataaacctttgccaccctggatatatagaagtcaaaacaaatag

SEQ ID NO: 134794 - DNA, 204 bp, Enterobacter cloacae
atgaatgataaactacgtttttttaatagaatgaagttttccaatatttcctcgttaatggtgataatcgttttaaactgctttactgcgttggtggtattggtaatgtcagaaaccggatatattccattcagtaaatttcttgttcctgtagctatatcaacattaatagcgggtgcgatgggggtgcgtttcaagaggtaa

SEQ ID NO: 134795 - DNA, 384 bp, Enterobacter cloacae
atggataattacgatatttaccatgatgaaatattttgccttgatgaaatcaagttgaaatttaaaaatatggggttggattggttatcggcagggcaagccaatcgaaaattaaaacagttactttcagcttccagtgtctcgcttctgcctcgtctacaggaagcttttgatcactatactaccttgttaggtatcactgacttatatcaggttgatgaacaaactctactcgatgaacgtgttaaatacgcatatctgataaagtatagtagtgataaccaagtaatatttgaagatgatcagtgtgtcagattcatgagtgagaaacacaaccttgatttacaggtttgtgcagcctatgtgtgctcacataccccataa

SEQ ID NO: 134796 - DNA, 582 bp, Enterobacter cloacae
atgatctccgatattgaaaaattaaatacctcttcaaatgaatcccttgagcatctaaaagaatgtctacgcattgaagttatcaatcgaagcgggaataagaaattctcatggtttaaagtctttcatcgtgttctctttagctataagaaaagattttatttctggtggcgtttagcaagttatcttaatagctcaccttcaaaaagaaataagaagtgggctcgaaaaataaatgctaaccttcgttgtaagtatggcgttgatattagtgttgaggctaatattggggcaggattaaagctcaatcattatgtaggtataataattaggtcagagtgtatcattgggaagaatgctaacattagacagaataccaccataggtagaaaatcatctgatggcattattggaatgacggtcatcggtgacaatgttgatattggggcgcattcctgcatcattggtgatgtgcgaatcggtgataacgttacgataggtgctatgacattcgtaaataaagatgttccagcaaactctataatctataatccagttacagcagtgataaagaataagtga

SEQ ID NO: 134797 - DNA, 288 bp, Enterobacter cloacae
atgtatgatagtggcatttttaaatatttacttatcgcttcttttatctttggtggcgtgttttattttacttctctttatggtcctggtgctaaaaaagaattgcaagacaatatatccaaaggaaaatattacgttacaaaatgcaagccgatagaagtcaacattgataatggttttttcaaatcccataccaataagcttaattgcgatggggtgattgttaatgtttcgaaagatgaatatgatcgttcagttttgctatacaatgaatcaaaaaacaaatag

SEQ ID NO: 134798 - DNA, 324 bp, Enterobacter cloacae
atgcgttacaaaaataaaccagttacctgtcgtaacgataatctttgggctgatgataaagcattaaactttattgatctggcagaagattatttcagtaattcgaaagcagcgactcaagctgtaatcaatactgatgctattaatgagttgaagcagatacgcgcaattcttgaaaagaatgaagtcaaaatgtacacctgtactgacgggaataagcaatacacagcaggagtatacgttacaattgagggggcgatatatcattgcaaggttaaagacaatcatgctgaatgggagcttgttccacgtacattcaagtag

SEQ ID NO: 134799 - DNA, 483 bp, Enterobacter cloacae
atgaaaccacaacgttatcccgccagtatcatcagggttggcgcagtgctgtacagagcgtttggctggacagatgatgagggcaaatgccatttagaccttgatgaatggcacgtcagatccatacagaaccggacaatatcaaaatactttggcacaaaaaaggtggtgatcagcctggtacaaaaagccgaagatatcacctggcaaaaggataaatggctgacaaaatttcccgcacactatcgccaaaaattttacgagaatgagccgttacctgctggcttatacaccacacccaatatggcattacgctatgagctggaatccacatatcagagtataaagtggtatgaagatgaaaaagcagcgggaatgtggagcgccgatcatgaaattgaatataacggcgaacttaaacttatcaaactcataaaagccagaatcacgcggcttaaaaacattaaagcgggaaaaagctaa

SEQ ID NO: 134800 - DNA, 894 bp, Enterobacter cloacae
atgacggttaagcaactcaatctccgtttcgatgaaacaatcattgtgcgcctgaaatcgacggccagacaggaaggtatttctgttaacacgctcgtagaacgctatctgattaatggcctcgataatgagagcagcgatcaggcggaatatgcactcctgaaagccgaaccctttgcgcccctgagccgactttaccacctgctggcagataacatttcagacagcgaaaataactacgataccgccccgctctctcctgctgaaatacgctttgtggcagaaggagcactgacagaaataaacaggcgcagcgtccagttgccctggtatagtgaaatcaaaacgattgcagaacacgcgctaaaaagcgacacaatcgcttttgatgatgccgacaaactgtttccgttcgcccttcgcctttacctgaaatatcgtgcagaccgcgccacatttgccgccgaaaacacaccggatactatacgttccgtgacgaaagaatatcagcacggaaacctgaactttcgtcttagcgtggaaggaacgatccgtaaccgcatggttccaaaagagcagcgcgtttcaccgctggtacgcctcgatattgacgggaattatttcacggtcatgctgggctgggaaaaatatatttccacggtgcgcctgttacgctatctggagagtgaaagctggacaaaggaaaccccggttattgacgggatcagttttacacgcgccgataagcctgagcactggaaaatgcgcaatgatgatatggaaatcttactgaccgaagaggaattacagtacctttgcaacggtctgctggatgcacaccaccgtaagctgaaatcagtcatgaatatcatgatccggcttaacggtgaatga

SEQ ID NO: 134801 - DNA, 222 bp, Enterobacter cloacae
atgcttggtaaactgttctatcgttgtggtttggcgctgctcactgcctccggtgtgatcagcggggttatttcagcatccttctttatattgctggtcatgcttctggctaagtccgggtataactcagtcgttcctatgttagttgttcttactgtggggttcgctggcacctcgtactggttcctacaggactatcgtaatttccgtaaggccgcgtaa

SEQ ID NO: 134802 - DNA, 315 bp, Enterobacter cloacae
atgaatgccgaagtcggtttttatattgatagattaaaagctgaaattaaaaatatcttcaatgatgggattgttgttgcttacatcgaagccgagccgccagtattaactatggatgggaaagatgacacatctttggttgcttgtgatttatggtgtgataacccttcatcagcatacgatataaacattcttattgaagatgtagcagattttagtgtggtggatacacctgttgttacaaccctggatgatgctaaatcactggctgtgcttatcggtcagcaagtcagtagttatgaggtaagttggtag

SEQ ID NO: 134803 - DNA, 243 bp, Enterobacter cloacae
atgaaaaaaaatattttaacgactatcgtgtatcactattacttagcaaaagcgcaatgcagctcgattaagccattatttatcaataagtttaataatagatccaacatcatttggatgggttctataaagtcaatccgctgttgttatacagatgcctactatgaaacatatattctgcctcttcaacttgaagcgcatgacaagatgcaagaggaatacttatcacaagccccacattga

SEQ ID NO: 134804 - DNA, 924 bp, Enterobacter cloacae
gtgttttatcagggggaagggaggtcgggcgcaactcgtttgtgcctggctgaccgcccggacaacgcagggctctgcccggaggcggcagcaggttttaatcaggatgcggagattgaattgttgagtaacttacccgccggaattttccagaattcacacagcaacgcctgggcgatgcccgtttccctcgatgcggccagaacgatgcgcgatctggccgcgcacctcggcgcgggtctgccaaagtatctgctcgcaccggaagtcgcgctgttgctttcctatatagacgatctggctgcccggatgtattttgacacgctctggaattcgggggcgcgactcaatgaagcgctggcactgacacccgccgattttatcctggagccctcccgcaaataccctcaggccgtggtgacgctgcgcaccctgaaacagcgaaaccgcgaagcaacgcgccgccccggacgacctgccgccgccgaaccggttcaccccgatccgcgctaccgcaaaccacctgagccggggatcaggattgtaccgctgctcgataccgcctacgtgcaacggatgcgcgaatatcttgccacctggcgcaagcgcatacggcatcagcccgtatgggaagtccggtcacggcagacgccgctgaactggcttaacgccgccgtaagccgcgcagaacgtgacggggtaactttctctatcccgatcacgccgcacaccttccgccacagctacgcgatgcacctcaagatgagcggggttcctgacagggtgctccagtcgcttctcggccaccgttacgccaggagtacggaagtctatgccagggtgttctcgctcgatgtcctggccgggaaagggctctcattcagctatgacgcgcagaccgccaggcgcatgctggaagggtga

SEQ ID NO: 134805 - DNA, 168 bp, Enterobacter cloacae
atgacttattatgaatcagttgagactgtgacctttaccagagcaagagcgttgaaagaactacagaatcatggaataccggaatcggaatatcctgttttcttttctgatatgggagataaaagccactacaaggcgcaagctgtactggaatggctgatgtactga

SEQ ID NO: 134806 - DNA, 552 bp, Enterobacter cloacae
atgaagttaacaatggtaatcgtcggggtattgattcttgtatggtgctggcttgggcgcaatggtataaggcgttccagacatttacgcatgcaaaggaaagcccgtaatcagttagatctaatcaacagcttgccggagtttagacaacgcatagcatatttacggaaaattaatgctttcgtttttgaagaaatgttgatggaggctatcgaacgcgccgggcataaggtgtaccggaacaaacgctacactggcgatggaggcattgatggaaaggctcttatcaacgggcattactatttgatccaggcgaaaaggtataccggacatgtgacaaccgatcacgtttcgtcattcagccagctcgttaagagaaacaagtgcaggggaattttttgccatacaggtaaaaccagacctgcaactaaaagcgctataaccgggattgatcatatcgaaatcattagcggtcagaagcttttggatttactggaaggtaagtacatccctagtccggcatttaacataaataccattaagcgtacttaa

SEQ ID NO: 134807 - DNA, 2895 bp, Enterobacter cloacae
atgatgacccacacaattctgactgccgataaatctgtggatcgcgccgcttcctattatgaagatggtgtggacgattattatcagaaggagggggagtcaaaagaatggcaggggaagggcgcagaaatgctggggttacagggagaggttaataaagaggattttaaaaaactgctttccggccacctccctgatggtactcaatttcgtaactcagtgcgccatgatagcagtacaagaattggaatagactttacgtttcaggctccaaagtctgtatccatccaggctttagtgcatggtgatgctgagattattaaggctcatgataaagccgttacgctagctgttgaagaacttgaacgacgtgcaatgaccaggcacaagatagatggaaagtcgtataaagaagaaacgggtaatctgattgtcgctaaattcaggcatgaaaccaatcgagagcaggagcctcacttacatactcatgcggtagccatcaatgccaccaggcgtgccgatggagtttttcgggcgctggtaaatgatgaactgataaaaaattctaagttttatggggcattataccgttcaattctcgcaagagagctagaggctattggctataaattaaggcatgagaatgatgctttcgaactggctcatattacgcgaaaacagatcgagggcatgtctacaagaacacagcaaattgatgaaggtttagctgatatggggctaacccgtgaaacggcaagcgctgagcaaaaaacctatatagccaaaaaaacacgcaaatcaaaagatgtaggcattgacggtgtggtattgcgtgataggtggaaaggtatttcaaatgagctggggattgattttaatggccgcgactggagctattcagacaaggcttctgagaaagctgcatccggtgttgtgcataaactggaagaaatcactatcgagcaagccgcgtcacgcgccgtaaaatttgcaataaatcacttcacagaacgtcagacgatagttcccaaaccggagcttattgaaactgctgtaaagcacagtatgggaagaaccacgctagagcagattgaaaaagaaatcgagaaacttgaagcaaagggattcctaattgttgaggaaaaactctatatatcagcaaactcattgaatggtgctgcattatccaaaaaggcctggataagcagccttactgatgcaggtaaaacatataatgatgcccgtcgccaggttgacctcgcaattgcgaaagggcgtttgactcctacatcaccgcgatacacaacacagaaatctcttgatcaggaaaagcgcattttgcaaagggaggttgaaggtcgtggaaaagccgcacctatcctaagcaaagatgaggcgtcagcctttctatccaagacttcactacgaaaagatcagaaaagcgcaggtgaactgatcctgactactgaaaatagaattatcggtgttcaggggcaagcaggggtaggcaagtcctatatgtccaaatcagtgacggataaaatcaaagaagctggttttaatcttcacgttcttgcaccttacggttcgcaaaaaaaatccctgattgcagacggaatggaggcgcgcactgttgcttcattcctgcatacattaagccgcgaacatacgttagatgaaaaaaccgtgatattggtggatgaggcgggggttttaccaaacaggctaatggataaactgacagagatatccagtaatactggcgcacgtcttgttttgctgggtgatacagaacagacaaaagctgttgaatccggtattccgtttgcacttttacagcgcaatggcatgagcaccgcacttatgaatgagatccagcgacaaaaaggcagccctcagttgctgaaagctgtagagctggccgcagtggggcaggcctccgagtcgctcgcccttgttactgaagtggccgaaattggaactcatgaattacggtataaacagatcgcaaatgaatacgtgtcacttccacaagaaaagcgagatgaaacgctcgtcattacaggaacgaacgagagccgtgtaaaaatcaacgcactaataagacaagagctaaaaattgaatccagcgtcgaaatgaccgcattaacgcgcctggacaccacccaggcaacacgccgctacagcaaatattacacacctgattcaaccattattcagcctgaaaaggattacctgcgctatggccttgagcgaggtaaatcctatcgtgtggttgagcatggcgaaggtaataccctgattgttgagggcgagggaggtaagcgcttaactattaacccggctcatatcaaaaatctgtcagtctacaaacaggagcaacaacggtacggtgtgggcgaaaagctggtaattaccaggaacaatgccgagctggatgtggctaacggagacaggtttaccattacgggtatacaggcaaatcatatttatttgagtgacggtaagaaagagatagctctcgatatcaatcaaaagcagcatcttgattatgcctacgttacaacggtgcattccgctcaggggttaacaaagtcagaagtgctgatgaatatagagacaaaatcaagaaccgtcgcaagagattggtactacgtgggtatttctcgtgcaaaaagccgcgcaaagatattcacggacgacatcaaaaagcttcctgccgccgtgtccagagaaagccaaaaaaccgctgcccttgatttgaataacaagacaacacagaaaatcaacgaaaaggggagggggaaagcgcttactgagccaacaagaacgaagcagatacgcccaaaacaacctacagagaagcagtctgaaaaaggtcatgcgaaaagctaa

SEQ ID NO: 134808 - DNA, 1560 bp, Enterobacter cloacae
atgagtgatgaaatgcaaagatatgctggagagcatcgttttggatttgccttatttgctattagccccgttgtagcatggttcgttacagcggagaaattaggcgttgcgagagttacaaaacctaaaataaaaggccttgtcgaacttttcccccatacctttgaatatcctttgctttatattgttccaatctgtgcagctattgcttctatttttatatggataatggctgttaaattaagcaaaactgaatttaaagggatgaaatataaatacaaactgaggggggctgatttagttagtgctgatgagttaaatcaaaaaacaagaaaaaggaaagagaaacaggttgatttggcaacgatatacatgccaacaaccgttgaaaacctacaaacgcttattgttggtgctatcggttctgctaagacgttaactctatcaaaagtaattttttctattttaatgcgtggtgatcgtcaggtaatagtagaccctgacggcacatttgtttcaatgttttataagccaggcgatgcgattcttaatgcttatgatgcaaggtcgcccggatggtctattttcaatgaaatgcgaagtgatgctgattttgatacctacgcctattcgcttattccgttaggaaaatcttcaacagaagaagaatggaatgcatatggtcgtttattagtttcagaggttggaagaaaattacatgaagaagggcaggctacattagataaattattttactggtgctgtgctgccgatgaagaagctgtagaagaatattgtaaaggtacattggctgaatctttgtttattggtactgaccgaacgattggatcggctcgtttcgtattgtctaacaaactttctgctcatatgaaaatgcctccgggtgatttcagtatcagggattttctggctgacccttcaaagggtaatttgttcattacatggagagaggatcaggttgcgacaatgaaaccgctaatttcttcctttgtggatgttatcggcaacgcaattttatctttacctgaagatgaaagccgtaagatttggctacataccgatgagctggcaacgctggataagctgtttgcattaatgccggttctgacaaaaggcaggaaaaaaggtgttcgcgtcatgtcttgtttgcagaccgtttcccagctttatgctatttggggcaaagaggacggcaacacgctgcgcggaagctatcgtaatcttgtagtcctgggatcggcacaatcagatgaagaaactgccgaaacactttccaggtcgcttggtgatattgatgtagtgcgcaataaaaacagcaagaccagcgcaggtaaaggtaacagtgagactaatggcgatcacgctgaaaaggacagacttgtaacaccatcagaaatatccaacctaccagaccgcgaagggtacgtagcgctcaccaggggttatccggttgctaaggtaaaggttcctactatcagctttaagaagcgcgttcctgagtttgttgagcgcaaaattcttggagggaacatgtcatga

SEQ ID NO: 134809 - DNA, 378 bp, Enterobacter cloacae
gtgaaagatgatgaggtaaaactaaagcaatcggtagtatttaaaaatgcactagctgatattgaaaataaaatcaggcagggtatgacacaaaatgctattgccgaagaaatgggtatgaagctttcgacctggaaaaagtattacatgcgtttcaagtcaaagactaaatcagagcccgcaaatcaacatcaaacattttcgcatgcgaaaaataatgatgaacaagtaaaagaagcagagccagcaagtcaagagaaacaaactgctgagaataaaacatcactcggtgatatattagatcccagcaaaagaagtagttctgtctctgagtttatgatgcaaaagaaaccaataggaaaaggtggtattaaatga

SEQ ID NO: 134810 - DNA, 699 bp, Enterobacter cloacae
atgaaagtcgctacaattaacttctctggtaacaatggaaaaaccacattagctgaacatgtttttgccgcccgtatgcctggtgctttgcagttaactatcgagactattaacgctggtaatgaagatatagaaaaggttcgtggtaaagattttgggcaaatgatggaagcagtaatgcttgcagatcaagctatcgtcgatgttggcgcaagtaatgttgaagataccatgaagttaatgaagcaatactctggttcacatgaagaatttgattacttcgttgttcctgcggttaaagaaagtaagcaactggaagatacccttgcaacaatccaggcgctatcgtcattaggcgttcctgccaaaaagattcgagttgtgtttaacaaggtcgaagttgatgatgatgttgaatcagacttttatcctttgttcgcaatgcatcaggcaaagaaaaactttacgctgaacccgtctgccgttgtgtattcgtctgatatttacaaacagctccgcgcacttaaaaagagcatccctgatttgctggaagatcctacggactggcgtaaaaagttaaaagaggcggcaaatgaagatgaaaagattaccgctgttaaaatgatttcacttaagcgcctcgctgtttctgcgcgtgaaaatcttgatgatgtatttaaagctttaacggctaagtga

SEQ ID NO: 134811 - DNA, 375 bp, Enterobacter cloacae
atgtcaggccttaaatcgcagacaatgacggcggctatggccgctgccattcttgaagatattcaggatctggttactcgcctggaaaaagtggatgtctcaagtaaagagtccggtgatgcattcgtcacccgattagaagaggctcgccgcttactccaggttgctaaccgtgaactgtctaatacgaacggggagatctacaacaaattaaccgcaatacttgatgatacgcatgaggcaagaaaggagatccgttctttactgcacgaacaatctcgcctctcccgccgctatctcttagcttcaatttttattctggtagttagcggcctttctcttttgtcgattttcgtgttgtcacattggggctga

SEQ ID NO: 134812 - DNA, 858 bp, Enterobacter cloacae
atgcaaagcagctcgatgcatagcacgagaggccgacccgaagggtcacgccccattacttatttggtgatgattatgagcaaagcgccaaccagagacacctacctggaattacagtcggcttatgattttttcaataagacattatttgagaaccgcctcccgccctgtcttataactttgcagcgcgaaaaacacacttacggctatttttccagcaacagatttgttgaacgttcagcaggtgatttcactgatgaaattgcaatgaacccctcatattttgggatccgcaccattgaggaatcgctctctacgctggttcatgaaatgactcaccttgaacagcagcattttggtaagccaggacgaggccgttaccacaacaaagagtgggggaaattaatgctcagggtgggtttgcatccatctaacacgggaaaacctggcgggaaaatgacgggcgaccaaatgacgcattacatcattcccggtggggttttcgagaaagcatgcgcggagctgataaccactaatttcactttaagctggattgatcgttttcccccaatccgccccagcactcctttgttaatgccaaaaggaatcagtggcggcgatgaagatgaggacgaggatgatttcacctccggttattcaacgcttagccctgagcctcctgctttcaccctggtgtttcctgtagacgggaaagaaacgcgcacaaagtacgtatgccctttatgccaaactgcggtatggggaaaaaagaatctggttttactctgtggttcctgtgaatcgaagccatcgtttgtggttagccaaaaaaaatgcggtatcgatcaggattactga

SEQ ID NO: 134813 - DNA, 369 bp, Enterobacter cloacae
atgctacagacaaccttagaaaccgttgccgatctgattaaccgcgactatgaatatgatatggagttcctcacattcacgcttacacgttctgatgtgggtagggcgctggagcaagcaggtcaacgcatcactgatgacatgatgaaccagctaatgcgccgtctggatgtacattttgcagaatatgaaaaagatgatcttgtatgcagacacttcgagatgatgcgcagagaagcgaacgagtgcaaaaagatccctgttagcgtagccactatagaaaccattctggaaatggttgaaggaggaggaaccgcggcaaacgatcccgatattgtgaaaacgttacgtgatttactccccagctaa

SEQ ID NO: 134814 - DNA, 492 bp, Enterobacter cloacae
atgctgggcgctaagaaaagactggagaacacaatggttaagtttgaacgttctgcgctgggtgatttcatttgggtttacgaaaatggagtgatggccggaaatatcgaatcgcacggaaatttattcctcgcatacctgggggaacgagtggaaaccgccaaaaagattgctgagtgtttttcattagaacaggcaaaagttcagatgcttttggcgctcgcttctaatgctcgcaaggcacggaatgcggcgggatttgtgccgcgagaacgtgagcgtagccgtgacgatattccgctgtgctcatgtggttcatcagccattctgcaaggccggtactcaactgaaaaggggcttttggtctggagatatgatgtggaatgcgcttcgcgctgcggcaagaagatccgtttgctgggtgacatctttacgtataccgatgcgattgatgcctggttccgcaatgtaaacagcatgccttgcaactaa

SEQ ID NO: 134815 - DNA, 282 bp, Enterobacter cloacae
atggacttatcaacagttatttttttctctgtacttgcaattccagccctatccggtcttgtgctgccgtggttgatggttcgccagggctatcgtgagatcgtcggaatgttttgcttcattacttcagttctttctcttgcgcttattgcgggtgtcgtcggccaagccgccgatctctctgtaatggtcatgtttgcgggatgtgcggtgtacgccgtcctcatgacaatcaattgtgccctccctctctggcttaccagaaagtcagttaaacgctaa

SEQ ID NO: 134816 - DNA, 564 bp, Enterobacter cloacae
atggatttcagaacacagtatttagattactttaagcgaattgctcaccatttgggcgagggctggcgcgttgttacgttgccaacggaaagcgtttattccatcacgcttaccaatcccgaactgagacacttcatgattagcgccaagcgtgcggagaatagccgtttacacattagcagtggcgttaaccaagacagacatttctattcaaaacactggtgtacggtatcgcctgatcgctctcctgctcatgttgcaagggatataaagcgcaagctgttagagcatgcttttaaagagaacgcggaggaagtggagcgacgcagtaaacgagagggaaacagcgaagcaacagccattttactggctgcattaggtcggttggtggaggtggacgatgatacgcggcacagtggaaccttttgcaattttgtgcacaaaggcgcaggcataaaaggaaagatagaagggaagttagagtggggtaattttgacttgaggttgtcagccttgccacctgaaaaactggttaaaatcatgggtttcttaacaactctttag

SEQ ID NO: 134817 - DNA, 516 bp, Enterobacter cloacae
atgaacattcaagaagcattaaacgtgtttggcctttccggtgatgttaccgaagctgatattaaaaaagcattcaagcgcctatccctgaaatatcatccagatcgtaaccctgagctgggcggcgaaatgatgaagatgatcaacgctgcccgtgattttctcctggctaatcttgataaaattaagtatggccaatccacagaacaggcagactactacgatttttcggaagaaatggaaaacgtactgcgcgagctggctggcctgacggatatcgtgtttgaaattatcggtaactgggtttggatttccggcgataccaaaacacacaaagacacgttaaaggcgctgaaatgccgctgggcttccaaaaagcaacaatggttctatcgaccggaagaacataaaagccgccgtagttttggcgaaatgtctattgacgagatccgagaaaaatttggttcctttggtaagagaaaaagcagcggccgcaaaaatctacaggcagcttga

SEQ ID NO: 134818 - DNA, 405 bp, Enterobacter cloacae
atgatgcttaaaagcgcggcagtgaatccagaagcaacgaaggaaattgatgaagcttgcacttgtgctgtagatcctactggttgtagcttttgttatttacgtgatcctcgtgcgcaagccgaaatggactatcagcatgatcttttatgcgccgagtcattaggcatagaaacagctattcaggcgcatgtttatatggcaaagcgtgaaggtgatgctttacagacgctatttcttcatcagcaaggcgctatctcttcagagcgggcaaacgtgatcttacgtgaaatacatttcgatgcggaaactattgccgccacgtcgtttatgagcgtttcacagcttgagtatgtgcaagaggtgagaaagtttgccgatgatctcatgagctgtattgattag

SEQ ID NO: 134819 - DNA, 252 bp, Enterobacter cloacae
atgaaagaaaccacctaccctacacgctttcattacagcctcttaaaatggctcatatttatcttaatgcttaccctgggagcgtttagaggctatgcctctaaaacggctctcgtgcttcgcatcgagctgctacgcatctcgccccttcgggcttccatcctcgctcaaaacccctgcttgttaacacggtgctgttgcccccgtagcttcgcctacggctcgcactcgcagtaccgttcgccgggttaa

SEQ ID NO: 134820 - DNA, 315 bp, Enterobacter cloacae
atgtctaaaattaaacgcttaacagagagtgactggaagaatcttgagcctcgcatgcgaactctttcgcatcaaactacatcaattggctacgctatttttgttgaaggtaagagacaggtggatgttgctagggaaaatgagctttccacccaggctgttttcgcaacgataaaaagattacaaaaaatcatcgatgaatacatggacgaggaaggtacgaaacttgtgtatgttgagggctggctaccaccggagttggccgctcaggttcaaaagatgatcgctgaacatggaaaaccatctgcaaagtaa

SEQ ID NO: 134821 - DNA, 1083 bp, Enterobacter cloacae
atgagtaaaccatataaacttgaagtgccaggaatccgtgtatcgcaaggcgggaaggaaatgcttttgatttctttgctctggagccagttagaacgattcataacaaccgtttcccacgaaaccactctagagcgtgctcaacgtgatcttaatcttaagcgcgcaaagaacttcactgattatttacgttcttcttacctcaacaaaacgccgatgattgttccctcacttatcggtaactgtgatggtgaatatgagatcgaggaagtcggtaacacgaacatggtaatggttcgtttcaccctggcctcacgaattgagctgttcgacgggcagcatcgcgcccgtgggattgtcgattatgtccgggaaaacttcgatgtccgacactatcagattggcattcacttaacgctgaatgaacctcttacaaccaggaaacaatttttcagcgatattaataacaatgcatctaaaccagcggcctctatcaacatggcctatgacagtaaaaataaactatctcagatgctgataggcattttggaaaagagccctcttggtcaatttgttgactatgagcacaacgctgtaccagcaaaaagcgataaatgggtgagctacaaagccttatatgatgcgtcgaaaaagatgatcgctaacagacctgagagcgataccccagcggctatgtgtgaagatcttgaatgttattggaatgcctggtatatgctgaccgatcttgaaggttacgccaagacgtgtaaatcaggtgagttcagaaaggaataccttaccttccatgctgttaccgtcaatgcatttggttgggctgtgtttaatcttcttgaaagtatgccagtgcgtgatgtggtcagagctattgaacaattagccatgcaagcaacaaactcagaacgggacagctatttcgaatatgccaactggaaaaatatctgcgtcgatccagaacgattgactataaaagcagatgtggccgcgcagaaaaaagccggacttgctttcgcgcagagcatcagttcggggaaaatgctgattgaactatctgcattgaattaa

SEQ ID NO: 134822 - DNA, 342 bp, Enterobacter cloacae
atgagtgtcacactgacgagtatctttgatacggtaagcaaagagtcaacaagaccactgctcgctcttgaaattattttcttttgtgtagatcagtaccgactcaacaaaagcttaatcctcaaacatgagatagatgaagcgttatgttccgatgagatcaaaaggaagggatttgccaaaaacagcagtaacgttataactgcgttagaaaaatctggcattcttaaaaagttctctattgtaaacggagaggcacgtacatatcgcggttcacctttcccacttgctgtgagccttgaaaatgcaacaatcgcggcattttcgcacaatgaccactaa

SEQ ID NO: 134823 - DNA, 1053 bp, Enterobacter cloacae
atgaatgctaaaaacacaaacgtattgactgacaccctgagttccgtgctggatgagggggaatacattgttgattttccactgaataagattcgcatcaatccacaggttcgtcgtaagtacaacgccgaaaaagtggaacaaatcgccgcgtcgattaagcttcatggacagatcgaaccatgtatcctgactgagccagatgatgaaggtatggccgatctcctggttggttttacccgctactacgcgaatcagaaaaatgaatcgcctacgctaaaagcggttttacgccgggcaccagaaaaccttcgtgtagttcagatgtcagagaacatgcaccgtgaagatctggatatcgtggacacggctatcggtgttgtcgaacttaatactatcgataagttaaagcccaaagatatttgcgagcaattaggtgtaaataattcgtgggtaagtaaaatgctcgcgatcggtaagcttccattagagttacttgataatgtaacctcgttgaccacggatattgaaacgttctatatcctggccggggtttataaaaagtctccagacctcgcttatgacgttgtagaggcagcacaggccgcaggtgaacttaagcgttctgacgttaaggatgctcaagcaaaacttaagaatggtgatgctgacaacggtactgacggtgaaagtaacggcactggcggtacagacaacggtactgacggcgcaaataatggcactggcggtacaggcaacgatacggacggcgagcacaaaggcacaggcggtacagacaaaggtactggcggcacagagaatggtgctggcggtgatgaagctggttccgaaggtagcggaaaaggtaagatacctggtcagaagaaaactcatcaagtaattgtgtcattcctcaaagatggtgtagttaccgaaggttccctgatcaccaaccaagaatcaatcgacggtgttgtatgtgtcgttgttgatggtaaggataacctggtagcagtagaggagttaaaacttgtcagaatcgtttatgcctga

SEQ ID NO: 134824 - DNA, 744 bp, Enterobacter cloacae
atgggtgtcattacggtagcggagcaaaaaggtggtatcggtaaaaccacccttgctgttggtatagcgcaatatctctctgagattgagcataagagcgtcctgtttgtacctctggataaccagggtcgtaccgctaaacgtgtctttgatttgaaagacaatctgcgtgttcttaatggcatgtttttcaatgagccgtatgacatccagcaggtcaatgagaacctctcttctctttacagtgatcgtactatccataatctcgaccgtgccgaaattgaaaactcattcaacttcgcacgagaaatccagaagttaaaaactcaatacgactatatcgtcattgatacccctccgggtttaggtgcgcgtatcacagcagcagtgctgggagcagatcacatcgtcgttccgcttgaatgtacaacggaggcgatagaggggatggtggagctgagagatactatccgtaagctgacgcgcttcaatcctcgcgccaaaatcaactctctggttgtgaataaatttaataacacccaggaacagcgcgaaatttatgacttcctggctgagcgtttcggagacattttaatcgatgttgtgatccctgacgtgcagcctatcaaaactgctggagcggctggccgagctatctggcatcaggcaagaaacggcaaccatcgcaaggctgccaaaattgttaaatcggtcatttctagaattgttgagaaggtaaattaa

SEQ ID NO: 134825 - DNA, 828 bp, Enterobacter cloacae
gtgtaccacgctctttcaccggaacatttgagccatgataattacacatttgttccgctttgtacaaatcaattttgcaattttgatttagtcaacaatttaagagcatcaccagctcatcggaacaaaacgccgctcacatcatcacggccagcgccggaacaaaacgccgctcacatccccacggccagcgccggaacaaatcgccgctcacatccccacggccagcgccggaacaaaacgccgctcagctccccacggccagcgccggaacaaagcgccgctcagcatccccacaaccagtaccggaacaaagcgccgctcacatccccacaaccagtaccggaacaaatcaccgctcacatccccacggccagcgccggaacaaaacgccgctcacctcaccacggccagcaccggaacaaagcgccgctcagcatccccacaaccagtaccggaacaaagcgccgctcacctcaccacggccagcgccggaacaaagcgccgctcagcatccccacggccagcaccggaacaaaacgccgctcacctcacccgccccagcaccggaacaaagcgccgctcacctcaccacggccagcgccggaacaaaatgccgctcagcctccccaccccagcgccggaacagctcgcagctcagtacatcagcatgccacgaggtacaaaccacatcccggagacaagcgaaactccgcatcagttagtaatcacatgcacataaaccttagactccattatgtgtataaaatatcgttagttatgcgccaggattaccaaaatacatttaacttcatagagttacattaa

SEQ ID NO: 134826 - DNA, 729 bp, Enterobacter cloacae
atgactgttcgacaggggaagttagttcttaaaaagcggccactctatcaagctaacgtactgactcaagcaagagatggtctgtcacgcgatcagcgcaggcttttctatctgatgcttgattctatttcgacgcagggttggcctgaaaatggtgttttcaaaatagatcatcttttctattcgcaggtctttaaactcagtgagaaagaagcacgcgaagatattcgtcgggcaatggctgatttcaaaggtaaggaagtgaccttgtatgagtcatgggaaggtggggtatcagtcatgcgtgaaatgagctggactacttccagatggacttctgaggaacggggaatttatcaaatcaaaattaaccctgacttgcgagagttcatggaaccatttgctcatgacctgccctttactatgtaccgtttagaacaggtatcgcgcgttccttcaaaatactcgatgaagctactggaggcgctatcccaatttaaaaccacaggtttttttgcgatacgtttagaggatctaagggtacgctgggagttaccggcttcatatgagaaatggtcgttactgaaagcgcgagtgcttgatccagcgctcgctgatgtaagaaagatagaagaatttagaagcgtaacgatgatggaaaaaagagagggaactggcaagaatggaaaggtaacaggggtatcgttctcgtttactatcgacaaataa

SEQ ID NO: 134827 - DNA, 312 bp, Enterobacter cloacae
atgaataacatcgtcagtttccctggcaatgcgaacacaactacaatggctcagaacagcgtcacaaaaaagaatctagcgaagaaggtagctatgttctttgtagaggtggtaatgattgtagctagcccattcctctctctcgcactccaccttttaaataaggtcagcactttattgatcgtttcatcggtgcttatggccgtagttttctaccagacgagcggcgttacaaaatacttctatatggcactcgcctaccttgccgtttcggttttgataaagatgctatgcaacaaaaaaggccgctaa

SEQ ID NO: 134828 - DNA, 702 bp, Enterobacter cloacae
atgataggttgcctttttataggccaatctgcgcacgcctcaatgtctgatccaaacgaaattcatgagctggtaaaacaatgtgcaccaggcattaatgcagacagtaaggttgtagtaggaatagtaaaaactgaatctgcgggtaatcctttctcgattgggataaacacaaaaggagtaaaacttaaaagacagcctaaaaatataattgaagcaattgaagttgccacatggttagcaaaaaaccgctttaacttcgacgcgggaatagctcaaattaatagtgtgaacatcaataaactgttaattggagatttagattttcgcatgcgaaaagtttttgatccttgtgagaatcttgggttagcggagacaatttttaactcctgctatgccatgacaggctcaactgttggagctttgagctgttacaacactggaaatgcaaaaagagggatcaaaaacgggtatgttgctaaagttttggctaatatccctgagctggttgatgtctctggtgaagctgtcaagccaaaggttcggaagcgagtccagagggatgaaaccagccagggtgaatcattaaaaatttctactgctgatgctgaaaataaaaaagcagatgaagaagaaaataaaagtgattcagaaggcgatgcttttgcaactaatggtgtggatgatgtttttggtaaatag

SEQ ID NO: 134829 - DNA, 282 bp, Enterobacter cloacae
atgttaattaaatctaaaattcaaaatatcaagtacaccgctatggcgttcgcactttctagtgcgccacatttcgcttttgcagtgaacaaatcagacgctgggattaacagcgtaaatacctggctgggaactatcatccctatcattctaggagcggcgttactggtgctgggagcgctctatgctatgggcttcgtgggtaaagagatgttcaaacaagtcggtggaggattaatcttcggcggcgctggctcatggctggtttctctcttcttctaa

SEQ ID NO: 134830 - DNA, 2430 bp, Enterobacter cloacae
atgaaaaaggggctgttttcattcagaaaagaccacgcatcaaccaaatttcttcctttttcatatcatctaacagataacattgttagtttaaaagggtatgaatataccaccttaattcaggttggtgggaagtcctatcaaactaaggatgccagtgaaatatatagatggatcgaaaacctgaatacaatgtcacgaaccgtggctaatgaacatgtagagttttactcatatatcattcgcagagatatgatgaagtatcctgatggagagtatgataactactttgcaaaaaatcttaacgctaaatatcaaaaagagtttgaagatacagatactaatcctttaaaggtaaatgagctgtatttggctatcgtctataagccttttggtaactctgtattgtccggcataaagaaaaaaacattcacttcttatgatgctgtcaaaatgtttcagaacgactgtatcaaagaattagaaacgataaccgaaaaaatgctaacggctcttggtgactatgatcctagattgttggggacgtattcgcaaaaattaccaggcattgaccgggaaattgtgttttcagaaccaatggaggtgatgtcatttattttaaatggcaggaaagaaagggttcctttgacttctaagcggttcgcggcatcgctgccttcaacgcagatcaagttcagcaaacatggtgagtttggtattcgtcgttacaacggtgaggcggaaattgttggtatgctggatattgctgactatgaaaagcatacgttcccaggccagttagactacctgcttgaaagtgatttctcttttgtgatcgcaaattccttcggctatatcagtgaccgggcagcagaaggtttcttaaaaaatcatattaaatttatgaaagagcaaggggatgtcggcgttactcagatacgcaaactggatgaagcgctcgatgccctgaaaagcggtaacttcaatatggggatgcatcattgctctgtgatggtcagtgctccagaaattaaagaagtacgaaaacgcctggtttcggtaacaaatgatttaagttcgcatggtttaatcatgaagcagtgcactaaatcgctggaagctactttttgggcgcagttccctggcaaccgtaagtacagggctagagctaaaccagtcacttcgtacaatttctggtgtttctcatcgttccataatttccttacaggtaaggcacaggggaacccctggggggatgcgataacagcgttcaagacggattcaaggactccgtttttctttagctggcatgattccccccttaatcaaaattcacagggtaagcgtcctgtaggccatacaggaatcttcgggaaaacaggggctggtaaaactgcgcttcttgatttccttcttactatgtccaccaaagcaaaactgaacgcagttatcttcgataaagacagggggatggaaaacactgtcagggctaatggtggtgtttacaatgccgtagagtggggtgtacctaccgggtggaacccacttcagctcgaacccacactgaagaacatcagcttcttaaaagaattcattgctgagctggctcttggtggaacatcgagagagctttctgatgaagataagcgggatatctctactgccgttgatagcgtgatgacaaaggcagataaaagcgaaagaaacttaacaacgttaagttacatgcttccgcctggcgatgagaacagggtgtcagtcagtaagcttttgttcccctgggttgatggtgattataagtgggttttcaataataaaaccgacaatcttgaattaggtaaaggttattacggctttgatacaacgcagtttcttgaaaaaaaagcaatccgtgtaccaatactcaggtatttgactcatcgcggcgatgagatgattaatggtgaaccttttgcctatgtatttgaggagtgctggaacttctgttcagatgaatttttcattaagctgattaaagacaagcttaaaacaattcgtaaaaataacggcatcgttatcttctctactcaggaacctaatgatgtcttatcatcaccaattggccggacatttgcagcttcattggcaacagtcattgcgttgagaaatgataaggctaatgaagaggattatagggtgctgggcttgtctgacgttgaaatcaatattataaaaacaatggcagaaacagacagaagatttattattaagcagaacagaatatctgccgtggctcgctttgatatgtctcgctactcagatgaaatggaaatattgtctggttcagaagatacagcaattatccttaatcagtgcattaatgatgttggcaacgatgttgaaaaatggctacctgtgtattacgaaagaatcaggaaacagaaaaaatga

SEQ ID NO: 134831 - DNA, 654 bp, Enterobacter cloacae
atgaaaaagaaaatcttagcgttattgctggtttcaaccctgagcagtaatgtctttgcaagtggcatccctgtgtttgatgccgcatctatgacaaatgcattgaatactattgctcagctaagacaacaattagatcagttaaaatccttgcaatcacagtttgaaggtgtcaggtcaatggggtcgttacttaacaggcctgagctgaggaatatgttgcctacggactggcaacaagtatatgacgatgtgaaaaatggcagactggaaggtgtgtcagaccagctttccaagttagaagattctgagtctgtaagaggaactcaaggtgagctggatgaattaagaaagcgtaaatgggaacaagcgctttcaaataaagttatgagtgagaatgcttataaagccagcatccagcgcctcaataaccttgaagaacttggccgtaaaatcaatacaacgcaagatgcaaaagctgcaattgattttatgtctcgcatgcagcaggaacaggcgcttgtacaaaacgaagcagcaagaatgcagttaatgagcatgctacagcaatccgaagaaagaattaacattcagaaagaggagaatgtgcagaaggcaatttgggatgtcaaaaagccgatgcctagattctaa

SEQ ID NO: 134832 - DNA, 966 bp, Enterobacter cloacae
atggcttttactttttttacagatttggaaagaaacattgatgcaatggtaatagatatagttgctaccatttcaaataacgcaatggattatttcctgccagttgtcagttctggtttagccatgtcttttatatggttcggaactatgtgtgttttaggtaactatgatgccccagcgtctgattttatcaaaaaaatccttgtgatcactattgtggttggcattgctggggcgggggggttatatcaaactgaaattatgaatcttatcttagggcttccatctgagctggcctccgctcttgctggaggcggtaacactggagtgaacgtcttagatatttcagcggaaaagacgcttgataaaactatgcagatcttcgacctggtaggggtaacaccttcctcatggttaaatgcccttgtgggtatagttttttttgtgtcaggtatgttcttggttggttcaacggcagtgtatttcattatatcaaaggttgtagtgagtatcctggcaggactaggatttatcttcatatttgcattcctttgggagccattgcgtaatttctgtagttcgtggataaaccagattgtaaattattcattgatgcttgttataagctcattattctttagtttcttaatgggtatgtatgatcggtttattacaggtttcactgtaggtgaatcaaatatgcttttcaccgcatttgcaatcgcatgctttacctttatagggtataagcttctaaatgaaatacccacgttatgtgccgcattagccaacagcgtgcatgtagggtcacttacaaagggctctgaaaaagcacaacataatagtgcgcctagtagtggtggtggcggcggtggacaaccaaatattccggcggctggaggtggaaaaggatcttcgccaacggaaatatccacagcgccatttagaggcaaatcagcagtataa

SEQ ID NO: 134833 - DNA, 687 bp, Enterobacter cloacae
atgagtaagaaagtcgatttagcggattacgaaaagtttttgcaagaagcaaaagacacggaaattgatttgttagtaaataaagaaaagacaattaaatttctaaagttatgttgtttaggtttcttctctcttgcagcattgggggtggggggcgttgtaaccatactcccattaaaagaaccacctatcccatatattttaaaagttgatagtgtcaccgggcgcgttgattcgttgagtttagtaactcccgaatctctcagccaaatggattctgcggttgattactttattcgattctatgtaaagaacagagaaagttattctgctgaaaacattcaaacatactatgacaccacgatagaaatgagtgatgaagaacaagccagggcatgggataaaaaatttttcgatggtaaaaatgccattgataaggtgctaggaaattccgtatcaatcgaggtggaggtgaaagatgtaatacctgattataaaaataataaagcggtggtgcgttttattaaacgctacgtctacgacaacaaacagcctgtaactgaatactggtctgctgatttatcctggtactttgacaccggaaccgtaaaagtttcacagcgagccataaatccgctgcgcatgaaagttgatgattatcgttcttcacaggaaatcagcaaatga

SEQ ID NO: 134834 - DNA, 843 bp, Enterobacter cloacae
atgaaattaagaaaagcagctttttttattctactaatttttagttcgcaaaattctttcgcattggatgttccgacaggctcggcctacgactcccgaatcaaaacgattatgtttaatgctgatgatgtaacacagattgatagtgttattggtgttcagacacatataattctcgatcccggcgagacatatgtgacgcatgcttttggcgatagtgatgcatggactttctcacataaagaaaaccattacttcatcaagccaaaggctgaaaatggtgatactaacctgactattgttacaaataaacgtaactataactttgatgttagataccacgaaaaagcatatgttaaagcgggaaaaggtaggcgtacttttgatccgcagtttacctttcaggtgcaattcaagtatccagaagtagaagctcaaaagaaaaaagttgctgatgatgccaagaaaagagaacaggtattctcacagctccttgctaaaggggtaaataccaaatattcattcaatggtgagaagaagctgacacctgcttatgtatgggatagtcagggattcacctatttcaagttttcagttggtcaggatatcccgaatatttattcagttggtttagatggtactgaaaaaattgaaatgcgacatatggaaggaacctacaaagaaattgtagtaatgcacaaggtcagcaaggaatggcgcatccgacttggtaaatcagttgcgggtgtctataacgaaaatgacgggtcaattcctctgattactccagcgacaggaacagtttcagaacagtacaaaagggtaattattaatgaagaataa

SEQ ID NO: 134835 - DNA, 1158 bp, Enterobacter cloacae
atgaagaataatgaaattgatgcatttgaagaactcgaaaaggcacgcgatgaactgtcagataagatagttaaacgtaaagctacatctggcgctggtcgtttttttggtgctcttattattattcttacggtgttgggtggggttggtttctttctgtttaaaaactattttcagcacagagaggtagaaaataatacacaaatattcccaacagcgagtaaagaaatcaaacgtactttctcaattgatacagaaaaaaaggaaccaccaaaagtagagagtgacgagcaaacaacacctgctccgcaaaccgttgttgtgcaaacatcaccgaatcctaatccccagcaagaggttgatgagaacggcctaacacctgagcaagctgccgctcagcgacggctaaagtctggatttggcgctggtaatgatgaaggaagtagtgaggcaaatgcaaatgcgaacagcgaggcaggatccggcctttcagataagtcaggtgatggggctgataatgggcttgagaactcactcaacacagtgccaacagtgactgtaaaagcgtttgcacgtaagagccttgatttgatgatcactcgtggtaacagcattccatgctcattgacaagagccatcgattcaactcagccaggccagattacgtgcgtaacaattgcgccgactttatcctcaagtgggaaggtagtgcttatggagtctggaacgctgtttaccgggaactaccagagcgatcttaaacaaggtattgcgaggattcaggctacgttcgacagacttgaaacacctaacaaggtattcatgtccttaagagccccagcgataggcgctatgggtcagggtggcatagatggggagatcgacacgcagtttggtaaacgtttcaacaacactatcttgctagcaaccattcaaagcactgtggccgctggaagtagtcgcttggcaggtggtagcaatggttccgttaacctgaatagttcaacgcagcccgtttctgatttggcgactgaaacgctaaaaaactcaattaatattccgccaatcttaagaaaaaatcctggtgaaattatcaatatcgatgttttacaggatatggactttagctcagtttataggatcgaaaatgtcaattaa

SEQ ID NO: 134836 - DNA, 1050 bp, Enterobacter cloacae
atgtcaattaatgatagtgggtacatggtaagaaaacttcttacacctattgcacatttcctgaatgatgatgatatcactgaaattatattcaataagccaggggttgcttatttgaaaaccacaaagggggatagaaaagaagaagtaccagatttaactgaaagtaacatgaatgagttgctcaggtctattgcggtctacaaccaaacgaaagaatcatcattgaattatttcattttgccagatggagagcgctgtactgttattcgctctccagcagcttttaaaggttactacggctttataatccgtaagttcatgtcgatttcaaagaccttgccacaatatgtgaaagatggtgcatttgaaaatacaaagaatgcatcttttcacattatgacaccggagcttatcgaaaaacatcttcaacatacagatgggcttcgtattgatgaagatgatgctgagctactcgatttgctgtacaacaaaaagtatgaacgtttctttgaacgggcaatacagcttcaaaaaaatattgttatatctggtgctacagcgtcaggtaaaactacattcatgcgcgccgttctcgaatacatgcataaagatacccgtatattaacaatagaagatgtccatgaattaaagctggaaaacttcgataataaacttccactgatatttggaaggggagaaggccagttaacttcacaacaattgctcgaagcttgcatgcgtgcaacaccagaaagaatcctgttggcggaactgagaggggttgagacctgggattatttgcagtcacttaatacaggacatccaggctctgtaacatcggttcacgctggcagcgcatataaagcattcatgcgtatatcaacactggctaaccaatccgaagaagggcgagcattaggtttcgacgtaattaaagaaactgtttttagtacgattgatattgtagtccaattgaaacaccggaaagttactgagattttttatgatccagtttttgtacttaaaaagctcactcaaaatcattaa

SEQ ID NO: 134837 - DNA, 858 bp, Enterobacter cloacae
atgaaaacatcaaagctgattatcttggctgtatctgccatttccgcagcaggttgtagcagtaataagttgccattaccagagggtgacaagcaagctttaaatcaaaatggcatccctgctgaattggccttagcaatagcaaaagaaaagtctcgtacttcttacacgacggtatctaatccgcctttaaatacgagttatcaaaaacctgtaattcaaacaacaggaacgaataaattttcgcatgcgaaaaacccgtggtctaaagaattcaacggaacagttcctaaagcggaaaaaaaagaagctgtttattcaggaattgcaacagctaaagatcaaactaactcaccgcgcaatcctttttctggtagcagaaaggattcaagcttgaatacaagtgtcagcggtgcatacagcagcccaattaaaaacgttacctctgttagtgctggcgctgtaagtaataaacctatagaagtcgctaagacgaactcgaatgtggctgataagaaagttatcaagcaagtagtttctatgaaaccaattgctttagaggtggctaacagtaaaacatgggtagccaatacaggatccacacttaacaagaccttaaataaatgggttttagatgaaaaatgcagtattacgcaaaagtggaatattgtgtggcctgaaaatattgattatccgatagatgttcagctttcttttaatggcactttctatgatgccattacaaaactgttcgcactatatgcgaaagcagagaaaccactttacttagatgtttatcctcaaccatcgtgcgtgctttacgtttctaccactgcaaacggaaaaaaagacaggtaa

SEQ ID NO: 134838 - DNA, 1713 bp, Enterobacter cloacae
atgaaaatgaaaaaattatccgctcttgtagcggtaagtattcttttgtctggatgcgctattcagagaattaataagaatgtaaacgctgctaatgatgatattaaagatgttagtgcaggtttgcataaaacattcgaaacaagacctgctgtacgttttcacacagaacaatggataaatccaacgccaattaaaattagcgaaaaggaattaccatctaaagtcataaattgcaacattacttataagcctggtaaatccgtagacatctaccagttcggccaggatgtagccatgctgtgtggtgtgcctgtgcgtgttacaccggatgctgcaatgatgctagctggcggtggcgcaagttcaggagtgaatacctcacagacacgtcagacttcgactgtaccagcgcctatcgttcctactgacagtaacggtatgatccctcttgctgggttcagtaatacggctactgccagccagcaatctttcaatcagcgtagccccggtgcgctgattagcggtgttgcgtataacggcaatatctcaggcttgctcgatgcagtgacggctaaactcggcgtttcatggaagtatgaaggcgataagatctacatttactatcttgaaactaagcaattcaggattgaaaccagcgatgccaaaaataaactttttagttcaataaaaagcggtatctcggcatctgctggtactagtagtaactcatcaagtggtacgaatagcagtagcggcgttactggcggttctggctctaattctgaggcagaaattacaatggcaaacgatatctacggagacttgaaaagcaccgccgaaagtatgcttacgccgggtgtaggccgactgagtatgaacaataccagtggaactattgtagtgactgatgttccagaagttgtacgtactatcggtgaatatattactagcgaaaactcaaatctgagtaagcaggtatctttgaccgtaaaaatctataccatcagcctggatagtagcgatgaggtaggtattgactggaatttagtttataaatctctatccggcaattatggggtgaatctctccaataactttaccaattcaactgatgcgatttcaggtggattctccgtgttagatactgcctctggtaaggcagctcaattcgcaggttcagatattttgtttaaagcattatctgagcaggtaaatgttacaaatgtcaaaaccaataatattatgacaacgaacatggcggctgtgcctttgtctgtttctacacaatctacatatctccagagtgtcagtgtggctcagacaagtaatgtcggtacgacaagttcgctcaatcccggaacggtgactacaggaacaaatattaccatccttcctaaagttacttctgataacagcaaagttatgctcacaatggtaatggatttatcgacgcttaaacagattcgtcagatcaacagtccagacaataccagtaaactggaagcaccaaatattgattcgaatgctatcaatcaaagggtatggcttaaacctaatgatactttgataattagtggctttgaacaagatgaaaaaagcggtacgaaacagggggtaggcgatcctaataatattgttttaggtggcggtatgaagggctctcataaaaagtctatttctgtaatttcaattactccatcagtgcagtga

SEQ ID NO: 134839 - DNA, 1392 bp, Enterobacter cloacae
atggaaaagacaactgatttgcagttactaaagaatgattctgtaaacgggaattcttcgaatgaaaaagaatccccgcaagtaagaattgtgaccataaacaaaaagaaatttgttattggtcttaaatggcaagggcttgataacccccgtcattacatgaaacaggcgagggcaatcggcaaagaaaaagggttagacgttgtagcgattcggcatggaattggtattcaagctggttttgctccacgtcgttcatcaggattaaagggtttatattcaattgcagtttcgctggtttcattgataaatggcgattggattggtgctttcgcgcttccctcaaaacttgacagtgacgaaaaagaatatgttgttgttgccaaaatggacggcggcaagatcattccctggacagataaggttctaactaagaaagaggttgaagaattaataccagacctgaaaagcatgatgcttactaatgatagtagcgtccaggtctatggggatcctgatatctcgtttgtcaccgacgaacttactctggaagcggttcttaaaccagcattgttaaaaaaacagttcaagattagaccgctaacgctggggctgacaaagaaagaactgtttttatttgcttttatcatcacagcaaccatatccatagctgttggcttaaagctttatatggatcatcgccaggctgtatctgatgaagaagagaggcagaacgctttacgtaagatccaacttgataaacaggctaaatacgaaacagcattaaaaaatatgattcatccctgggtaaatcagcctggagcaaaagaattaattagttactgtgacgcgagattaaagctaggtgatttatctttatctggatggatggtttcttcttttgagtgtactaaagattctgtcagcatgacctataaacggcttgatgacaccggagcaaccgtcgaaaactttaaaaagaatgtattagaaaaattcggggcagatgttgtcatatcatttgacgtgaaggattttaatacggctgttttttctttgaaaaactcaatcgccagtcagggggacgatcccattttcccaattggtttgcagctcagtaaactgatctcaatttttcaggcgcttaatattaattttgatataaaaaatgaagagatcaagcctcaaactgatgaagagaaagagttgaatttaccaaaacaagattgggttgaaacgaaattttcttacacatcagatttgaaaccaaaaatggtattcactgaaagtgaatatgccggatatagaatttcaaaaattacttatgtacctagtttcgaaacaggcgcaatgaagtattcagttgagggtagcatatatggtaaagaataa

SEQ ID NO: 134840 - DNA, 444 bp, Enterobacter cloacae
atggtaaagaataaattttcgcatgcgaaaaacctcgcatgcattgcttttttagtgtctgtaagcgtaaatgccgcagagttgaaaacgctagctgaccttgatgtattgcagggtgaaaccatgtactacagggcattagctactcgcaatgaagcaaagagtaaagcaggtaatgatgtccaacagcaaacaaacaccgtagggcaaacgagtcagacatctaaaattgtctcgccaatgttaccaagcgttctaagcattatgggtaatcaaaaagggctattggcaaggcttggttattccgatggtcaaattagcacgaataaagtaggtgatataatcaatgggacgttgaaaattacgaagataggcattaacggtgtccaggttctttctttgcaagaaaataaattttatgacttgaaagaggcgcaaaactaa

SEQ ID NO: 134841 - DNA, 1542 bp, Enterobacter cloacae
atggagtttttctctttaaatagtgtcgatggtgtgccttcatttaaagttaattcgacacttcaacaagcattgttggtaacaaaagaaaaaaatggtgttaccacactgtatgttgctaaaacagaagtacaggaaacggctgtacttgattatctcaatgcattcagagaacttcatcctgacgcaaaaatacaatacatcgataaatcagaactaatacctttacaggataagagcggcattcttggtggagatgaaaataaaagtgaaattcaaaagcaggtaattgatattttcagggctgctgtgcagcgacgagcgacagacatacatttcatccttaaagatgattttaccgttgttaaattcaggattgataaagttcttactaaatatcgtgaatacagtgcagaagaagggcaggcgcatgtttttgctctgtatcaaacgatgtgtgagggcaacagcaaacaaacattcagcatgcaaagtccggttgaagcaaacatagatgagaaatatgttaaagaacttggtcttaatggtggccgtcttgcttctagaccaaccgatcagaaggttgttgttgttgtacgtctgttacgtaaaaaaaatcgagctttcacacttcaagagttgggtatgtcccaaaaacagattgagatcatcaatcgagtatcagacataccatccggggttgtgttcttttctggtcccactaactcaggcaaaagtacgctcgcccaatccatacttgagggggttgcagcggctaaccccggcgaccatctgattacagttgaggatccgattgaaaacgttatccggggagctgttcaaacacctcttattgttgctgaccgttctcagccaggaattatggacagagcgtttgctgatgctattgcgaacctggtacgtatggatccagatcaattattcgtgggggaggttcgtgaaactcaatcagcggtaggttgtatttctgctgcccaaacaggccgtaaggtatggacgactattcacacctattatccgattgacattatcgcacgcctgaaagcattagatgttgatgctgatttaatcacggattctacgttgattgtttgcttaattggacagcgaactactccacttttatgcaaacactgtaaaattccattcagtgaaattaaagattctcttcgggagactgataaacatcttattgaacaatattgtgatgttaataatgtctatcttccaagtgaaaaaggatgtgaggaatgtgattataccggacatcatggtatgtcaggtatttttgaaataatcgaaactgacgcggagtttatgcagatttaccacgagcaaggcaaaatgaaggcttatgaacactggtataagaacggcggcgtaacattatgtgccagcctgttaagtcttgttaatgccgggaaagtaaaccccctctatgcgcacagaagcatttgtaacctggatcgtgaccagcgcatgtttacgcaagatattagagactctcgtaaggaggtttaa

SEQ ID NO: 134842 - DNA, 1065 bp, Enterobacter cloacae
atgagtgagttcgggcgtaagttaagtcagttaacctttaatgcggctgacagacgcgatatatatgaaaactttcgccagttcatgctcgatggtgctactgcgaagaaagcatatcaatgcatgatagatggttatactcgtagggggaaaaaacctaacgatgcaactgctgtgatattaagagagtgtgcggaaacgcttaactctggtaaatctctcgctcattcacttaaagagtggtttccagaaagcgaaaggagtgttatcgccgcttgtgatattgctggccgtgcagccgatggatttaaagaagcagcaaaaattgctactgctgagttccggctagtaaaagccatacgtagcacaagtatgatatctttattcatgatgtttaacgcgttagcaattctctacatcgtatgtgcttttttagttccaatagtcatgcaatatgtacctctggaaagatggaatgccattcaaactactatttattatttctattcatttttaagtagttatggcattatcgttattgcaatattgatattaggagtgtaccttttctttagatctctgcctcggtggacaggtaaccttagattccaatttgataaatttggaggttatgctttataccgctcaatgcagggtgcaatttttttaacgaacgttgacgctatgctttcttctggcatgtcacttaagacagttcttttaaagctaaaagaaacaagtgattctgcatggttgaaggaacgtatagatggagcattaggaggattatcaaacggagaaacaaatttaggtacagctcttgactcttcgggatatgacttccccagcgaaaaagccattataaagcttcagaatctatttgaaacttccagtagtgatggtgctttaggttcatttagtgaccgatggttaaatgaaactgttgaggagattgaaaagaaaggccaaaaaatacaaatgatttgtatgtttgttagtgggttttctgtcgtgggaacaactctctcgatggttcctttagttcagcaaatgtttaattcgtaa

SEQ ID NO: 134843 - DNA, 513 bp, Enterobacter cloacae
atgatcaaaaatttcaaaaaaggtgtaatgcaagtaaccgacgctcaaatcggctggggtatgcttatcattggtctaattgctgttatgacctatggtgcaactctcattttcaagtcaaactcaaccactgacctttcaacgtattctctcatcatgaatgaaatgtcagggctacggccaagcaccggctacggcacgacagactacaccgcaacacttatcaaaaaggacgttctgcctaaaaccattcagaccagtggcggtactaaaatccttaaccgcaatggtggcgcaattactgtagtcggcgctggaaatggtttcaccctctctacagcgggtattggccagggggattgcatcgatgcggctgcgcatttgagtgttggtaaagttaccactaccaagattaatggtacgtcctttaccggagaggtaactgctccagcggctagcgccgcgtgcacggcgggtaatactaacaccttatccttcactacaagctcctaa

SEQ ID NO: 134844 - DNA, 957 bp, Enterobacter cloacae
gtgagcctgaatgattcaacattccgtgacctttacataggtaacggcttcacagagttcaggggattgataggggctggggaaatccaagcccctgttccttctcagttcttaccagaaatcgaaatcgtaaagtctgcatgtctcgaaattgctgctaatacaaaattaactgagttttcatatcgacatgaaaaacggttgtaccgcgttactatcttcaatggctccggtgacaacagaacatttgtaattcggcaaacaccaactgagatcttcaaggtagacactatcggaatacctccctacttacgtgaaatatttcgtaatgctaaaagctgcggattagtgctcgtatcaggaggattaggagaagggaaaacatctaccgctgcggccgttcttgccgaccgcataagcaacactggtggtatggccgtatctgttgaagatcccatagagactttactcgatggacgacacggtaaagggcgctgtgtgcagatcgaagtgttagaaaacgagggatatgctggttctttaaagaaagcaatgcgagtgggcggcacggatatgttaatcggtgaaatccgtgatggagacacagcctatgaagctttaaaggcctcaaataatgggatgtttgtcattgcaacaattcatgctaaatccattatagatgccatagagcgaattataacgctttcgcaagatagaacgccgtctgcaagagaaattctatcaaattcacttttatctgtgatgtatcaacgtctgaatatagtcaaaaacaatgatggagcaatcataaagaaggttgccgatattcaaggtgtgcatatcccaaatgaaattaatggtagcgctatttgtaataaaataaaaagaggtgacaccacaacacttgagtctgagtttactgcgcttcgtttaaatatgatcaatagccgaggttag

SEQ ID NO: 134845 - DNA, 1632 bp, Enterobacter cloacae
atgataaccgtcggcgacgccatcgccagaacgctggagcagtatcaggttgaggccatctacggcgtcatctccattcacaacctgccgatcgcggatgcggttgggcagcggggcaatatccgctttgtgcccgcgcgcggtgaagccggttccgtcactatggccgatgcccacgggcgcttttccggtctcggcgtggcgctgaccagcaccggcgcgggggcgggtaatgcggtaggcgcgctggtggaagccatgaatgcctgcacgccgctgctgcatttaaccgggcaggttgagaaagcctggctggacgccgacaccgggtttatccatgaaacccgtgaccagctgaccttcctgaaggccagctcaaaacgggcgtaccgcatcagcaatgcgaatcaggcgatagccattctgcataaagccatccaggacgcgcagaccccgccgtgtggaccggtctcggtggaaatcccgattgatattcagggcgccaaaattccgctgtcgctggtgactaaaccggttaaaccggcatcggttccagccgtggataccggaatggttgacgcgctgtgggcgcagctcaagcaggcgaaacagccgctgctgtggctggggggcggggcgctgggcagcgctgaggcggtgaaaacgctggcggatgcgggcatcaccgtgatttccagcacccatgcgcgcggcgtgctgccggacagtcaccgcgccagccttcgcgcgttccacaactcgccgtcggttgaggcgctgattgcgcagtgtgattttacgctggtggccggttctcgcctgcgcagcaacgaaacccgatcctggacgcttgagctgccttccccgcgggtgcagatcgatatcgacccggcggcggcaagccgtaactacctgatggatagcacgttgatagccgattgttccgcggtgcttggcgcgctggctgaaaaagtgcagggccgcgagtggggcagtccccagtgggatatgcaggtgcagcaggcggttgagcaagctgagcaggggctgcgtgagcagtgcggcgcctatgcgaagcttaacgacgccatagcaaaagccctgccgaaagacggcctgctggtgcgcgatatcaccgtgtccggcagcctgtggggtagccgcctgttcagggctaacggtccgctgatgaacattcactccctcgccggggcgattggtatggggctgccgatggctatcggcaccgcgattgccaacccgcagcgcaaggtggtggggctggtgggcgacggcggcctgagtctcaatttaggcgagctggcgacgctggcgcaggagaaagccaacgtgacgctgctggtcatgaacgacgggggctacggggtgatgcgcggtattcaggataaatattttggcgggcgtcagtattataacgcgctgcatacgccggactttaccctgctggcgcaggcgattggcctacaggcctggagcattgagcgggccgaggattttgaagcggtgatgacggaagcgctggcgatgccgggaccgtcggtggtggaagtgcggatggggcagattggcgccctgaagtttgccgggccgccacagaaaacgctgtactga

SEQ ID NO: 134846 - DNA, 9621 bp, Enterobacter cloacae; identical to SEQ ID NO: 8671

SEQ ID NO: 134847 - DNA, 2601 bp, Enterobacter cloacae; identical to SEQ ID NO: 4871

SEQ ID NO: 134848 - DNA, 867 bp, Enterobacter cloacae; identical to SEQ ID NO: 71859

SEQ ID NO: 134849 - DNA, 249 bp, Enterobacter cloacae; identical to SEQ ID NO: 4873

SEQ ID NO: 134850 - DNA, 1131 bp, Enterobacter cloacae
atgtgtactgaaaattatgagctggctcagcaagaggcagtcctgtttgccaaacaacatctcgccctggctgcacagaatattgaacgtcagcagtttattgtgccagacattatttcttgcgtggcgcaggccgggtacttaggtgcgtcaatcccccaaaaatatggcggacgaggttacgattcttatcaactgtgcgctttgcatgaagtgatggctggggttcacggttcgttagaaaatctcataacagtgactggcatggtcagcacgctgctgcaacgcgtgggcagcgcagcgcaaaaagcccattatttgccaaagctggcaacgggggaattgatcggcgcgattgccctcacagagccgaatatcggcagtgacttagtgaacgtggaaacagaattacagcaggatggcgacggttggcggctgaacgggaaaaagaaatggatcacgctagggcagattgctgatttttttattgttttaatccactgtggtaatcaattagcgacagtgcttatcgatcgcaataccgacggctttactatcactccactcaacgacatgttggggttacgcggcaatatgttggcagagctgcattttaatgactgccgcctgaaggaggatgcattgctcggtccgctcacccctggggtaccgctggcggtgaattttgcgctcaatgaagggcggttcaccaccgcttgtggcagcctaggattatgtcgggccgctgtggatgtggcagcgcgctacatccgccagcgtaaacagttcaagcggcggttattttctcatggcattgttcagcacttgtttgccacaatgctgacccaaacgcgcagtgcgcaactaatgtgcttcagcgcggcggaataccgcgaaacgctgcacccggccatgataaaccaaatcctgatggcgaagtatgtcgcttccaaagctgcggtggacgtggccgggaaggcggtgcaactgctcggtgcgaatggttgccatgccgattatgccgtcgaacgttactaccgcgacgccaaaatcatggaaatcatcgaagggacatcgcaaattcatgaaatccaaattgcgatgaattacatgatggggagtgaagcatga

SEQ ID NO: 134851 - DNA, 1269 bp, Enterobacter cloacae; identical to SEQ ID NO: 4875

SEQ ID NO: 134852 - DNA, 4797 bp, Enterobacter cloacae; identical to SEQ ID NO: 91442

SEQ ID NO: 134853 - DNA, 3033 bp, Enterobacter cloacae; identical to SEQ ID NO: 71854

SEQ ID NO: 134854 - DNA, 6501 bp, Enterobacter cloacae; identical to SEQ ID NO: 71853

SEQ ID NO: 134855 - DNA, 6465 bp, Enterobacter cloacae; identical to SEQ ID NO: 71852

SEQ ID NO: 134856 - DNA, 1464 bp, Enterobacter cloacae; identical to SEQ ID NO: 4880

SEQ ID NO: 134857 - DNA, 1440 bp, Enterobacter cloacae; identical to SEQ ID NO: 4881

SEQ ID NO: 134858 - DNA, 4368 bp, Enterobacter cloacae; identical to SEQ ID NO: 4882

SEQ ID NO: 134859 - DNA, 2460 bp, Enterobacter cloacae; identical to SEQ ID NO: 71848

SEQ ID NO: 134860 - DNA, 1506 bp, Enterobacter cloacae; identical to SEQ ID NO: 71847

SEQ ID NO: 134861 - DNA, 723 bp, Enterobacter cloacae; identical to SEQ ID NO: 4885

SEQ ID NO: 134862 - DNA, 201 bp, Enterobacter cloacae
gtgttgtacggtacgccggttgaattgaccatcgtggaagacgataatcccgcgatgcgtacgccgctggagtggcggcaggctatttatgaagagaagctcgcgcaggcgcgcgaagccattatcgcggataataacattcagaccctgcgtcgtttcttcgacgccgatctggatgaagagagtattcgccccatttga

SEQ ID NO: 134863 - DNA, 333 bp, Enterobacter cloacae
atgtttggtggaaaaggcggcctgggtaacctgatgaagcaggcccagcagatgcaagagaaaatgcagaagatgcaggaagagatcgctcagctggaagtaaccggcgaatccggcgcgggtctggtgaaagtgaccattaacggcgcgcacaactgccgccgtgtggagatcgacccaagcctgctggaagacgacaaagagatgctcgaagatctggtggctgccgcgttcaacgacgccgcgcgccgtatcgaagagacccagaaagagaagatggcttccgtttctgccggtatgcaactgccgccaggcttcaagatgccgttctga

SEQ ID NO: 134864 - DNA, 615 bp, Enterobacter cloacae
  misc_feature (160)..(169): n is a, c, g, or t
atgcaaaccagcccgctgttaactcagcttatggaagcgctgcgctgtctgccgggcgtcggcccgaagtcagcgcagcgcatggcgtttaccctgctgcagcgcgatcgcagcggcgggatgcgcctggcgcaggcgctgacgcgtgcgatgtcggagnnnnnnnnnntcggccactgcgccgattgccgcaccttcaccgagcaggaggtgtgcaatatctgcagcaacccgcgtcgccaggaaaacggccagatctgcgtggtagagagtccggcggacatctatgccattgagcagaccgggcagtattccggccgctacttcgtgctgatggggcacctgtcgccgctcgacggcatcgggcctgatgacatcgggctcgatcgcctggagcaacggctggaggcggagtcgatcaccgaggtgatcctcgccaccaacccgaccgttgagggcgaggcgacggccaactacatcgcggagctgtgcgcgcagtatggcgtcgacgccagccgaatcgcccatggcgtgccggtgggcggcgagctggagatggtcgacggcaccacgctgtcccactccctggccggtcgccacaagattactttctga

SEQ ID NO: 134865 - DNA, 1620 bp, Enterobacter cloacae
atgaaaggacaagaaactcgtggttttcagtcagaagtaaagcagcttctgcacctgatgatccattccctctattccaacaaagaaatctttctgcgtgagctgatttccaacgcctctgatgcggccgataagctgcgtttccgcgcgctgtcgcagccggatttgtatgagggagacggcgagctgcgcgtgcgggtttcgtttgataaagacaaccgcaccctgaccatcgccgataacggtatcggtatgaaccgggaagaggttatcgaccatctcggcaccatcgccaaatccggcaccaaagcgttcctcgaatcgatgggttccgaccaggcgaaggatagccagctgatcggtcagttcggcgtcggcttctattcggccttcatcgtggcggacaaagtgaccgtgcgtacccgtgcggcgggcgacaagccggaaaacggcgtgttctgggagtccgccggcgaaggcgaatataccgtagctgatatcaccaaagccgatcgcggcaccgaaatcaccctgcatctgcgcgaaggcgaagatgatttcctcaacgactggcgcgtgcgctctatcatcagcaagtattccgaccatatcgcgctgccggttgagattgaaaaacgggaagagaaagacggcgaaaccgtgatttcgtgggaaaaaatcaacaaggcgcaggccctgtggacccgcagcaaatccgaagttaacgacgacgaatacaaagagttttataagcatatcgctcacgactacagcgacccgctgacctggagccataaccgcgtggaaggtaagcaggagtacaccagcctgctgtatatcccgtcgcaggcgccgtgggatatgtggaaccgcgatcataaacacggcctgaagctgtacgtccagcgtgtgttcatcatggacgacgccgagcagtttatgccgaactacctgcgcttcgtgcgcggcctgatcgattccaacgatctgccgctgaacgtctcccgtgaaatcctgcaggacagcagcgtgacccgcaacctgcgcaccgcgctgaccaaacgcgcgctgcagatgctggataagctggcgaaagacgacgctgaaaaataccaaaccttctggaaacagttcggcctggtgctgaaagagggcccggcggaagatccgagcaaccaggaagcgatcgccaaactgctgcgtttcgcgaccacccataccgactcctccgcgcagaccgtatcgctggaagagtatgtctcacgcatgaaagaaggtcaggagaagatctactacatcacagccgacagctatgcggcggcgaagagcagcccgcacctcgagctgctgcgtaagaaagggatcgaagtgctgctgctctccgatcgcatcgacgagtggatgatgagctacctgaccgagttcgacggcaaagcgttccagtctgtcgctaaagccgacgagtcgctggacaagctggcggatgaagtagacgagtccaccaaagaagccgaaaaagcgctggagccgttcgttgagcgggtgaaaaacctgcttggcgaccgggtgaaagaggtacgtctgacccatccgagcgacgcgacgccgggaacgggataa

SEQ ID NO: 134866 - DNA, 645 bp, Enterobacter cloacae
atgcgtattattctgcttggcgctccgggcgcgggtaaaggaactcaggctcagttcatcatggagaaatacggtattccgcaaatctccaccggcgatatgctgcgcgcggcggtaaaatccggctctgagctcggtaagcaagcgaaagacattatggacgctggcaagctggtgaccgatgagctggtcatcgcgctggtgaaagagcgtatcgcccaggaagattgccgtaacggcttcctgctggacggcttcccgcggaccattccgcaggctgacgccatgaaagaggcgggcattaccgttgattacgtgctggaattcgacgtgccggacgaactgatcgtcgaccgcatcgttggccgtcgcgtccacgcggcatccggtcgcgtataccacatcaaattcaatccgccgaaggtggaaggcaaagacgacgtgaccggcgaagagctgaccactcgtaaagacgatcaggaagagaccgtgcgtaagcgtctggtagaataccatcagatgacagcgccgctgatcggctactacaccaaagaagcgcaggcgggcaacaccaaatacgccaaagtcgacggcaccaaagcggtagctgacgtgcgcgccgaactggaaaaaatcctcggctga

SEQ ID NO: 134867 - DNA, 963 bp, Enterobacter cloacae
atgcatcagacgaaaacaggtatcttgctggccaatttaggcactcccgatgcgcccacccccggggcggtgaagcgctatctgcgacaattcctcagcgacaaacgggtggtggatacgtctcgtctgctatggtggccgctgctgcgcggcgtcatactgccgattcgctccccgcgcgtggcgaagctctatcagtccgtgtggatggaagagggatcgccgctgatggtgtatagtcgtcgccagcagcaggcgctggctgccaggctgccggataccccggtggcgctgggcatgagttatggttcaccgtcactggccagcgcggtggatgacttactggcgcagggggtggagcacatcgtggtgctgccgctgtatccgcaatattcctgctcgacggtggccgccgtctgggacgaactggcgcggattctggcgaaaaagcgcgccattccgggtatctcgtttattcgcgactatgccgaacatgcggactatatccatgcgctggcggccagcgtgcgcgcttccttcgctgtccatggggaaccggatctgctgctgctctcctatcatgggatcccgcagcgctatgccaaccagggcgatgattatcctcagcgctgtcgcgatacgacgcgggaactggtttccgcgctggggctgccgccggagcgggtgatgatgactttccagtcgcgctttggccgggaaccctggctgaccccgtacaccgatgaaacgctaaagatgctcggcgagaaagggacgaagcatattcaggtgctatgcccggggtttgccgccgactgtctcgaaacgctggaagaaatcgccgtccagaaccgggaaatattcctcgaagcaggcggcaagcaatatgaatatattccagcgcttaatgcggacgcagcgcatattgagatgatggtcaatctgacggcgccttatcgctga

SEQ ID NO: 134868 - DNA, 1305 bp, Enterobacter cloacae
atgaaatttcccggtaaacgcaaatctaaacactattttcccgttaacgcccgcgatccgctgctgcagcaaattcagccggagaatgaatccagcgtctcctgggtggtcggtatcgaccagacgctggtggatatcgaagcgaaagtggatgaggcgtttatcgtgcgctacggcctgagcgcgggccattcgctggtgattgaagatgacgtcgccgaggcgctgtaccaggagctggtgcgcaacaatctcattacccatcagtttgccggcggcaccatcggcaataccatgcacaactactcggtgctggcggacgatcgctcggtgctgcttggcgtgatgtgcagcaatatcgaaatcggcggctacgcctatcgttacctgtgcaatacctccagccgcaccgatctgaactatctgcagggcgtcgacggcgccattggccgctgctttaccctgatcggtgacagcggcgagcgcaccttcgccatcagcccgggccacatgaacaagctgcgtcccgaaagcattccggaagcggtgatcgccggcgcctcggcgctggtgctgacctcttacctggtccgctgcaagccgggcgagccgatgccggacgccacgatgaaggctattgagtatgccaaaaagcatgatgtgccggtggtgttaaccctcggaaccaaatacgtgattgccgataacccggcgtggtggcaggagttcctgcaggagcatgtctctattctggcaatgaacgaagaggaaggggaagcgctgaccggctttgccgatccgctgtcagcggcgaataaggcgctggactgggtcgacctggtgctgtgcaccgccggaccggcgggcctgtatatggcgggcttcaccgaagaagaggcgaagcggaaaacccagcatccgctgctgccgggggcgatcccggagtttaaccagtttgaattcagccgcgcgatgcgtcaccaggattgcgttaatccgctgcgcatttattcccatatcgctccctatatgggcggccccgagaagatcatgaacaccaacggcgcaggcgacggcgcgctggcggcgctgctgcatgacatcaccgccaataactaccaccgcaataacgtccccaactccagcaagcacaaatgcaaatggctgacctactcctcgctggcgcaggtgtgtaaatatgccaaccgcgtgagctatcaggtgctgaaccagcactcgccgcgtttaacccgcggcctgccggagcgtgaggacagcctggaagaggcgtactgggatcggtaa

SEQ ID NO: 134869 - DNA, 1479 bp, Enterobacter cloacae
atgcaccacgcaacaccgcttatcaccaccattgtcggcggtctcgtgctcgcctttattctcggcatgattgccaataagctacgtatttctcctctggtgggatatctcttagcgggcgtgctggccggacctttcacccctggctttgttgctgacaccaaactggctccggaactggcggaacttggcgtcattctgctgatgttcggcgtcgggctgcatttctcacttaaagacctgatggcggtaaaatcgatcgccatccccggggctatcgcccagatagccgtggcgacgctgctgggtatggcgctctccgccgccctcggctggtcgctgatgaccggcatcgtctttggcctgtgcctctccaccgccagtaccgtagtgctgctgcgcgcgctagaggaacgacaactgatagacagccagcgcgggcaaatcgccatcggctggctgattgtggaagacctggtgatggtcctgacgctggtcctgctgccggcgattgccggtatggcggagaaaggcaacgtcggcttcgcgtccctggccctcgacctcgggatcaccattggcaaagtggtggcctttatcgccattatgatgctggtcggccgccggctggtgccgtggatcatgtcgcgcagcgccgccaccggctcacgcgagctgttcactctgtcggtgctggccctggcgctgggcatcgccttcggcgccgtggagctgtttgactttggtaaatccgcagccgcctttttccttgtgcggatgtttggtcactcgccgcgcaccgcgctgaccatcgccgccagcctggcgcagattggcgagtttgcctttattctcgccggcctgggaatggcgcttaacctgctgccgcaggccggacaaaatctggtgctggccggggcgatcatctcaattatgctcaacccggtgctgtttaccctgctggaaaaatatctcgataaaaccgaaaccctcgacgagcagacgctggaagaggtcctggaagacgagaagcaggtgccggtcgatatctgcaaccacgcgctgttggtcggcttcggccgcgtcggcagcctgctgggcgagaagctgatggcccaggggatcccgctggtggtggttgaaacctcgcgcacccgcgtggatgagctacgcgagcgcgggatcagcgcggtgctcggcaatgccgccaatgaagagatcatggagctggcgcatctcgattgcgcccgctggctgctgctgacaatccctaacggctacgaggccggagagattgtcgcttccgcacgggaaaaatgtccgaatatcgagattatcgcccgcgcccattatgatgacgaagtggactacattatcgatcgcggagccaatcaggtggtgatgggcgaacgggaaattgcccgcgccatgctgcggcttctggaaacgccaccggccggcgaagtggtcaccggctga

SEQ ID NO: 134870 - DNA, 1221 bp, Enterobacter cloacae
atggcaatcaatcagaccgctcaacccttgtccggccccgctgcgccgccgcaaaaagcacgcacctcgtttggcatcttaggcgcgatcagcctgtcccatttgcttaacgatatgatccagtcgcttattctcgctatctacccgctgctgcaggcggagttctcccttaccttcgtgcagatcggcatgatcaccctgaccttccagctcacctcatcgctattccagccggtgattggctacatcaccgataaacgctcgatgccgtggtcgctgccggtgggcatgtgcttcaccctctgcggtttgattctcctcgcgctggccggtagcttcggcatggtgctgctggccgccgcgctggtaggtaccggctcctcggttttccatccggaatcgtcccgcgtagcgcggatggcctccggcggccgtcacggcctggcccagtcgctgttccaggtgggcggcaacttcggcagctcgcttggcccattgctggcggcggtgatcatcgccccgtacggcaaaggcaacgtcgcctggtttgtgctggccgctctgttggctattgtcgtgctgtcgcaaatcagccgctggtatgccgcgcagcatcgaatgaataagggcaaaccgaaaccggccatcgttaatccgctgccgcgcaagaaggtcattctggcggtaggcattctgctgatgctgattttctcgaaatatttctatatggcgagcattagcagctattacaccttttatctgatgcataaattcggcttaacggtgcaaaacgcccagcttcatctgtttgccttcctgttcgcagtggctgccgggacggtgattggcgggcctgttggcgataaaattgggcgtaagtatgtgatttggggttctatcctcggcgtagcgcctttcacccttgttttaccctacgccagccttgaatggacggggattttaacggtgatcattggttttatcctcgcctcggccttttccgctattctggtctatgcgcaggaactgctgccgggacgcatcggcatggtttctggcctgtttttcggcttcgcctttggcatgggcggccttggcgccgcggtgttaggcctgctggcggaccataccagcatcgatctggtttataaaatctgcgccttcctgccgctgctgggattcctgacgatattccttcctgataaccggcaaaaagcctga

SEQ ID NO: 134871 - DNA, 879 bp, Enterobacter cloacae
atggcggcggaaaataaaaagcaggtcgattatgtgccaggcaccccgtgtgctccggatcgtcagaacggcatctggatcgtccaggcgcatgagtggggcaaatacgtcggccgcgccgattttgagttccgcaacggcgagatgaagctggtgcactatcagctgatcccggtcaacctgaagaaaaaagtgacttacgataacggccaaagcgagcgggtgctgtatacgccgcagatcgccgagaacccgcagatgatgtcgctgctgacgccgttccagaacaaaggcaaggcgcagctgcaggtcaaaatcggcagcgtgaatggtcatctggagggcgaccgcagtaaagtgcgctttgtgcagaccaatatgggccacctgctgctggcggcgcaaatggcgcgcagcaacgcggatttcgcggtgatgagcggcggcgggatccgcgactccattgaggcgggggatatcacctacaaagatgtgatgaaggtccagccgttcggcaatgtgctgacctatgtcgatatgagcggcaaggaggtagtggattacctgaccgccgtcgcgcagatgaagccggattccggcgcttatccgcagtttgccaacgtcagtttcgtggccaaagacggtaagctgaacgatctgaaaatcaaaggcgaaccggtggatccggcgaacacctatcggatggcgacgctgagctttaacgccaccggcggcgatggctatccgaacatcgccgataaacccgggtatgtgaataccggctttatcgatgccgaagtgctgaaagagtatatcgagaagaactcgccgctggatgccgccgcctatgagccgaaaggcgaggtgagctggcagtaa

SEQ ID NO: 134872 - DNA, 480 bp, Enterobacter cloacae
atgactcccgccgttaaattactcgaaaaaaacaaaatttcctttcagatccacagttacgatcacgatcccaatgagaccaacttcggagatgaagtggtgcgcaagctcggcctcaatgccgaccaggtttacaagaccttgctggtcgccgtgaacggcgatatgaagcatctggcggtggccgtcactccggtcgccgggcagctggatttgaagaaagtggcgaaagcgctgggcgctaagaaagtcgacatggccgacccgatggtggcgcagcgtatcaccggctatctggtgggcggcatcagtccgctggggcagaagaagcgcctgccgacggtgattgacgccccggcgcaggaatttgccaccatctatatttccggcggcaaacgcgggctggatattgagctggcggccagcgatctggcgcagcttctcgatgcgaagttcgccgatatcgcccgccgcgattga

SEQ ID NO: 134873 - DNA, 795 bp, Enterobacter cloacae
atgggcctgttaaaccggataaaaatgctgtggcgagccgccgtcggctcgtcttattcctggcctgcgatggatattgtcctgcccggcgaacgctatttgcacctcgtcggcagtatccatatgggcacccgcgacatggcgccgccgccggcgaagcttctgaaaaaaatacgccaggccgatgcgttaatcgtcgaggccgatatcagcggcaatgaaaccccgtttagcaatctccccacttacccaccgctggcggaacgcctgagcgatgcgcagctgagcgagctagaggcgcgagccggcgagctgggcctgtcggtcgggctgttcgacagccagccgctgtggcaggtggcgatggtcctgcaggccacccaggcgcagaagctggggctgcgaccggattacggcatcgattatcagttgctgatggccgcccgcgagagcaacatagcggtgatggagctggaaggcgccgacagccaaatcgcgctgctgcgcgatctgcccgacggggggatggcgctgctggaggatacgctgacccactggcgcaccaacgcccgtttactgcaggtcatgatcggctggtggctggagcaaccgccgtcgcgcggcgcggtatcgctgccgacgacctttagccagtctttatatgatgtgctgatgcaccagcgcaacctcgcctggcgcgagacgctgctggccttgccgccggggcgctacgtggttgccgtcggcgcgctgcacctgtatggcgaagggaatctgccggatatgctgacataa

SEQ ID NO: 134874 - DNA, 2502 bp, Enterobacter cloacae
atgtctaacactatcgacctgacgctggatggcctctcctgcggccactgcgtcaaacgcgtgaaagagagtctggagcagcgtcctgacgttgagcaagcggaagtcaccctcactgaagcccatgtgacgggcagcgccagcgcgcaagcgctgattgataccgttaaacaagccggatacggcgcggagctcagccacccaaaggctaaaccgctggcagaatcatcaatcccgtcggaagcactgacagcggccactcctgagcttccggcagcccatgacgaagatgacagtcaacagctgctgatcaacggcatgagctgcgccagctgcgtctcccgggtacaaaacgcgcttgccgcggtgccgggcgtctcacaggcgcgggttaacctggcggaacgcacggcgctggtgatgggcagtgcgtccgccgcagaattagtgcaggcggtggagaaagccggctatggcgcggaggcgatcgaagacgatctgcaacgccgcgaacgtcagcaggaaaccgccctcgcgacgatgaaacgttttcgctggcaggcgattgtcgccctgctggtcggcgtgccggtgatggtctggggcatgatcggcgataacatgatggtcagcgacgacaaccgttcgctgtggctggttatcggccttgtcaccctcgccgtcatggtcttcgccggcggccacttctaccgcagcgcgtggaaaagcctgaaaaacggcaccgccaccatggatacgctggtggcgctcggcaccggcgtcgcctggctgtactcgatgagcgtcaacctgtggccgcagtggttcccgatggaagcccgccatctctattacgaagccagcgcgatgattatcggcctgattaacctcggccatatgctggaggcccgcgcgcgtcagcgctcctcgaaagcgctggaaaaactgctcgacctgacgccgccttcggcgcgggtcgtcacgcccgagggcgagaaagatctgccgctcgcggaagttcaggccggcatgacgctgcgcctgactaccggcgaccgcgtcccggtcgacggcatgataagccagggcgaagcctggtttgatgaagcgatgctcaccggcgaaccagtgccgcagcaaaaaggcgatggcgacgccattcacgccggtaccgtggtgcaggatggcagcgtgctgtttaccgccagcgccgtcggcagccagaccacgctggcaagaattatccgcatggtgcgccaggcgcagagcagcaaaccggagatcggccagctggcggataaaatctccgccgtatttgttccggcggtggtcgtcattgcgctgattagcgctgcgatctggtacttcttcggcccggcgccgcagatcgtctataccctggtcattgccaccacggtactgattatcgcctgtccgtgcgccttaggcctggcgacgccaatgtcgattatctccggcgttggccgggcggcggagtatggcgtgctggtgcgcgatgccgatgcgctgcagcgcgccagtgaactcgacaccctggtgttcgataaaaccggcaccctgaccgaaggcaagccgcaggtggtggcggtgaaaactttcgctggcgttgatgagcataccgcgctgcgtcttgccgccgcgctggagcagggctcaagccatccgctggcgcgagcgatccttgataaagctgccgacggcccattgccggaagtcagcggcttccgcaccctgcgcggccttggcgtcagcggcgaggcggaaggtcatcgtctgctgctcggtaaccaggcgctgctcaacgagcagcatatcaataccgccgaggtggaaagcgagatgacagcccaggcctcacgcggcgccacgccggtgctgctggcggtggatggtcaggccgccgcgctgttcgccatccgcgacccgctgcgcgaagacagcgtcgacgccctggcgcgtttgcatcggcagggctaccggctggtgatgcttaccggggataaccccaccaccgcgaaggctatcgccaaagaagccggcattgatgaagtgatcgccggcgtgctaccggacggtaaagccgatgccattaagcgtctgcagagccaggggcacaaagtggcgatggttggcgatgggattaacgacgccccggcgctggcccaggcggatgtcgggatcgccatgggcggcggcagcgatgtcgctattgaaaccgcggcgatcaccctgatgcgccatagtcttcacggcgtggccgatgcgctggcgatttcgaaagcaacgttacgcaatatgaagcagaacctgctgggcgcgtttgtctacaactcgctgggtatcccgattgccgccgggatcctctggccactgaccggcaccctgctcaacccggtggtcgccggcgcggcgatggcgctgtcgtcgatcaccgtggtgagtaacgccaaccgcctgctgcgctttaaaccaaaagagtaa

SEQ ID NO: 134875 - DNA, 411 bp, Enterobacter cloacae
atgaatatcagcgatgtggcgaaaaaaaccggcttaaccagcaaagcgattcgtttttatgaagagaaggggctggtaacgccgccgttgcggagcgaaaacggctaccgcacctatagtcagcagcatctcgatgagctgacgctgctgcgccaggcgcggcaggtggggtttaacctggaagagtgccgcgagctggtggccctgttcaacgacccgtcgcggcacagcgccgatgtgaaaaaacgcacgctggagaaagtggcggatatcgagaaccatatccgcgagctgcaaaatatgcgcgcgcacctgctggcgctggccgaatcctgccccggcgacgacagcgcggagtgcccgattatcgataatctttccggctgctgccatcgcaaggcgcaggcttaa

SEQ ID NO: 134876 - DNA, 459 bp, Enterobacter cloacae
atgatcggcatgatcctcgcacacccccatctgttctggctaagcctcggcgggctgctgctggcggccgagatgctgggcggcagcggatacctgctgtggagcggcgtcgccggcgtggtgaccggcgccctgacctggctcctgccgctgagctgggaatggcaaggcacgctgtttgccgttctcaccctgctggcggcgtggctgtggtcgaaatggctgcgcaagcgcgtcaaaacgcagcgcccggccgatgcccagctcaaccagcgagggcagcaactggtgggccgccgcctgacgctggatgccccgctggtgaacggccgcggccacgtccgcgtgggcgatagctcctggccggtgattgccgatgaagacttcgcggcgggcagcaaggttgaagtgattgccgtagaagggattacgctacgaatcagacccgccgtccgttaa

SEQ ID NO: 134877 - DNA, 918 bp, Enterobacter cloacae
atgctgatttttattcctatccttattttcgtcgcgctggttattgtggccgcggcggtgaaaattgtcccgcagggttaccagtggacggtggagcgcttcgggcgttttacccagacgctgcagccgggattaagcttagtcgtgccgtttatggaccgtatcggccgcaaagtgaacatgatggagcaggtgctcgatatcccctcgcaggaggttatctcccgggataacgccaacgtcaccatcgacgcggtctgctttattcaggtgatcgacgcgccaaaggccgcctacgaggtcagcaatcttgagcaggcgatcgtcaacctgacgatgaccaacatccgtaccgtgctcggctcaatggagctggacgaaatgctctcccagcgcgacagcattaacacccgcctgctgcatatcgttgacgacgccaccaacccgtggggggtgaaaatcacccgcgtcgaaattcgcgacgttcgcccgccggcggagcttatcgcctcgatgaacgcccagatgaaagccgaacgtaccaaacgcgcgtacatccttgaggccgaaggggtgcgacaggcggaaattctgaaagcggaaggggaaaagcagtcgcagatcctcaaggccgagggcgaacggcagtccgcgttcctgcaggcggaggctcgcgaacggtccgccgaagcggaagcccgcgccacccaaatggtctcctcggcgatcgcctcgggcgatattcaggcgatcaactacttcgtggcgcagaaatacaccgatgcgctgcagcagattggcgccgctaacaacagcaaagtggtattgatgccgctggatgccagcagcctgatgggatcgatcgccgggatcagcgagctgatcaaagaaggcgctggcgatcggaaaaaatcatga

SEQ ID NO: 134878 - DNA, 678 bp, Enterobacter cloacae
atgaaggaaaataacgcgcttttgcgtctcgacggtgtggggtttaagaccgacgacgccgttattttacacaatattagttttcagcttcgcgccggagaattcaagttgattaccggcccttccggctgcgggaaaagtaccttgctgaagattatcgcctcgctgctcagcccaacctccgggcgcctgttcttcgacgatgcggatgtcgcgacgctgtcgccggaaaggtatcgccaacaggtttcttactgcgcgcagacgccggccctgttcggtgattcggtttacgataatctgatttttccgtggcagatccgcaataaacaaccggatccgcaggcgctgctggccgatctgcagcgctttggccttgacgaaaatatgctggaaaaatccattaacgaactgtccggaggggaaaagcagcgcgtatcgctgatccgcaatctacaatttctgccgcgcgtgctgctgctggacgaaattaccagcgcgctggatgaaagtaataaacagaatgttaatgaaattattcatggctacgcaacggaaaaacaggtcgctgttctgtgggtcacccacgatcgcaatgaaatttcgcatgccgatgaagtgattacgctgcaacctgccggcggaaatatgcaggaggtacagcatgaacgggcataa

SEQ ID NO: 134879 - DNA, 783 bp, Enterobacter cloacae
atgaacgggcataacattacgaacgaatcgctggcgctgtcgatggtgctggtgctgatcgctattctggtcagctatcgggaaaagctggcgctggaaaaagatattatctggagtatttgccgggcgatcgtgcagctgataatcgtcggctatgtgctgaaatatatctttaacgtcaatcatgcggttctgacgctgttgatggtgctgtttatctgctttaacgcggcgtggaatgcgaagaagcgcagtaaatatatcgacaaagcttttatctcgtcgtttatcgccatcactactggcgctggactaacgctggcggtactggtgttttctggctcgatcgccttcgtgccgatgcaggtgatcccgattgccgggatggtggccgggaacgccatggtggcggtagggctgtgctacaacaatatgggccagcgcttcagcagcgagcagcagcagattcaggagaaactgagcctcggcgcgacgccgaagatggcctcagcgcggctgattcgcgagagcattcgcgcgtcattgattcccaccgtcgattcggcgaaaacggtcggtctggtgagcttgcctgggatgatgtcggggctgatttttgccggtattgacccggtgaaggcgattaagtaccagatcatggtgacctttatgctgctgtcgaccgccagcctgtcgacgattatcgccggctatctgacctaccggaagttcttcaacgcccgccatcagctggtggtgacgcagctgaaaaagcgcccgtga

SEQ ID NO: 134880 - DNA, 855 bp, Enterobacter cloacae
atgtccgaacagaatattgtcaacattagcgaagcgaacctgcagcagacgctacagcagtccatgaacgttccggtgctgttttatttctggtctgcccgcagccagcactgcgaacagctgaccccggtgctcgagcgcctggcagcccaatacaacggccagttcacgctggcgaaggtcgattgcgacgccgagcagatgctcgcttcacagtttggtctgcgcgccatccctacggtttatctgttccagaacggccagccggtggatggttttgaaggcccgcagccggaagaagcgatccgcgccctgctggataaagtcctgccccgtgaagaggagctgaaagctcagcaggcgctggccctgatgcaggaagaaaaatacgccgatgccctgccgctgctgaaggaagcctggcagctgtcgaatcaggaaagccagattggcctgctgctggcggaaacgctgattgctctgcaccgttccgatgaagcggaaagcgtgctgaaaaccattcctctgcaggatcaggatacccactatcagggtctggtggcgcagattgagctgctcaaacaggccgccgacaccccggaaatccagcagctgcagcagcaggtggaacagaatccggaggatgcgcagttggcctcccagctggcgctgcagctgcatcaggtcgggcgtaatgaagaagcgctggccctgctgttcagccatctgcagaaagatttaggcgccggcgatggccaggcgcgcaagatgctgcaggagatcctcgccgccctcggtaccggcgatgcgctggccgccaaatatcgtcgtcagctctattcgctgctgtactaa

SEQ ID NO: 134881 - DNA, 771 bp, Enterobacter cloacae
atgcaaaaaacggttttagtgacaggctgttccagcggaattggtctggaaagcgcgctggatttaacccgccagggctttcgcgtgctggcggcctgccgcaaagcagaggatgtcgcgcggatgcaggatctggggctaaccggtattttgctcgatctggatgacccgcagagcgtggagcgcgcggcagcggaggtgattgcgctgaccgataatcgtctctacggcctgttcaataacgccgggtatggcgtctatggcccgctgaacaccatcagccgccagcagatggaacagcaattttccgctaactttttcggcgcgcatcagctcaccatgctgctgctgccggcgatgacgccgcacggcgaagggcgcatcgtgatgacctcctcggtgatggggcttatcgccagtcccggccgcggagcctatgccgccagtaaatatgccctcgaggcgtggtccgacgcgctgcgcatggagctgcgccacagcggtattcaggtcagcctgattgaaccgggcccgatccgcacccgctttaccgataacgtcaaccagacgcaaagcgataagcccgtagaaaatccgggcatcgccgcccgctttaccctcgggccggaggcggtggtggaaaaagtgcgccatgcttttaccagcgataaaccaaagctgcgctatccggtcaccctggtcacccacgcggtggcgctgcttaagcgcctgctgcctgcccgcgcgatggacaaaattatccacggctga

SEQ ID NO: 134882 - DNA, 594 bp, Enterobacter cloacae
gtgcctttcctgttgttgttcctgtttacctgccgcgcgatggcggcggacacgctattgatcctcggcgacagcctgagcgctggctatcggatggcggccaacgccgcctggcctgcgctgctcaatgagcagtggcaggcgaaaacgccggtggtgaacgccagcatcagcggcgatacctcgcagcaggggttggctcgcctgccagcgctgcttaagcagcaccagccgcgctgggtgctggttgagctcggcggcaatgacggactgcgcggttttccgccgcagcagaccgagcagacgctgcgcaccattattaaagatatcaaagcggccaacgccgagccgctgctgatgcaaattcacctgccggcgaactatggccgccgctataatgaagccttcggcgcgatttacccggccctggccaaagaattcgctattcctctcctgcccttttttatggaggaggtctatctcaagccgcaatggatgcaggacgacggcattcacccaaatcgcgacgcgcagccgtttatcgccgactggatggcgaagcggctggctcccttagttaatcatgactcctga

SEQ ID NO: 134883 - DNA, 687 bp, Enterobacter cloacae
atgccagcggaaaacatacttgaagttcatcatcttaagaagtccgtcggtcagggggagcatcagctctccatccttaccggagttgagctggttgtcaaaccgcggcagaccatcgccctgatcggcgagtcgggttccggtaaatcgaccctgctggcgatcctcgccggcctcgacgatggcagcagcggggaagtatcgatgctgggcaaaccgctgcaccggatggatgaagaggcgcgggcggcgctgcgggcgcagcacgttggttttgtttttcagtcgtttatgctgatcccgacgctcaacgccctggagaacgtcgagctgccggcgttgctgcgcggcgccagcgatagccagagccggggcgatgcccgcgcgctgcttgagcagctgggacttggcaaacgcctgcaccacctgccggcgcagctctccggcggcgaacagcagcgggtggcgctggcccgggcctttaacgggcgcccggccattctgttcgccgatgagcccaccggcaacctcgatcgccagaccggggacaaaattgccgatctgctgttctcgcttaatcgcgaacacggcaccaccctgatcctcgtcactcacgatccgctgctggcggcgcgctgcgatcgccgtctgcgcctggtggatggccagctgcgggaggaagcatga

SEQ ID NO: 134884 - DNA, 2394 bp, Enterobacter cloacae
atgatcgcccgctggttctggcgcgaatggcgctcgccgtcgctgctgatcgtctggctggcgttaagcctcgccgtggcctgcgtgctggccctggggtcgataagcgatcggatggagaaaggccttagccagcaaagccgtgagtttatggccggcgaccgtacgctgcgcagttcgcgcgaggtacccgccgagtggatcgcacaggcgcggaagtcagggctgaccgtcggcgagcagctgagctttgccaccatgacgttcgccggtgatacgccgcagctggcggacgttaaggcggtggacgaccgctatccgctgtatggcaccctcgagacgcagccgccggggctgaagccgcaggcggggagcgtgctgctggcgccaaggctgatggcgctcctgaacctgaaaaccggcgatacgattgacgttggcgatgccacgctgcgcattgccggggaggtgattcaggagccggatgcagggtttaaccccttccagatggcgccgcgactgatgatgaatatggacgacgtggcaaaaactggggccgtgcagcccggcagtcgcgtcgcatggcgctataagttcgccggcgacgctgaacagctggccaattatgagcagtggctgctgccgaagctcggcccggagcatcgctggattggccttgaccaggacgacagcgcgctgggcaaatccctcgaacgctcgcagcaattcctgttgttatccgcgctgttgacgctgctgctggccgtcgccgcagtggcggtagcgatgagccactactgccgcagccgctatgatctggtcgccatactcaagacgctgggcgccggaaggtcgcagctgcgcaagcttatcgtcggccaatggctgctgctgttgacgctgtcggtgataaccggcggggtggcgggcctggcgctggagcgtctgctgctgctggttctcaaaccggtgctgcccgccgcgttacccgctgccagcggttggccgtggctgtgggctatcggggcgacaggcgtcatttccctgctggtgggcctgcgaccctatcgactgctgctggcgaccctgccgctgcgagtgctgcgtcaggatgtggtggctaacgtctggccgttgaaaatctggatcccggcggttagcgtcgtggtggtgggcctgttggcctggctgctgggcggcagcccgctgctgtggtcggtgctggccggggcggtggtgctggcgatgctgtgcggcctggtgggctggggattgctgtggctgctcaaacgcctgacgctcaaagccttgccgctgcgtctggcggtgaaccgcctgctgcgccagccgtggtcgaccctcagccagctggcggcgttttccctgtcgtttatgctgctggcgctcctgttggtgctgcgcggcgatctgcttgaccgctggcagcagcagttgcccccgcagagcccgaactactttctgatcaatatcgcccctgagcagatagtgccggtgaagaccttcctcgccgaacaccagacgcgggcggcggaattctatccgatcgtccgggcccgtctgacgcagatcaacggtcaatccacggacgggaacaaagacgaagcgctgaatcgcgagcttaatctcacctggagcgaacagcgtccggatcataatccgctggtggccggcagctggccgccgaagccgggcgaggtatcgattgaggaggggctggcgcagcggctggggataaagatcggcgatacagtgacctttaccggcgatacccaggagttcagcgcgaaggtcagcagcgtgcgcaaagtagactgggagagcctgcggccaaacttcttctttattttccccgccggggcgctggacgggcagccgcagagctggctcaccagcttccgctgggataacggtcccgcgatgttgacccagctgaaccgcgagtttcccaccgtcagtctgctggatatcggcgccatcctgcgtcaggtcggccaggtgctctcccaggtcagccgggcgctggaggtgatggtaggcctggtgacggcctgcggcgtgctgctgttgctggcgcaggtgcaggtcggtatgcgtcaacgccatcaggagctggtggtctggcgcacgctgggggcaggaaaatcgctgctgcgcgctacgctgtgggcggagtttgccctgctgggggcgataggcgcggaagtggcgctggcgatgctgcagacgaaagtctttgattttccctgggcgccagactggcgcctgtgggtgttgctgccgctgacgggagcggtgttgttatccctgtgcggcggcgggctggggctgcgtctgttaaaaggaaaagcgctattccgccagtttagccagtaa

SEQ ID NO: 134885 - DNA, 1146 bp, Enterobacter cloacae
atggcacacacaataaaagcgctggcgatctcgatcggcgcagcattagcgttaacgtcattgccttcccacgcggagattacgctgctgaaacaagatccgcaggcgggcgatccgttaagccggcttaactttaccgtcggcggcagtatccggccgcagttcaacatgatgaccggcgatggcgacaaaggctcctataagcgtaacggttttgacggcggcacccgcttccgcttcgcggcggattactacctgttcgatgatattagctggatcagctactatgagctgggcgtgaacattccggcgctgtttgactgggataaccactacgcggaaggcgcgaacaataccacccgccgcatgctgtataccggcctgaaaagcgatacctggggtacgttaacctacgggcagcagaacagcatttactatgatgtggtgggggtgaaaaccgatatctgggactacgatatgatcggtcaggccccggggaacggtattaatggcgattacgatggctcctatcgttcacgtaatatgctgaaatataagaaaactgtaggtgatgtcgatctttacggctcttatctgttcgaagacagcgaatacctgccgggtaacggcctgcgttacaagcgtaaaggcggtggttctgttggcgcggactaccacatcatgaaggatctgacctggggtaccgcgtggaactacacccgcgccgaaatgcgcgacccgtcaagcgccgacagcaaaacctatgaccagaatatcgtcggtaccgcgctgagctggaccccggataactggaccttctccttcggcggcggctggtatcagaacttcctcaccaccaagaaaaccgatgtgcataattactttgccggtgacgcctgggggattgaatattttgcgggctataaattcccgatcaatcaatacgctgttaaatctattcagccgtactttatgggcgaccgtctggaatatgtgaacggccgcaactaccagcgtatcgataacggtctggggattagcttccagctggattacggtttccgcgttgactacgaacacgtgtttacctccagcaccgacaaccttggcgatatgaacctggtccgtctgcgctacgacttctaa

SEQ ID NO: 134886 - DNA, 1077 bp, Enterobacter cloacae
atgaccaatgggacggattatcgcgccattctcgccagcgatacgccactgattgacgtacgcgccccggtggagtttagccaaagcgcgatgccggcggcgatcaacctgccgctgatgaatgatgaagaacgcgccgcggtcggcacctgctacaagcgtcaggggccggaagcggcgctggcgctcggccataaactggtccagggtgacctgcgcgccagccgtactcaggcgtggctggaagcgtgcgcccgttacccacacggttacctgtgctgcgcccgcggcggccagcgctcgcatatcgtccagcagtggctgaaagaagctggcgtggattaccccctgatcgtcggcggctataaagcgctacgccaggcggcgatccaggccaccgacgacctggtgcagcgcccgatcgtgctgattggcggctgcaccggcaacggtaaaactcagctggtctgctcgcgcccggacggtatcgacctggaagggcttgctcatcaccgcggttcttcattcggtcgaaccctgcaggatcagcatccgcaggccacctttgaaaaccacctggcggtcagcctgcttaaaaaagccgaacagcagacccgctgggtgctggaagatgaaggccatatgatcggcgccaatcatctaccggagagcctgcgcctccgcatggcgcagtcgccgctggcggtggtggaagatccgtttgacgttcgcctcgaacggctgcgcgaagagtatttcgatcgcatgtatcgcgactttatcgccgcatatggcgaagagaaaggctggcaggcatacggcgagtatctgcatcacggcctgtttgccatccgccgtcgcctggggctgcagcgttttgctcagctcactgaacggctcgatgaggcgctggtgcagcagcagcgcaccgccagcaccgaggcgcactttgcctggctggtaccgctgctggaagaatactacgacccgatgtatcgctatcagttggggaaaaaagccgggaaaattctctttcgcggcagctggcaggaggtcgcagcctggctggcgaagtaa

SEQ ID NO: 134887 - DNA, 1068 bp, Enterobacter cloacae
atgaaacaggtatgcgtgctcggtaacggccagttaggccgtatgctgcgccaggccggcgagccgctgggcatcgccgtctggccggtggggctggaagccgacccggaagcggtgccgttccagcagagcgtcatcacggcagaaattgaacgctggccggaaaccgccctcacccgcgagctggcccgccacccggcgttcgtcaaccgcgatgtcttcccgattatcgccgaccgcctgacgcaaaagcagctgtttgacaagcttggcctcgccaccgccccgtggcagctgctggcggataaaagcgagtggccggcggtgtttgctcgccttggcgaactggcgatcgttaagcgtcgcgttggcggttacgacggccgcggccagtggcgtctgcgggaaaacgagatcgatcagctaccggccgataactacggcgagtgcatcgtcgagcaggggattaacttctccggcgaggtatcgctggtgggcgcccgcgctcatgacggtagcaccgtcttctacccgctgacccgtaacctgcatcaggacggtattctgcgcgccagcgtcgccttcccgcaggccaacgctcgccagcaggaacaggcggaaagcatgctgacggcgatcatgaacgagctgaactatgtcggcgtgatggcgatggagtgcttcgttaccgccgaggggctgctgattaacgagctggcgccgcgggtgcacaacagcggccactggacgcagaacggggcgtctatcagccagttcgagctgcatctgcgggcgattaccggcctgccgctgccgccgccggtggtcaacagcccgtcggtgatgatcaacctgatcggcaccgatcttaactacgactggctgaagctgccgctggtgcacctgcactggtatgacaaagaggtgcgcccgggtcgtaaagtcggccacctgaacctcaccgacagcgataccgatcgcctgagcgcgacgctggaagcgatcaagccgctgctgccgccggagtacaccagcggcctgttctgggcgcaatcgcagctcagctaa

SEQ ID NO: 134888 - DNA, 510 bp, Enterobacter cloacae
atgtcttcccgcaataattcggcgcgtatcgccatcgtgatggggtccaaaagcgactgggctaccatgcaatttaccgcagaaatccttgatgccctgaacgttccgtaccatgtcgaagtggtctccgcccaccgcacgcccgataagctgttcagctttgctgaaagcgccgaaagccacggttatcaggtgattattgcaggagcaggcggcgcggcgcatctgccgggcatgattgcggcgaaaaccctggtgccggtgctcggcgtaccggttcagagcgcagccttaagcggtgtcgacagcctctactccattgtgcagatgccgcgcggcattccggtcggtacccttgccatcggcaaagctggcgctgcgaacgccggcctgctcgccgcgcagatccttgcccagcatgatacagtactgcaccagcgcctgagcgcctggcgtcaggcgcaaaccgatgaagtgctggataatccggatccgcggggtgcggcatga

SEQ ID NO: 134889 - DNA, 339 bp, Enterobacter cloacae
atgagcaggaaaaagtggagtcagccgctgacgtggggaatgatcatcgcgatcctcaacccgttaggggtaagttatatcgccttaatcggcgtcgttatcggcaacacgctgacgtttgtctggtgtgcgatgctggcgtgggctatctatttttatgccatttatttgctctgcacccgccctcacgatagccggctggtacaaatctatttactgcttatgggcaccctgatgctcccgtgggggttagtgctgcttatcacctgtatcatgagggagataaaggtcaatcaggcacccacgccatcacctccaggcgagacaaaagacggctaa

SEQ ID NO: 134890 - DNA, 723 bp, Enterobacter cloacae
gtggcgacactttttattgcagatttgcacctgcaaacagaagaaccggcgatcaccgccggttttctgcgttttttacagggcgaagcccgccaggcagacgctctgtatatccttggcgatctgtttgaggcatggatcggcgatgacgatcctaacccgctgcaccaacaaattgcctcggcaatcaaagccgtcgtcgacgccggcgtgccgtgctacttcatccatggcaaccgcgattttctcgtcggccagcgctttgcccgccagagcgggatgatcctgctcgccgaagaagagcgactggacctctatggccgtgaagtcttgatcatgcatggcgacacgctgtgcaccgatgacctaggctatctggcgtttcgcgccaaagtccacaccccgtggatccagcgtttgttcctggtcctgccgctgtttattcgccgtcgcatcgccgcccgcatgcgcgccgacagcaaagccgccaacagcagtaaatcaatggaaattatggatgtaaatccacaggcggtagttgacgcgatggagcggcatcacgtgcagtggctgatccacggccatacccatcgcccggcggtccatgaactgcaggccaacggccaacccgcatggcgtgtggtacttggcgcctggcacagcgaaggttcgatggtcaaggtgacgccggacgacgtcaaactaatccactttccgttctaa

SEQ ID NO: 134891 - DNA, 495 bp, Enterobacter cloacae
atggttactttccacaccaatcatggcgatatcgtaatcaaaacgtttgacgacaaagcgccggaaacagttaaaaacttcctggactactgccgcgaaggtttctacgacaacaccattttccaccgtgttatcaacggcttcatgatccagggcggcggttttgaacctggcatgaaacaaaaagcgaccaaatctccgattcagaacgaagcgaacaacggtctgaaaaacacccgcggcacgctggcgatggcccgtactcaggcgccgcactctgccaccgcgcagttcttcatcaacgtggttgacaacgacttcctgaacttctccggcgaaagcctgcagggttggggctactgcgtcttcgcggaagtggttgaaggcatggacgtggtggacaaaatcaaagcggttgccaccggccgcagcggcatgcaccaggatgtgccgaaagatgatgtgatcatcaaaagcgtcaccgtcagcgagtaa

SEQ ID NO: 134892 - DNA, 1386 bp, Enterobacter cloacae
atgttaaaaatttttaatacactgacgcgccagaaagaggaatttaaacctatccatgccggggaagtcggcatgtacgtgtgtggtattaccgtttacgatctctgtcatatcggccatggacgtaccttcgtctcctttgacgtcgtggcgcgctatctgcgttttctcggctataagctgaagtacgtgcgcaatatcaccgatatcgacgacaaaatcattaagcgcgctaatgaaaacggcgaaagctttgtcgcgctggtcgatcgcatgattgccgaaatgcacaaagattttgacgcgctgaatattctgcgtcccgacagcgagccgcgcgcaacgcaccatattgcggagatcattgagatcaccgagcagctgatcgccaaaggccatgcttacgtggcagataacggcgacgtgatgttcgacgtgccgacggacccgaactacggtctgctgtcgcgtcaggatctcgatcaactgcaggcgggggcgcgcgtcgacgtggttgacgtcaagcgtaacccgatggacttcgtcctgtggaaaatgtcgaaagagggcgagccgagctggccgtcgccgtggggcgcgggccgtccgggctggcatatcgagtgctcggcgatgaactgcaagcagcttggcaaccacttcgatattcacggcggcggttcggatctgatgttcccgcaccatgaaaacgaaatcgcccagtccacctgcgcccacgacggcgaatacgtcaactactggatgcactccggcatggtgatggttgaccgcgagaagatgtcgaaatcgctgggtaatttctttaccgtccgcgacgtgctgaagtattacgatgcggagacgattcgctacttcctgatgtccggccactatcgcagccagctgaactacagcgaagagaacctcaagcaggcgcgttcggcgctggagcgtctgtacaccgcgctgcgcgggacggacaaatccgtcgacgcggcggggggcgaagccttcgaagcacgctttatcgaggcgatggacgacgacttcaacaccccggaagcctattcggtgctgttcgatatggcgcgtgaagtaaaccgcctgaaaaccgaggacgcggccgcggcgaacgccatggcggcccacctgcgtaagcttgctgcggtgctgggtctgctggagcaggagccggaggcgttcctgcagagcggcgcgcaggttgacgacgcggaagtggcggagatcgaatcgctcatccagcagcgtctggacgcgcgcaaagcgaaagactgggcggcggcggatgcggcgcgcgaccgtctcaacgagatgggcattgtgctggaagatggcccgcagggcaccacctggcgccggaagtaa

SEQ ID NO: 134893 - DNA, 213 bp, Enterobacter cloacae
atggcgacattttccttaggtaaacacccgcacgttgagctgtgcgatctgctgaagctggaaggctggagcgaaagcggcgcccaggcgaagatcgccatcgccaacgggctggtaaaagtcgacggcgcggtggaaacccgcaaacgctgcaaaatcgtcgccggtcagacggtgagctttgaaggccagagcgtgaccgtcacggcctga

SEQ ID NO: 134894 - DNA, 855 bp, Enterobacter cloacae
  misc_feature (817)..(826): n is a, c, g, or t
atggcagcaaaaattattgacggtaaaacgattgcgcagcaggtacgctctgaggttgcggaaaaagtgaaggctcgcgttgcggccggaaaacgcgcccctgggctggccgtcgtgctggtcggcagcaacccggcctcgcagatttatgtcggcagcaagcgcaaagcatgtgaagaagtgggcttcgtctcccgctcttacgatctcccggaaaccaccagcgaagccgagctgctggagcttatcgacactctgaatgccgataagaccatcgacggtattctggttcagctgcccctgccggcagggatcgataacgtcaaagttctcgagcgcatcgcgccggataaagacgtcgacggcttccatccttacaacgttggccgcctgtgccagcgcgcgccgcgcctgcgtccgtgcactccgcgcggtatcgtgaccttgctggaacgctacaatatcgacacctacggcctcaatgcggtggtcattggcgcctccaatatcgtcggtcgcccgatgagcatggagctgctgctggccggctgcaccaccaccgtcacccaccgctttacaaaaaacctgcgccatcatgtcgaaaacgccgacctgctgatcgtcgcggtgggcaaaccgggctttattcctggcgagtggattaaagaaggggcgattgtggtcgatgtcggcatcaaccgtctggaaagcggcaaagtggtcggcgacgtggtgtatgaagatgccgccgaacgcgcgtcctacatcaccccggttcccggcggcgttggcccgatgaccgtcgccaccctgatcnnnnnnnnnnaagagtatcacgacgttgaggaggcctga

SEQ ID NO: 134895 - DNA, 402 bp, Enterobacter cloacae
atgaaattagttatcgcctccgtaatttctctgctcagcttcagcgcgctggcggcgccagaggggacgctcagcgtacacattcttaatcagcaaaccgggctcccttcaccgagggtgcagattgagctggataaacagcagggggagagctggcagcatatcgccaccggtaaaacggatgccgatgggcggattaagtcgctctatccgcaggcggagaatatggagccgggggtgtataaagtgacgtttaaaactggtgactattttaaaagccaaaatatgaatacgttcttcccggtgattccggttattttcaatgtcacaaagcaaaatcaaaaactgcatatcccgctgctgctcagtcagtacggatactctacctaccgcggcagctga

SEQ ID NO: 134896 - DNA, 171 bp, Enterobacter cloacae
atgtctggacttattaatccacatgcggccccggaagaagcagcctatgcgctgctgattgagctcgttcgcgcccagcgcgtgccgcaatatgaaggcgaaatttccggcctgctggcgatgtacgacgaagccgttaaacactttaaagagaaagagaccgagcgttag

SEQ ID NO: 134897 - DNA, 1287 bp, Enterobacter cloacae
atgagcactacaacgttaacgctttcttttgccggacaacaaccgcccatcgccctgccgcaggtgccgggaacgcgggggccggtgggagtcgatatgcgcgggctaaatcagtccggattctgcagctatgaccccggcttcgccaacaccgccggatgccagtcggcgatctcgtggatcgatacggaaaacagcgtgctattgcaccgcggctatccggtggatcaactggctcgccagtgcgattttctcgaagtggcctacatcatgctgaacggtgacgcgccggatgaggccagctatcaaacctttcgcgagactatcacccgccatactctggtccatgagcagatagcccgcatgtgcagcggctttcgtcgcgactcgcacccgatggcgctgatgtgcgccctggtgggggcgctggcggcgttttatcatgacgtcctggacgtggaaaatccgcagcaccgggcgctggccgccacccggctgctgtcgaaaatgcccactatcgccgccatgagctacaagtacaccattgagcaacccgcggcgtatccgcgcaacgatctctcctatgccggtaatttcctgcagatgctgtttgctatcccggcggaaaaatacgttctcaatccggttatcgagcaggcgatgaaccagatcctggtgctgcatgccgatcacgggcagtgcgcctcgaccactacggtgcgcgcggcgggctcctccggggcgaacttattcgcctgcgtcgccgccgggctggcgtcgctgtgggggccgatgcatggcggagcaaatgaatcgagcatgcgaatgctggaggagattgaaagcgtcgatcaggttccggcgtttctgcgccaggcgaagcgcgatccgcaggcatttcgccggctgggttttggcaactcgcgctaccgtcaccgtgacccgcgcgccgatatcctgcgtgaaaccagccatcgggtgctggcggaggtaggcatgtctgaccgcctgctgcaggtggcgatggcccttgaggacgtggcgctgaccgacccctattttgtggacaatggcctgtcgccaagcgtggatttctataccgcggtgatccttaaagcgatgaatctgccttcgtcgatgtttgcggtggtcaccgcggtcggtcggacggtcggttgggtggcgcactggaacgagatgcaccaggcgccgctgaccatctaccggtgcgccagtaaaggaaacatcaacttcctgtctttaaacaggttttccttctggtcatag

SEQ ID NO: 134898 - DNA, 867 bp, Enterobacter cloacae
atgaattatcaattagtgaagcaagtcagagaaaataacccattaagaaaaagcttcattgaccttgccgttaagacttttgacctgtcttttgaagagtggtatcagcaaggttactggaccgacgcctatatcccctatgcttttgtcgaacgcaataaagttatcgctaacgcttcggccaacatcatcgacctgcgctggcagggcgagccccggcgttatattcagattggcaccgtgatgaccgagccggaccaccgtaataagggattagccggccagcttatccatcacatcctgcaggactggcagcaggaggcggacgccttctttttattcgccaatcccaccacggtggatttttaccccaaatttggcttcacccgcagcgaagagtatcaatatattatgccggtctccccgcgagccggtgattttcgtaaactggatatggacagccctgacgatgtcgccctgctccgccattactatgaaaaatccaacccgttctcaccgctgcgggtggagcataactttggcctgctgatgttttactgctcagcctttatgaagcattttgtctattactcggcaaaaaatgaggcggtggtcatcgccatgcaaaacggtccggtgctgatctgctttgatctgttctgcgacgtgggtaagagcctgtcgacgctggtcaacgaactggccgatgaccacgtttaccaggccatcctcggttttacccccagtgaagaccggctcggcgagtatgagaagatagagggagaagatatcctcttcgtctatgaccagaaggaaaacctgtttaaagacaggaagttgatgtttcctttactggcgcaccggtag

SEQ ID NO: 134899 - DNA, 921 bp, Enterobacter cloacae
atgtcaaatttacccaaattttcccgcgcgctgttgcacccgcgttactggctgttgtggctgggaattggctttttgtggctgctggtgcaattaccgtatccggtgatctaccgtctgggaacggcgcttgggcggctggcaatgcgggtgatgaaaagccgcgcgcggattgccagacgtaatctcgaactctgctttcccgagatgagcgccgccgaccgcgaggcgctgctggtgaaaaactttgaatcgctgggcatggggctgatggagaccggcatggcctggttctggccgacgcaccgggtagcgcgctggaccgaaaccagcggcgttaacgaggtggtggagcttctggaagaaaaacagggcattttactgatcggtatccattttctgaccctcgaaatgggtgcgcgaatgtacggcatgtttaccccaggcattggcgtctaccgtcctaacgataacccgctgattgactggctgcaaacctggggacgcttgcgctctaacaagaccatgttggatcgaaaaaatctgaaagggatggtcagggcgctaaaagagggggaaattctctggtacgcgccggatcatgactacggtccggccagcagcgtcttcgccccgctgtttgccgtcgaacaggcagcgaccaccaccggtacctggatgctggcgaaaatgtccggggcgacgattgtgccgtttgttccgcggcgcaagcccaacggcatggggtatgaattgatctccctgacgccggagcgcacgccgccgctggcgagcgccgaggttacggcggcctggatgaatcagattatcgaacagtgcatcctgatggcgcccgagcaatacatgtggctgcaccggcgctttaagacccgcccggaaggggtaccgccgcgttactga

SEQ ID NO: 134900 - DNA, 273 bp, Enterobacter cloacae
atgaaaaaagtgatagtcgcgttagccctttccgccgttgcatttggcgcctccgccgcgcagttgattaccaaagaagaagtgaaacacttcaaactgaccaaagtcgggccgatctcggtggggccgtccggtggcgaattctcttcgccttccgatctgcacgatcagctctccaagctggccgatgagaaaggcggaaagtactacgtgatcaccgctgcgcgtgagcatggccctaactttgaagccacagcggaagtgtataaataa

SEQ ID NO: 134901 - DNA, 1590 bp, Enterobacter cloacae
atgctacaacctgttgttcgcgtcggtgaatggctggtaaccccctctgtaaaccaaatcagcaggaaggggcgccagcttacccttgaaccgcgtttaatcgatcttctggtcttttttgcccgccatccgggggaagtgcttagccgggacgagcttatcgaaaacgtctggacccggaacgttgtgaccagccacgtcgtcacgcagagtatttctgaactgcgcaagtcgctcaaagacggcgacgacgttagccttgagtacatcgcgacggtacccaaacgggggtataagctcacggtgccggtgatctggtgcaccgaagagggggatgagctagccccgtcgatggaggcgctgacgccttcgccgtcgaccgccgttcctgcgccgtcgaccgccgttcctgcgccgccggccgccggtgcgccatccgacgtctctgtccctctccctgatgccgccgcgccgccaccggctcctaccgtggccagcgcgccgtcaggccgcaagcgcctcactaccgacctggtgtgggggctgttcctgttggcgctgggcacctgcgtggcgctggtggcgctgtcgagcatggaatcgcggccgccggtcaacaaggcgcgtctgctgctcaatccgcgcgatatcgatatccacctggtgaatggcaactcctgcgctaactggtcgtcgcagcactcctacgccgtaggactggccagcctgatcaccacctcgctgaacaccttctcgacctttatggtgcatgacaaaacggactacaacatcaatgaaccaagcagttccggcaaaacgctgaccattgagttcgttaatcagcgccattatcgggcgcagcagtgctttatgtcggtccagctggtggacaacgccgacagctcgacgatgctggataagcgctactttgtgaccaacgataaccagctgaccatccagaacgatctgatgaacagcctgtcggatgccctggcgcagccgtggccggcgcgaatgcaggcgatgctcaggcaatatcagccctcgcaaagcgtggcgttaacctatttctaccagtcgcatcagctgttaatgaagggcgacgtcgattcattaagtaaggccagtagcctgctggatgatgtgattaagcgggcgccggattttatttacgcctatgccgaaaaaacgctggtggatgtattgcgccattcgcaacagccgctggacgataaacagctggccgccctctacagtgaagtcgaacgggtaggggcgatgccgggtataaaagacatggcgatttattatcaaataaaagcggtggattcattggggaagggcaaagtcgacgaagcaaataccgcaattaatagtgcgattgatttagagatgtcatggctaaattatgtgctgttaggcaaagtctatgagatgaaaggtgagaaccgtctggctgccgattcttacatcacggcgtttaatttacgtcctggcgaagataccctgtactggattgaaaatggggttttccagacatcggttaaccgagtagttccatatctcgacaactttctctcttcagaataa

SEQ ID NO: 134902 - DNA, 1335 bp, Enterobacter cloacae
atgagttctgccaagaagatcgggctatttgcctgtaccggtgtcgtcgccggtaatatgatggggagcgggattgcattattacctgcgaacctggccagcatcggtggtattgccatttggggctgggtaatttcaattattggtgcgatgtctctggcttatgtttatgcccgactggccactaaaaacccgcagcagggcggtcctattgcctacgctggcgaaatatctccggcgttcggtttccagaccggtgtcctttattatcatgcaaactggattggtaacctggccatcgggattaccgcagtttcttatctctctacgttcttcccaattttaaataacccggtgccagcaggtattgcctgtattgccatcgtgtggatctttactttcgttaatatgctgggcgggacctgggtcagccgtctgaccaccattggtctggtactggtgcttattccggtggtcatgaccgcggtcgtcggctggcactggtttgatgtcgccacctatcaggcaaactggaacacctccagcaccactgatagccacgcggttattaaaagtatcctgctctgcctgtgggccttcgttggcgtagaatccgccgccgtgagtaccgggatggtgaaaaacccgaaacgtaccgtgccgctggcaaccatgctgggcaccgcgatggccggtatcgtctacatcgccgcgactcaggttatcgccggtatgtatcctgcttctcagatggccgcgtccggtgcgccgttcgcaattagcgcctctaccatcctcggcggctgggctgcaccgatggtatccgctttcaccgcctttgcctgcctgacttctctgggctcgtggatgatgctggttggccaggccggtgtgcgtgccgccaacgacggtaacttcccgaaagtgtatggcgaagttgataacaacggtattccgaaaaaaggcctgctgctggccgcagtgaaaatgaccgcgctgatggtgctgattaccctgatgaactccgccggtggtaaagcctctgacctgttcggcgaactgaccggtatcgcggtactgctgaccatgctgccttacttctactcctgtgttgacctgattcgtttcgaaggcatcaacatccgtaactttgttagcctgatttgttcggtactgggttgcgtgttctgcttcatcgcgctgatgggcgcaagctccttcgaactggccggcaccttcatcgttagcctgattatcctgatgttctacggtcgcaaaatgcaccagcgccagaacaacgcatcggataacaacaccaccgctaacgcgcactaa

SEQ ID NO: 134903 - DNA, 2148 bp, Enterobacter cloacae
atgaacgttattgcaatcatgaatcacatgggggtttacttcaaagaagaacccatccgtgaactgcatcgtgctctcgaacgcctggacttccgtattgtctacccgaacgaccgtgacgacttattaaaacttattgaaaacaactctcgtctgtgcggcgtgatcttcgactgggataaatacaatctcgaactgtgcgaagaaatcagcaaaatgaacgagtacatgccgctgtatgcgttcgctaacacctactccactctggacgttagcctgaacgatctgcgcatgcaggttcgcttcttcgaatatgcgctgggcgctgcggaagatatcgcgaacaaaatcaaacagaacactgacgaatacatcgacaccattctgccgccgctgaccaaagcgctgttcaaatatgtccgtgaaggtaaatataccttctgtaccccaggccacatgggcggtaccgcgttccagaaaagcccggtaggcagcatcttctacgatttctttggctccaacaccatgaaatccgatatctccatttcggtttctgaactgggttccctgctggaccacagcggcccgcacaaagaagcggaagagtatatcgctcgcgtgtttaacgcagaacgcagctacatggtgaccaacggtacttctaccgctaacaaaatcgtcggcatgtactccgcgccggccggcagcaccgtgctgattgaccgtaactgccacaaatcgctgactcacctgatgatgatgagcgacattacgccgatctacttccgtccgacccgtaacgcctacggtatcctcggcggtattccgcagagcgaattccagcacgcgactatcgccaagcgtgtgaaagagacgccgaatgcgacctggccggtacacgcggtgatcaccaactcgacttacgatggtctgctgtataacaccgacttcatcaagaaaaccctggatgtgaaatccatccactttgactccgcatgggtcccttacaccaacttctcgccgatctatgaaggcaaatgcgggatgagcggcggccgcgttgaagggaaagtgatttatgaaacccagtccacgcacaaactgctggcggcgttctcccaggcgtcgatgatccacgtgaaaggcgacgtaaacgaagagaccttcaacgaagcctacatgatgcacaccaccacctctccacactacgggatcgtggcctccaccgaaaccgcggcggcgatgatgaaggggaacgctggtaagcgtctgatcgatggctctattgaacgttccatcaagttccgtaaagagatcaaacgtctgaaaggcgagtctgacggctggttcttcgacgtctggcagccggagcatatcgatggtcctgaatgctggccgctgcgttccgacagcgcatggcacggtttcaaaaacatcgataacgaacacatgtacctcgacccgatcaaagtcacgctgctgactccggggatgaagaaagacggcaccatggatgacttcggtattccggcaagcatcgtggcgaaatatctcgatgaacacggcatcgtggtagagaaaaccggtccgtacaacctgctgttcctgttcagtatcggtatcgataagactaaagcgctgagcctgctgcgtgcgctgaccgacttcaaacgcgcgttcgacctgaacctgcgggtgaaaaacatgctgccgtcgctgtaccgtgaagatcctgaattctatgaaaacatgcgtattcaggacctcgcgcagaacattcacaaactgattgagcatcacaacctgccggatctgatgttccgcgcgtttgaagtgctgccatcgatggtgatgaccccgtatgccgcgttccagaaagagctgcacggtcagacggaagaagtgtatctcgaagagatggtcggccgcgtcaacgccaacatgatcctgccgtatcctccgggagtgccgctggtgatgccgggtgagatgatcaccgaagagagccgtccggtgctggagttcctgcagatgctgtgcgaaatcggcgcccactatccaggcttcgaaaccgatatccacggcgcctatcgtcaggcggatggtcgttacaccgttaaagtgctgaaagaagagaataacaagtaa

SEQ ID NO: 134904 - DNA, 1476 bp, Enterobacter cloacae
atgaaaacaccctcacagccgcgcgcgatttactacatcgttgcgatccagatctgggagtacttcagcttttacggcatgcgcgccttactcatcctttaccttacccaccagcttggcttcgacgacagccacgccatcagcctgttcagcgcttacgcatctctggtttacgttacccctattctcggcggctggcttgccgaccgcctgctcggcaaccgcacggcggtaattgccggggcgctgttgatgaccctcggccatgtggtgctgggcgttgagtcgacctccgcatggagtttgtacgtcgcgctggcgatcatcatctgcggctacggcctgtttaaatccaatatcagctgcctgctcggcgaactgtacgctcacgacgacccgcgtcgcgacggcggtttctcgctgctgtacgccgccggcaacgtcggctcgattgccgcgcccatcgcctgcggactggcggcgcagtggtacggctggcatatcggcttcgcccttgcggggatcggtatgtttatcggcctgatgattttcttaagcggcagccgccacttccggcatacccgcggcgtcgataaaccggcgctgcgggcggtgaagttcgtgctgccgacctggggctggctgctggtgatgctctgcctgtcgccggtatttttcacgctgctgctgcaaaacaactggtccggctatctgctggcgatcgtctgcctgttcgctgcccagatggtggcgcggatcatgatcaaagccccggagcatcgacgcgcgctgtggcagatcgtcctgctgatgctcgccggaacgctgttttgggtgctggcgcagcagggcgggagctcgattagcctgtttatcgaccacttcgtcaatcgtcgtctgctgaactgggacgtgccgaccgcgctgttccagtcagttaacgcgatagcggtgatggcggccggcgtggtgctggcgtggctgatgcgcccggaaggcagcgtgcgttctgtgctgcgcgtctggctgaaattttctttcggcctgctgctgatgggcggcggctttatgctgctggcgctcaatgcccgccatggcgcggctgacggtcaggcctcgatgggcatgatggtcgccgggctggcgatgatgggctttgccgaactgtttatcgacccggtggcgatggcgcaaatcacccgtctgaacatgcccggcgtcaccggcgtattgaccggcatttatatgctggccaccggcgcggtggccaactggctggcgggcgtggtcgcccagcaaaccaccgaatcgcaaatcagcgatacggcgattgccgcctatcagcatttcttcgcgcagatgggcgaatggaccctcggctgcgtggcggtgatggtcattatcgcctttgccgcggcctgtagcgttggcaaacgtcgtgcggctgccggtgaaattaccggcggcggcgcctga

SEQ ID NO: 134905 - DNA, 1128 bp, Enterobacter cloacae
atgtctgaacaacaagcacaaggtgccgatgaggccattgaccttaataatgaactgaaagctcgtcgcgaaaaactggctgcgctgcgtgagcagggcgtagctttccccaacgatttccgtcgcgatcatacctctgaccaattgcatgctgaattcgatgcgaaggacaacgatgaactcgcttccctgaacgttgaagttgcggtggctggtcggatgatgacccgtcgtgtgatgggcaaagcctccttcgtcaccctccaggacgtcggcggccgcattcagctgtacgtggcgcgcgatgacctgccggaaggcgtctacaacgaacagtttaagaaatgggacctcggcgatatcatcgccgcccgcggcaagctgttcaaaacgcaaaccggcgaactctcgatccactgcaccgagctgcgcctgctgaccaaagccctgcgcccgctgccggataaattccacggcctgcaggatcaggaagttcgctatcgccagcgctatctggatctgatagccaacgaagagtcgcgtcatacgttccgtatccgttcgcagatcctcgccaccatgcgccagttcatggtggcccgcggctttatggaagtcgaaacgccgatgatgcaggtgatccctggcggtgcgtccgcccgtccgttcattacccatcacaacgccctggatctcgatatgtacctgcgcatcgcgccggaactgtatctgaaacgtctggtggttggcggttttgaacgcgtgtttgaaatcaaccgtaacttccgcaacgaagggatctcggtacgccataacccagagttcaccatgatggaactgtatatggcgtatgcggactacaaagacctgatcgaactgaccgagtcgctgttccgcaccctggcgcagacggtgctgggcaaaaccgaagtgccgtatggcgaccaggtgtttgatttcggcaagccgtttgaaaaactgaccatgcgggaagcgatcaagaaacaccgtccggaaaccaacatggcggatctggatcttcgacgcggcgaaagcgctggcggaatctatcggtattcaggtagagaaaagctgggggctgggacgcatagttaccgaaatctttga

SEQ ID NO: 134906 - DNA, 168 bp, Enterobacter cloacae
atgataagtaatatcgattacatgaaactggcgatgtcatacgagaatgacaaaaccgaaatcgatcccgttctgcgtagtcgcgtatggggcgtagtgttggtagggttggcgatgttctggagcatcatcgcgctcaccatctgcaacatctggattgtcagctaa

SEQ ID NO: 134907 - DNA, 975 bp, Enterobacter cloacae
atgaaactacaacagcttcgctacatcgttgaggtggttaaccataacctgaatgtttcatccaccgccgaagggctctatacctcccagccgggtatcagtaagcaggtccgcatgctggaggatgagctgggcattcagatctttgcccgcagcggtaaacacttaacccaggtgacgccggccgggcaggagatcatccgcatcgcccgcgaagtgctgtcgaaagtcgatgccatcaaatctgtcgccggagagcatacctggcctgacaaagggtctctttacgtcgccaccacccatacccaggcgcgctatgcgttaccgggagtgatcaaggggtttattgaacgctacccgcgggtgtcgctgcatatgcatcagggctcgccgactcagatcgcggaggctgtgtcgaaaggcaatgccgatttcgccatcgccaccgaggcgctgcatctgtatgacgatctggtgatgctgccatgctatcactggaaccggtcgattgtagtgacccccgagcatcctctggccaccaagggctcggtgtccatagaggaactggcccagtatccattggtaacctatacctttggttttaccggccgctccgaactggataccgcgtttaaccgtgcgggcctgacgccgcgcattgtttttaccgccaccgatgccgacgtcatcaaaacctatgttcgcctggggctgggggtaggggtaatcgccagcatggcggtggatccggtctctgacccggatctggtgaagctggatgcgaacggtattttcagccacagcaccactaagataggtttccgccgtagcaccttcttacgaagctacatgtatgattttattcaacgttttgctccccatttgaccagggacgtggtagataccgcggtggctttacgctcgaatgaagatattgaagcgatgttcaaagatataaaacttccggaaaaataa

SEQ ID NO: 134908 - DNA, 2598 bp, Enterobacter cloacae
atgggtaaagctctcgttatcgttgagtccccggcaaaagccaaaacgatcaataagtatctgggtaatgactacgtggtgaaatccagcgtcggtcatatccgcgatttgccgaccagtggatcagcttccaaaaagagcgccgactctaccgccaccaaaggggctaaaaagcctaaaaaggacgaacgtagtgctctggttaaccgtatgggcgtggacccatggcatgactggaatgcgcactatgaagtacttccgggtaaagaaaaggtagtttcagaactcaaacagttggcggaaaaagctgaccacatctatctcgcaaccgaccttgaccgcgaaggggaagccattgcctggcacctgcgggaagtcatcggcggcgatgaacagcgttacagccgcgtggtgttcaatgagatcaccaaaaacgctattcgtcaggcctttgaaaagccgggcgaactgaatatcgatcgggttaacgcccagcaggcgcgtcgttttatggaccgcgtggtgggctatatggtttcgccgctgctgtggaaaaaaatcgcccgtggtctttctgccgggcgcgtgcagtccgtcgcggtccgcctggtggtggagcgtgaacgtgaaattaaagcgttcgtcccggaagagtactgggaagtcgacgccagcaccaccacgccgggcggtgacgccctgccgctgcaggtgacccataaggacgataagccgttccgtccggtcagccgcgatgagaccatggcggcggtatcgctgctggaaaaagccagctacagcgtactggagcgtgaagataagccgaccagcagcaagccgggcgcgccgttcatcacctccaccctgcagcaggcggccagcacccgtctgggcttcggtgtgaaaaagaccatgatgatggctcagcgactctatgaggcagggcacatcacctatatgcgtaccgactccaccaacctgagtcaggacgcgctgaacatggttcgcggctacatcagcgacaaatttggcaaaaaatatctgccggatagcgcgaaccagtacgccagcaaagaaaactcgcaggaagcgcacgaagcgattcgtccgtctgatgtgaacgtgctggcggaaacgctgaaagatatggaagcggatgcgcagaagctttatcagctgatctggcgccagtttgtcgcctgtcagatgacgccggcgcagtacgactccaccacgctgaccgtggctgcgggtgatttcaaactgaaagcgcgcggtcgcactttacgtttcgacggctggacaaaagtcatgccggcgctgcgcaagggcgaagaagaccggacgctgccgctggtcaaacagggcgaccgcctgagcctggtggagctgacgcctgcgcagcactttaccaagccgccggcgcgtttcagcgaggcctcgctggtgaaagagctggaaaaacgcgggattggccgtccgtcgacctacgcgtcgatcatttcgaccattcaggatcgcggctacgtgcgggtggaaaatcgtcgtttttacgccgaaaaaatgggcgagatcgttaccgaccggctggaagaaaacttccgcgatctgatgaactacgattttaccgcgcagatggaggatcgcctcgaccaggttgcgaaccaccaggccgagtggaaagaggtgctgaaccacttcttcggcgattttaccacccagctggcgacggcagagaaagatccggaagagggcggcatgcagccgaacccgatggtgcttaccagcatcgactgcccgacctgcggccgtaaaatggggatccgtaccgccagcaccggcgttttcctcggctgttcgggctatgccttgccgccgaaagagcggtgcaaaaccaccatcaacctggtgccggagaacgaagtcctcaacgtgctggaaggcgatgacgcggaaaccaacgcgctgcgcgccaaacgtcgctgccagaagtgtgggacggcgatggacagctaccttatcgatcctaagcgtaagctgcatgtctgtggtaataacccgacctgcgacggctacgagattgaagagggcgaattccgcatcaagggctatgacggcccggtggtggagtgcgagaagtgcgggtctgaaatgcacctgaaaatggggcgtttcggtaaatacatggcctgtaccaacgacgagtgtaagaacacgcgtaagatcctgcgcaatggcgaagtggctccgccgaaggaagatccggtgccgctgccggagctgccgtgtgagaagtctgacgcctactttgtgctgcgcgacggggcggcgggcgtcttcctggcggccaacaccttcccgaaatcacgggaaacgcgtgcgccgctggtggaggagctttaccgcttccgcgatcgtctgccggaaaaactgcgttatctcgccgatgcgccgcagcaggatccggaaggcaataaaacgctggtacgctttagccgtaaaaccaagcagcagtacgtggcgtccgaaaaagagggcaaagcgaccggctggtcagctttctttatcgacggtaagtggacggaagccaaaaagtaa

SEQ ID NO: 134909 - DNA, 252 bp, Enterobacter cloacae
atgcaaggtacaacccaaccaatcgatcgccagacgctgctcgaaaaagccaacaaacttattcgcgaacatgaggatacgttagccggtatcgaagccaccgacgtcgttcagcgcaacaatgtcctggtgtttagcggtgagttttaccttgatgagcagggactaccgacgccgaagagtacagcggtatttaacatgtttaagtatcttgctcacgagctgtcggacaagtaccacctggtcgattaa

SEQ ID NO: 134910 - DNA, 1083 bp, Enterobacter cloacae
gtgcagcaacgtcagtgctttacacaaggtgaaaacgtggaattacttgctcagtacggcttatttttagccaagatcgcgacggttgtcgtcgccatcgcggtgattgccgctattatcgtcaacctcgctcagcgcaagaagcagcgcggcgagctgcgggtgaccaatcttagcgagcattataaagagatgaaggaatcgctggcggtggcgctgctggacggcccgcagcagaagcagtggcataaggctcagaagaaaaagcaaaaacaagaggcgaaggcggccaaagcgcgggcgaagctgggcaatgccgagccggaaggcaagccgcgcgcctgggtgctggatttcaaaggcagtatggatgcccatgaggtcaatagcctgcgggaagagatcaccgcggtactggcggcggcgaaagcgcgcgatcaggtggtgattcgcctggaaagccccggcggggtggtgcacggctacggtctggccgcctctcagctgcagcgcttgcgcgacaagcagatcccgctgacggtggcggtcgacaaagtggcggccagcggcggctatatgatggcctgcgtggcgaacaaaattgtctcggcgccgtttgcgatcctcggctctattggcgtggtggcgcagatcccgaacctgcaccgcttcctgaagaataaagatatcgatatcgaactgcacaccgccgggcagtacaaacgaacgctcaccatgctgggcgaaaataccgaggaagggcggcgcaagttccgcgaggatctcaatgagacacatcatttgttcaaggatttcgtccaccggatgcgtccgggacttgatattgagcaggtagctaccggcgaacactggtacggggtgcaggcgctggaaaaaggtctggtggatgcggttgaaaccagcgatgagctgctgctggggctgatggagagccacgaggtgatcggggtgcgttatcaacagcgtaagaagatgctcgaccgcttcaccggtagcgcggcggagagcgccgatcggcttctgctgcgctggtggcagcgcggtcagaaaccgctgatgtaa

SEQ ID NO: 134911 - DNA, 801 bp, Enterobacter cloacae
atgaagcgcgatcgggaaccgatcgcccaaggagttgccgtgcattatcaaccacaacgtcacttgctgaaagatcgcatcatcctggtcaccggggccagcgacgggattggtcgtgaagcggccctgacctacgcgcgctatagcgccagcgttatcctgctgggtcgcaacgacgacaaactgcgcaccgtcgcccaggagattgagcgtgagggtggtattccccctcgctggtttaccctcgacctgctcacctgtacgccccaggcgtgccagcagctggcgcagcagatcagcatgcactatccccgccttgacggcgtgctgcataacgccggcctgctcggcgacatctgcccaatggaagagcagaagccggaggtctggcagcaggtgatgcaggtgaacgttaatggcacctttatgctgacccaggcgcttcttcctttattactccgttcggaatcgggctcgctggtcttcacctcatccagcgtcggtcgtcagggccgcgccaactggggcgcctatgccgtttccaaattcgccaccgaagggatgatgcaggtgctggccgacgagtatcaaagccgccacctgcgggtaaactgtatcaaccccggcggcactcgcaccggaatgcgcgccagcgcgttcccgacggaagatccgctgaaactgaaaacccccgctgacattatgcccgtctatctgtggctgatgggtgacgacagtcgtcgcaagacgggaatgaccttcgacgcccaaccgggacgtaaaccaggaattgcccaatga

SEQ ID NO: 134912 - DNA, 591 bp, Enterobacter cloacae
atgagtgatgaacgctaccgcgaacgccagcagcggctgaaagataaagttgacgcccgggtggcggcggcccaggacgagcgcggcattgtgatggtctttaccggcaacggcaaaggcaaaaccaccgccgcctttggcaccgcgacccgcgccgtcggccatggcaaaaaagtcggcgtgatccagtttatcaaggggacctggcctaacggcgagcgtaatctgctggagcctcacggcgtcgaatttcaggtgatggccaccggcttcacctggaacacccaggatcgcgacagcgacaccgccgcctgcctggcggtctgggagcatgcccgccgtatgctcgctgacgaccagctcgatctggtgctgctggacgagctgacctacatggtggcgtatgattacctgccgctggagtcggtgctgagcgccctgcgtgagcgccctgcccatcagtcggtgatcatcaccggccgcggctgtcatcgcgatattattgaactggccgataccgtcagcgaactgcgtccggtcaagcatgcatttgatgccgggattaaagcgcagatggggattgactactga

SEQ ID NO: 134913 - DNA, 903 bp, Enterobacter cloacae
atgagcgagaaactgcaaaaagtgctggcccgcgccggccacggctcccgccgtgaaattgaagcgaaaatcgaagctggccgcgtcagcgtcgacggcaaaatcgccaccctcggcgatcgtgtggaaattgtccctggtttaaaaattcgtatcgatggtcatctgatctcggtgaaagagtctgccgagcagatctgccgcgtgctggcttactataagccggaaggcgagctgtgcacccgtaacgatccggaaggacgcccgacggtgtttgatcgtctgcctaaactgcgcggcgcgcgctggattgccgttggtcgtctggacgtgaatacctgcggcctgctgctgttcaccaccgatggcgaactggccaaccgcctgatgcacccgagccgtgaagtcgagcgtgagtacgccgttcgcgttttcggccaggtggatgatgataagctgcgccagctgtcgcgcggcgtacagttagaagatggtccggcagcgtttaaaaccatcaaattcaccggcggcgaagggattaaccagtggtataacgttaccctgaccgaagggcgtaaccgcgaagtgcgtcgcctgtgggaagcggtcggcgtgcaggtcagccgtctgatccgcgtgcgctacggcgatattctgctgccgaaaggcctgccgcgcggcggctataccgagctggacctggcgcagaccaactacctgcgcgagctggtggagctcacgcctgaaaccagctctaaggttgccgtcgagaaagaccgtcggcggttgaaagccaatcagatccgtcgggcggtgaagcgtcacagccagaccagcgctaatccgcgccagggtaacaacagcaaccgtcgttccagtactcgcaataagactaacggttaa

SEQ ID NO: 134914 - DNA, 897 bp, Enterobacter cloacae
atgaaactcccgccgctgaatgcgttgcgctgctttgaggcggcggcgcggctgctcagcctgaagctggccgccagtgagctttgcgtcacgcccagcgccgtcagccagcagattgcccgccttgaggagacgctgaatgtcccgctatttatccgtactccgcgacggttacagttaacggcggtgggagagatctacctgcgggccgttcagccggcgtttcatcagatagccgccgccacccagcgtctgcaggtgcccccgggaccagaaaaggtggctatcagctgtaccagcggcttcgccattcagtggctgctgccgcggctggctgattttgaacgacgctatccgcagatagagatccagatcggcaccaccaaccggctagtggatttgctgagtgaagggatcgattttgccgtgcgtcatggtgtcggcggctggccggaactgcaggcttaccgcctgctggatgacgacctgatgccggtctgtagcccgcaactgattgctccgcgccggacgctcaccgatgcgagcgatctactgcagtatccgctgctgcacgatgaacatcgtgaagactgggcgctgtggtgtgaggccgtggggctggcgccgcacttcgcgcggcgtgggccggtgttcactgattccaacggcgtgacggaggcggcgttcgccggtatggggatggcgttgctgcgacgctcattcatagcgcctgcgctgacgcaggggcggctggttaatcctctggcgcagcccatcgcctgtccgctggcctatcatctggtttaccacgagaccgcgctgctggcgcctgccaaccgctgttttcgcgactggctgcttggccagcgcccggccgttgctgaggagcgcgcgtag

SEQ ID NO: 134915 - DNA, 909 bp, Enterobacter cloacae
atgcgtgttatcgactatggccgcctgctgctgctcgccgccctctggggcgccagctttttgtttatgcgcatcaccaccccggccttcggggcgttgaacagcgcttttcttcgcgtactgttcgccgctatcgcgctcgggctgttactcggcgtgcagggtaaatggagcgggtatcagggaaaattcacatccactctgcagttgggggtcattaattcaggccttccttttctcatgtactgccttgccgcgcaatggctgccggcagggtactccgccacgcttaacgccacggcgccgatgatgggggtgctgatcggcgcgttatgctttgcagaaccgttaaccctgcgcaaaggcggcggcgcgatactgggcgccattggcgtggcggtgatcgcgcgcccgacgtctggccttagcgccgccctgctgctgccggggattggcgcctgcctgaccgcgaccgcctgttacggtctggccggctttctgacccgccgctggatccagcagcgaggcggcctcgaggctgaacgcgtcgcgctgggtagccaggtcggcgccacgctgtttctgtttcctttctttctctggtcctgctggcatgggcctgccgtagactggcggcagagtgtgccgtggatagcgatagtcatgctgggcgtggtctgcacggcggcagggtatattctctacttccgcttgattgcagatatagggccgctgcgttcgctgtcggtgacctttttgatcccaccttttgcggcgctgtggggctatctctgcctcggagagacagtggagaaaggattgattctcggcgcgctgctggtttgtgtagcgctatggatgattatcgtgccgtcggggcgaaaacgcggggtaccggacggcgcatga

SEQ ID NO: 134916 - DNA, 621 bp, Enterobacter cloacae
atgagccagtttttttatatccatccggataacccgcaggcgcggttgattaaccaggcggtggagattgtgcgtaagggcggggtgatcgtttatcctaccgactccggctacgcgctgggctgcaaaattgaagacaagggggcgatggagcggatctgccgcattcgtcagctgccggacggccacaactttaccctgatgtgccgcgatctgtccgagctgtcaacctacgcttttgtggataatgtggcgtttcgcctgatgaaaaacaacacgccgggcaactatacctttatccttaaggggaccaaagaggtgccgcgtcggctgttgcaagagaagcgtaaaaccatcggcatgcgcgtcccgtctaaccccatcgctcaggcgttgctcgagaccttaggcgagccgatgctctccacgtcgctgatgctgcccggcagcgactttaccgaatccgacccggaagagatcaaagatcgtctggagaaagtggtggacctcatcattcacggcggtttccttgggcagcagccgaccacggttatcgatctcactgaagacaccccggtggtgctgcgcgaaggcgtcggcgacgtgaggccgtttctctaa

SEQ ID NO: 134917 - DNA, 843 bp, Enterobacter cloacae
gtgatttacgatctgcacagccataccaccgcctctgacgggcggctgactccgcaggaactggtccatcgcgcccatgagatgcgcgtcggcaccctggcgatcaccgaccatgacagcgtggcggcgatcccggcggcccgggaggagatcgcccgcgccggattacccttgaccctggtgaacggcgtcgagatttccaccctctgggagaatcacgagattcatattgtgggtctgaatattgatattgcgcacccaacgatgaccgccctgctggaggagcagaaagcgcggcgccagcagcgcggtcagatgattgccgagcgcctggagaaggcgcggatccccggcgcctgggaaggggcgctgcgactggcggacggtggcgccgtcacccgcggccattttgcccgttttctggtggaggccggccatgcgaaaaacatggcggaagtcttcaaaaaataccttgcccgcgggaaaaccggttacgtgccgccgcagtggtgtacaataaaacaagcgattgatgtgattcatcattctggcggcaaggcggtgattgcccatcccgggcgctacgatctctccgccaagtggttgaagcggctgttggcccactttagcgagcagggcggtgatgccatggaagtggcccagtgtcagcaggcgccccatgaacgcgcccagctggccaccctggccgtgcagtttggtcttctggcgtcgcagggatccgattttcatcagccctgcgcgtggatcgaacttggccgtaagctctggcttcctgccggcgtggaaggcgtctggcacagttgggaagcggccgccgaataa

SEQ ID NO: 134918 - DNA, 1563 bp, Enterobacter cloacae
atgcaaacatccaaaccggcactcgagcttctcaccagcgacgccatctaccgggagaacccgacggcgttattccaccaactgtgcggcgcccgtccggcgacgctgctgctggaatccgctgacatcgacagcaaagatgacttaaaaagcctgctgctggtcgatagcgcgctgcgcattacggcccttggtgacactgtcactattcaggccctctccgccaacggcgcggcgctgctggaactactggacggcgcgctgccctccgggatcaacaatcagcgccagcccaacggccgcatcctgaccttcccggccgtcagcgccctgctcgatgaagacgcccgtctctgctcactgtcggtgtttgacgccttccgtctcctgcaggagctggtgagcgttccggacaacgagcgcgaagcgatgttcttcggcggcctgttcgcctatgacctggtggccggttttgaagatcttccccagttgcaaagcgacaccgcctgcccggactactgcttctatctggcggaaaccctgctggtcatcgaccatcagaccaagcatacccgcattcaggccagcctgttcaccccgctggagagtgaaaaacagcgcctggagcagcgcctgagccagctgcgtcagcagctgaacgagccgccggcgccgctaccggttaccaccgtggccgaaatgcgctgcgacgttgaccagagcgatgaagagtacggcgcggtggtgcgcaaaatgcagcgcgccatccgcgccggggaaatcttccaggtggttccttcccgccgcttctctctgccctgcccatcgccgctggccgcttatgatgtgctgaagaagagcaaccccagcccgtacatgttctttatgcaggacaatgatttcaccctgttcggcgcctcgccggaaagctcgctgaagtatgatgccgtcagccgtcagattgagatctaccccatcgccggcacccggccacgcggccgccgcgccgacggctcgctggatcgcgacctcgacagccgcatcgagctggaaatgcgcaccgatcataaagagctttccgaacacctgatgctggtggacctggcgcgtaatgacctggcgcgcatctgcaccccgggcagccgctatgtcgctgatttaaccaaggttgaccgctactccttcgtgatgcatctggtctcccgtgtagtaggcgaattgcgtcaggatctcgacgtcctccacgcctatcgcgcctgcatgaatatgggcaccctcagcggcgcgccgaaggtccgcgccatgcagctgattgccgccgccgaaggtaaacgccgcggcagctacggcggcgcggtaggctatttcaccgcccacggcgacctcgacacctgcatcgtcatccgttccgcctacgtgcaggaaggtatcgctaccgtccaggccggagccggcattgtgctcgactcggttccccagtcggaagcggatgagacccgaaataaagcccgcgcggtgctgcgcgccattgcccaggcccatcacgcgaaggagattttctga

SEQ ID NO: 134919 - DNA, 279 bp, Enterobacter cloacae
  misc_feature (254)..(263): n is a, c, g, or t
atggctgacattctgctgctcgataatatcgattcctttacctataacctggcagaccagctgcgcgccaacggccataacgtagtgatttatcgcaactccgttccggcgcaggcgctgattgagcgtctgggcaccatggacaacccggtgctgatgctctccccgggcccgggtacgccaagcgaagccggctgcatgccggagctactgacccgtatgcgcggcaagctgccgatcatcggcatctgccnnnnnnnnnnattcccgccgggctga

SEQ ID NO: 134920 - DNA, 1140 bp, Enterobacter cloacae
atggtgatggcggtgcgtcacgatgcggatcgggtgtgcggcttccagttccacccggaatcgatcctcaccacccagggcgcgcgactgctggagcagaccctggcctgggcgctgcagaagctggagcataccaacaccctccagccgatccttgagaagctgtaccaggcggaaaccctgagtcagcaggagagccaccagctgttctccgccgtcgtgcgcggcgaagtgaagcctgagcaactggccgccgcgctggtcagcatgaaagtgcgcggtgagcagccgcaggaaattgccggcgccgctaccgcgctgctggaaaacgccgcgccgttcccgcgcccggactacctgtttgccgacatcgttggcaccggtggcgacggcagcaacagcatcaatatctccaccgccagcgcctttgtcgctgcggcctgcgggttaaaagtggcgaaacacggcaaccgcagcgtctccagtaaatcaggctcttctgacctgctggcggccttcggcattaatctcgatatgaacgccgataaatcccgcgccgcgcttgatgagctgggcgtctgcttcctgttcgcgccgaagtaccacactggtttccgccacgcgatgccggtccgtcagcagctgaagacccgcaccctgttcaacgtgctggggccgctgatcaacccggcgcatccgccgctggcgctgattggcgtctacagcccggaactggtgctgccgatcgccgagaccctgcgcgtgctgggttatcagcgcgcggcggtggtgcacagcggtgggatggatgaagtctcgctgcatgcgcctacggtggtggccgaactgcataacggggaaattaaaagctatcagctgaccgccgacgacttcggcctgacgccttaccatcaggcgcagctggcgggcggcaccccggaagaaaaccgtgacattctgacgcgcttgctacaaggtaaaggtgaagccgctcacgaagccgccgtcgccgccaacgtcgccatgttgatgcgtttacacgggcatgaagatctgaaagctaacgctcagcaggtactggatgtgctgcacagcggcgcggcctatgacagagtgaccgccttagcggcaagagggtaa

SEQ ID NO: 134921 - DNA, 1359 bp, Enterobacter cloacae
atgcaaaccgttttagcaaaaatcgttgccgacaaagcgatttgggtggaagcccgcaaacaacaacaaccgttagccagttttcagaatgagatcgtcccgacgcagcgcaatttctatgacgcgctggccggcacccgcaccgcgtttattctcgagtgcaagaaggcctcaccgtcgaaggggttgattcgcgaagatttcgatccggcagcgatcgccagcatctacaagcactacgcctcggcgatctcggtgctgtgtgatgagaaatatttccagggcagcttcgatttcctgccgatcgtcagccaggtcgcgccgcagccgatcctgtgtaaggacttcaccatcgacccttaccagatctacctggcgcgctactatcaggccgacgcctgcctgctgatgctctcggtgctcgacgatgaacagtatcgtcagctctcggcggtggctcacagcctgaatatgggcgtgctgaccgaagtcagcaatgaagaggaactggagcgcgccatcgccctgaaggcgaaggtggtgggcattaacaaccgcgacctgcgcgatatgtcgattgaccttaatcgcacccgtcagctggcggcgcgtctcggcccggatgtcacggtgatcagcgaatccggcatccatacctatgccgaagtgcgcgagctgagccacttcgccaacggcttcctgatcggctccgccctgatggagcaggcggatctggaagcggcggttaaacgcgtgctgctcggcgagaacaaagtgtgcggcctgacgcgcccgcaggatgcccaggtggcctgggagtccggcgccatctacggtgggctgatcttcgtcccgacctcgccgcgggcggtaaatgacgcccaggccaaagcggtgatcgccgctgcgccgctgcagtacgtcggcgtcttccgcaatgcgccgctggaggaggtggtcgcccgcgcgcaggctctggggctggccgccgtgcagctgcacggtgatgaagaccaggcctatatcgacgcgctgcgcgacgccctcgcggacaacgtccgcatctggaaagcgctgagcgtcggcgaaaccttcccggcccgtacgctccgccatgtcgacaagtacctgctcgacaacggccagggcggcagcggccagcgctttgactggagcctgctgcagggccaggatctgcgcaacgtcatgctggcgggcggcctcggcgccgataactgtgtggaagcggccaaaagcggctgtgccggactcgatttcaattcaggcgtagagtcgcaacccgggataaaagacgccagcaagctggcctccgtattccagacgctgcgcgcatattaa

SEQ ID NO: 134922 - DNA, 1194 bp, Enterobacter cloacae
atgagcactttactgaacccctacttcggcgaattcggcggcatgtatgtgccgcagatcctgatgcccgccctgcgccagctggaagaagcctttgtcagcgcgcagaaggacccggcctttcaggcggaattcaccgacctgctgaaaaactacgccggtcgtccgacggccctgaccaaatgccggaatctgaccgaaggcacccgcaccaccctgtacctgaaacgcgaagatctgctgcacggcggcgcgcacaaaaccaaccaggtgctgggccaggctctgctggccaaacggatgggcaaaaccgaaattatcgccgagaccggcgccggccagcacggcgtcgcctcagcgctggccagcgccctgctcggcctgaaatgccgtatctacatgggggccaaggacgtcgagcgccagtcgccgaacgtcttccgtatgcgcctgatgggcgccgaggtgatcccggtgcacagcggctccgccacgctgaaagatgcctgtaacgaggcgctgcgcgactggtccggcagctacgaaaaggcgcactatatgctgggcaccgccgccggtccgcacccgttcccgacgattgtgcgtgaattccagcgcatgattggcgaagagaccaaagcgcagatccttgaaaaagagggccgcctgccggacgcggtgatcgcctgcgtcggcggcggatcaaacgccatcggcatgttcgctgattttatcgaggaaaccaacgtcggcctgatcggcgtggagcccgccggacacggtatcgagagcggcgagcacggcgcgccgctgaagcatggtcgcgttgggatctacttcggtatgaagtcgccgatgatgcagaccgccgacggccagatcgaagagtcttactccatttccgccgggctggacttcccgtccgttgggccgcagcacgcgtttctgaacagcaccggtcgcgctgactatgtgtcgatcaccgacgacgaagcgctggacgcgtttaaagcgctttcccgccacgaagggattatcccggcgctggagtcctctcacgctctggcccacgcgctgaagatgatgcgcgagaacccggaaaaagagcagctgctggtggttaatctctccggccgcggcgacaaagacattttcaccgtacatgacatcctgaaagcgcgaggggaaatctga

SEQ ID NO: 134923 - DNA, 810 bp, Enterobacter cloacae
atggaacgctatgagacgctgtttgcccaactgaaaaatcgccaggaaggcgccttcgtcccctttgtcacccttggcgatccgggaccggagcagtcgctgaaaattatcgatgcgctgatcgaaggcggcgccgatgcccttgaactggggatccctttctccgacccgctggcggacggcccgaccatccagggcgcggccctgcgcgccttcgccgcgggagtgaccccggcgcagtgctttgagatgctggcggcgatccgccagaagcatccgaccatcccaatcggcctgctgatgtatgccaacctcgtcttcagcccgggcatcgatgcgttctatgcccagtgcgcccgcgtcggcgtcgactcggtgctggtggccgacgtgccggtggaagagtccgccccgttccgccaggcggcgatgcgccataacatcgcgccgattttcatctgcccgcccaatgcggatgacgacttactgcgccagattgcctcttatggccgcggctacacctatctgctgtcgcgcgccggagtgacgggtgcggaaaatcgcgccgcgctgccgctgcaccacctggtggagaagctggcggaatatcacgccgcgccgccgctgcagggctttggtatctccgcgccggagcaggtgagcgccgccattgacgccggagccgccggggctatctccggttccgccatcgtcaaaatcatcgaacgccacctcgatgagccgcagaccatgctcgacgagctgaaagccttcgtccagagcctgaaagcagcgaccaaaaccgcctga

SEQ ID NO: 134924 - DNA, 483 bp, Enterobacter cloacae
atgcaagatgcacataatgactacgacattaccgactttcacggcgcgctgctggatatcatcagcgtaatgaaccagccgctgcgcgatgagcagatcctgcaggcagccggcgtccagctggaacagatgctgtttccgctgcttgtggcggtagggcgccatggcccggtgggggtggttgagctggcggatcatttagggcgcgattacaccaccgtcagccgccaggtgaaaaaactggaagcccagggactcgcctgtaagcaaccgaaccgtcatgatcgacggatcagcgaagtgacgcttagcgccagcggacaacagatgatcgacagtattgcggtagcgcggcggcggttaatgaatcaggtgctggcgcagtggccggaagatgaagtgcaggcgctgtttcgcttaacgcgcaaatacgccgacagtttgcagaaaacatcgccgcctggcgcgatgccaggcggctga

SEQ ID NO: 134925 - DNA, 897 bp, Enterobacter cloacae
atgaaagcagccgtggtttttgatctcgcagaaggcccggtttgggccgattttatcgacccgcagcccgcgcccggccagacgctcattgacgtccgcgccgccgcgataagccatgtggttaaggcccgggcatccggacgccattacagcttcgacggcaatctgccctttgtgcccggtatcgatggcgtcggcaccacacctcagggccagcgcgtctacttcgccttccccaccgcccccttcggcagtatggcgcagcgggcgccggtcgccctgcagaattgtctgccgctgccggatgcgctcgatgatgttagcgccgcggcgatggccaaccccggtatgtccgcgtgggcatcgctggtgacacgcgcccagcttcaggccggcgaaacggtgctgattaacggcgccaccggcagcgccggtcagttggcggtgcagattgcccgctatctgggggcgaaaaaaatcattgcaaccgggcgcaatgcgcagtcgctcgcggcgctggacgccgatgagtgtattcagttaaccgctgatgataaaaccttgagcgggcaattttcagcggtcagcgccgcgcagatcgatgtggtcatcgattacctgtggggacacagcgcggaattattattgccggcactggcgaaatatacccctgccggcagtccggtgcgctatgtgcaggtgggttccctggctggcgccgatatcgcgttaaatggcgcagtgctgcgttccgccccgctcctgctgatgggcagcgggatcggtagcctgtcggtatcgcaactgctggcggcgaccggtgaaatgctgcaggcggcggtgccggggaaattgaccatcgccaccacgaagcgcacggttttcaccctcggataa

SEQ ID NO: 134926 - DNA, 201 bp, Enterobacter cloacae
atgaacgatcccgattttaatttgctggcggccctcgatccgctgccggtcagtaccgaggtgattacggtttcgcaggcgtggcatccgcgtctggagcaggccccggccaccgctggctgcggcagcgggtgcgtgaggtgtgtcgcgagtaaaaaaaagcccgcacaagtgcgggcaaaaatactggaagcaatgtga

SEQ ID NO: 134927 - DNA, 708 bp, Enterobacter cloacae
atgaaatccgatcagcacaacactatcctcatcgtcggcgcctcgcgcggccttggccatgctatggcggcgacgttcctgcagcacggctgggaggtcatcggcaccgtgcgcgatttatcatcccacacgccgctccacgacctggccaagacgcatcccctgcggctacgcctggcgacgctcgacatccgcgatgaagcccagctggccgctctgcaggcgacgcttcccccggcaagcctcgatatgctgtttgtcaacgccggtaccaccaatcgtgacccatcgcagatcattggcgacgtctccaccgaggagttttaccaggtgatgctcaccaatgccctggcgccgatgcgggttatcgagcgcctgcagcaggcagttaaaccgcaggggctgctcggcgtgatgtcctctggccaggggagcctgaccaataaccttaccggccagcgggaactctaccgcgggagtaaagctgcgctgaatatgtttatgcgcagctttgccgctcgcccctcctcggcctcccatccgctggtggtgatggccccgggatggatccgcaccgagctcggcggggcagatgccccgctgaccatcgaagagacgatcccacgcctggtgaacgtcctgctcgacaaacggcaacgtccgggactggagtatctcgattaccagggccgtaccgtgccctggtga

SEQ ID NO: 134928 - DNA, 2286 bp, Enterobacter cloacae
atggaaaaaaacgcttctctgcctttcggcagtttcaactcattggcattgtttacaggtctgtgtctgggagcctcgccggcagcaggcatcgcagcggaaaattcggtcaaaaatagtgaagagacgctggtagtggaagccgctccgccttcactctactcccccggcgcttccgccgatcccaagttcaataaaccgctggtcgataccacccgcaccatcaccgtgatcccggaacaggtgattaaagatcagggcgtcaccaacctgactgacgccctcaaaaacgttcccggcgtgggggcgttttatgccggggagaatggcagctcaaccaccggggatgccatctttatgcgcggcgtggatacctctaacagcatctatgtggacggcattcgcgacatcggcagcgtgacgcgcgataccttcaatacccagcaggtggaagtcatcaaagggcccgccggcacggactatggccgcagcgcgccctccggctcgatcaatatgatcagcaagcagccgcgccttgactccgggatcgacggctcggccagcatcggcagcgcctggtcgcgccggggcactctcgacctgaaccaggcgtttagcgacaacgctgcgttccgtctgaacctgatgggggaaaaaacccatgacgctggtcgggaccgcattgaaaacgagcgctatggcatcgcaccgtcgctggccttcggccttgataccccaactcgtctgtatctgaactatctgcacgtccggcagaacaacaccccggatggcgggatccctaccgtcggcctgccgggctattcggcgccttcgccgaagtatgccgcactcaactccgccgggaaggtcgataccagcaatttctatggcaccgactccgattacgataaatctactaccgacagcggtaccctgcgcttcgaacacgatctgacggagaataccaccgtgcgcaataccacccgctggtcgcgagtgaaacaggagtatcttttgaccgcggtgatgggcggcgcgaacaatatcaccgcccccgatatcaatgacgtcaacacctggagctggtcgcgtctggttaataccaaagatgtcagcaaccgcattctgaccaaccagaccaatatcacctcgactttcaatactggctcgataggccatgacgtcagcgccggcgtggagtttacccgggaaaaccagaccaactatggcgttaacgccaggaccgcgccggcggtgaatctctaccatccggtgagcaacctgtcgattggcgggctggacagaaacggggcgaacgccaacggccagaccgataccttcgggatttatgccttcgatacgctgacgctgaccgagcggattgagatcaacggcgggctgcgtctcgacaattaccataccaaatatgacagcgccaccgcctgcggcggcagcggacgcggggctatcgcctgcccgcccggacagtcgaccggcagcccggtcaccactgtcgataccgctaaatccggcaatctggttaactggaaagccggggcgctgtaccgcttaaccgagcagggcaatgtctacgtcaactacgccatctcacagcagccgccgggaggcagcagcttcgccctggccgccagcggcagcggcaacagcgctaaccgaaccgactttaagccgcagaaggcaaaatccagcgagctgggcaccaagtggcaaatcttcgacaatcgtctgctgctcagcgcggcattattccgcaccgatattgaaaacgaagtggccgccaacgatgacggaacctggtcgcagtacggcaaaaagcgcgtggaggggtatgaactctccgcgaccggaaacctgaccccggactggacgattatcgccggctacactcagcagcatgcgacagtgacggagggacagaacgttgcacaggatggatcttccgccctggcctacaccccgaaacatgcctttacgctgtggacgcagtatcaggccaccagcgatctgtccgtcggcggcggtgtgcgctatgtcggaagcctgcgccggggcagcgatggtgcagttggtaccccggatcacaccgagggctactgggttgccgacgccaaactgggctatcgggtcaacagcaacctcgatctgcagctcaatatgtataacctgtttgataccgattacgtggcctccatcaacaagagcggctatcgctatcatccgggcgaaccccggacctttatgctgacggcgaacgtccatttctga

SEQ ID NO: 134929 - DNA, 678 bp, Enterobacter cloacae
atgatgtatcacattcctgacgtgctatcgacagaccaggtggcggaatttacccggcagctggcgcaggccgagtgggtcgacgggcgggttacggtgggtagccagggggcggccgtcaaacagaaccagcagatcgatacccgaacgccgctgtatgcccgcctgcaggccgctgtgctcgatatgctgcgcggccatccgcagtttttttccgccgcgctgccgcggacgatttccgcgccgttgtttaaccgctatgggccaggggagacctatggttttcacgtcgatggcgccgttcgccagaacggcgaggcgggctggatgcgcactgatctgtcagcgacgctgttcctttgcgatccggagagctatgagggtggcgaactggtgattgaagacacctatggccaacatcgggtgaagctcccggccgggcatctggtgctctatcccgccagcagcctgcactgcgtcaccccggtcacccgcggcgtacgccaggcctctttcctgtggatccagtcgatggtccgcgacgataagcagcgtgcgatgctttacgacctggaccgcaccatccagtctctgaaggcccgctttggcgacggagaagaggtcctctccctgctcaacatgtatcacaacctgctgcgccagtggacggaagtgtga

SEQ ID NO: 134930 - DNA, 639 bp, Enterobacter cloacae
atgaagaagttagcagcggcggcattgattcttggcacgctttctaccggcagcgtctgggcgcatgaagcgggtgagtttttcattcgtgccgggaccgccaccgtccgaccgacggagggctctgacaatgtgttaggcagccttggcagtttcaacgtcagtaacaatacccagctgggtttaacctttacctatatggcgaccgataacattggcgtggagttgcttgccgcgacgccgttccgccataaggtcggcaccgggccaaccgggactatcgccaccgtccatcagctgccgcccaccctgatggcgcagtggtactttggcgatgcgcaaagcaaggtgcgcccgtacgtgggggccggtatcaactacaccaccttctttaatgaagactttaacgataccggcaaggcggccgggctttccgatctgagcctgaaggactcctggggcgcggcggggcaggtcggcctagattatctgattaaccgcgactggctgctgaatatgtcggtgtggtacatggatatcgataccgatgtgaaattcaaagccggcggcgtggaccagaaagtcagcacccgtctggatccgtgggtgtttatgttctccgcaggctatcggttctaa

SEQ ID NO: 134931 - DNA, 414 bp, Enterobacter cloacae
atgagtgaaatcaacccgtgcatgacgtgcggtgcctgttgtgcgtattttcgagtctctttctactgggcggaagccgacgacgcgggcggcctggtgccctccgcgctgaccgaaccgctgacccctttcctgcgctgcatgagcggcaccaatcagcgccagaaccgctgcgcggccctgtctggcgatatcggcgacgccgttcactgcactatttatgaaaaccggccttcgccgtgtcgcgaattcgccatgtccggggaaaatggcgaggaaaacgatgcctgcaaccgggcgcgggcgcgctacggcctgccaccattgcggcctctttacaaagatatacctgccctgaccggcgcagagagtgctacgacggaacgatttgcggtacaatcgccggctagttaa

SEQ ID NO: 134932 - DNA, 744 bp, Enterobacter cloacae
atgtctatcacggcgaagtccgtctaccgtgacaccgggaatttttttcgtaatcagttcattactattttactgattgcgctgttgtgcgcgtttattacggtagtacttggccatgccttttcacccagcgacgagcagctgtcgatactcagcgaaggcgataacctcgccggtagcgccgggctgttcgagctggtgcagaacatgacgccggagcagcagcaggttctgctgcgcgcctcggcggcatcaaccttctcgggtctggtaggtaatgcgatcctcgtcggcggcgtcctgctgctgatccagctggtctccgccggtcatcgcgttagcgccctgcgcgccatcggcgcctcggcgccggtgctgcccaagctgctgctgctgatcctgttcaccaccttcctggtgcagatggggatgatgctggtgctggtgcccggcgtgctgctggccatcgtgctggcctttgcgccgatcatgctggtacaggacaaaatgggcatcctcggcgccatgcgcagcagcatgcgcctggcgtgggccaatctgcggctggtggcgccggctattatcggttggctggtggcgaaaaccctgctgttactgtttgcttccagctttgccgccctgacgccaaacgtcggcgcggtggtgattaataccatcagcaacctgatttccgccctgttgctgatctatttattccgcgtgtatatgcttatccgcagctaa

SEQ ID NO: 134933 - DNA, 540 bp, Enterobacter cloacae
atgaagcagtttctggattttttaccgctggtggtcttctttgccttttataagctttacgatatctacgccgccaccacggcgctgattgtggcgaccgccgtcgtgctgatctacagctgggtgcgctaccggaaagtggaaaaaatggcgctgatcaccttcgtgctggtggccgtcttcggcgggttaaccatcttcttccataatgatgagtttattaaatggaaggtgacggtgatctatgccctgttcgccggcgcgctgctgttcagccagtgggtgatgaaaaagccgctgatccagcgcatgctgggtaaagagctgagcctgccgcagcaggtctggtcgcgacttaacctggcctgggcggtgttctttattctctgcgggctggccaatatctatatcgccttctggctgccgcagaatatctgggttaactttaaggtctttggtttaaccgccctcacgctggtctttaccttgctgagcgggatctacatctaccgtcatatgccgcaggacgaccaccactaa

SEQ ID NO: 134934 - DNA, 2184 bp, Enterobacter cloacae
atgagatcgccgcaatattctgtgcccacgaccctggcgctggtcatatccagtctcctcgcccctaacgcctttgctgaagaatcagaacaagataccgaaacgatgattgtgcgcagtacggcggaagaggcgcttaagcaacagcccggggtgtcgattatcacggcaaaggatattgctaagcagccgccggtcaacgatctctcagacatcatccgtaaaatgcccggggtgaacttgaccggcaacagcgccagcggcagtcggggcaacaaccgccagattgatatccgcggcatggggccggagaacaccctgatcctgatagatggggtaccggtcacgtcacgtaacgcggttcgctatagctggcgcggcgaacgcgatacccggggcgacagcaactgggtacctgccgaaatggtcgaacggattgaagttctccgcggtccggcagccgcgcgctatggttccggcgcggcgggcggagtggtcaatatcattaccaaacgtccgaccaacacctggcacggttcgctgtctttcttcaccaaccagccggaaaacaacaaagaaggcacgaccaatcgcgctaacttcaatctcagcggcccactggccggcgaggcgctgacgatgcgcctgtatggcaatatcaataaaacggaacccgacgcctgggatattaaccatgcgcaaaacggctcttacgctgcggggcgcgaaggggtccgcaataaagacattaacgcgctactgtcatggaaaatgaccccgcaacagatcctcgatttcagctacgcctatagccgtcaggggaatatctatgctggtgatacccagtacagcaacggcaatcttagcccgaacgggctggtggactccctgtacggccacgaaactaatcgcctctatcgccagtcctggggactcacctacaacggtctatgggattggggccagtccaaagccggtgtttactacgagaaaaccaacaatacccgcctgcaggaaggctctaccggccgcgtcgaaggcatgatcaacagtgaagattatgccaccagccgtctggaatcctggcgtactacctcggaattcaatgtgcctttcttctggctggcggaccagacgctgacgctgggaatggaatggaaccatgatcagcttgacgacccggcatcaatgcaggccactaacagcaacggcgagactatccctgggacctcgggcgaccctacgcaacgcagtaccaaaaacagcgccaccctcaccggtatctatctggaagataatatcgaagccgtgcccggcaccaacctgatccccggcattcgcttcgattatcataatcagtttggcagtaactggagccccagcctcaatctgtcccaggagctcggcgatatgttcacgctgaaggccggtatcgcgcgcgtgtttaaagcgccaaacctctatcaatccagtaaaggctatttgctctccacccgcggcaacggttgtccaaacacgatcgctgaaggcagctgctacctgctgggtaaccctgacctcgacccggagatcagtatcaacaaagagatcggtatcgaatttaaccttaatggttacgctgccggagtcacctggtttcgcaacgattacaaaaacaaaatcgtctccggaacagaggtactgggctatacctccagcggcaataatattttgcaatggcagaacggcggcaaagccgtggtcgaggggctggaaggaaatctgctgatcccggtgctgagagatgtcctcagctggcggaccaatgccacctggatgctcaaatctgaaagtaaagagactggcaacccgctgtcggttatcccgaaatataccgttaacacgatgctcgactggcaggtaaacgacgccctgtctgcgaatgtgaactggacgctttatggccgtcagaagccgcgtcagtatgcggagatccgcaacgaaaccgggacccttgccaccaccgaggttggcgcctattccatcgtgggtattggtactcagtatcagctaaaccgggatattcgcctgaatgccggaataagtaatctatttgataaacaactgtatcgcgaaaatgccggcgcctcgacctacaatgagcctggccgcgcgtattacgccggcgttaccctctccttctga

SEQ ID NO: 134935 - DNA, 366 bp, Enterobacter cloacae
atggttttacgcaccctggcaatgccggcggataccaatgccaacggggatatttttggcggctggctgatgtcgcagatggatattggcggcgccattatggccaaagagatcgcccagggtcgcgtggtgaccgtgcgggtggatgggatgacctttttacgtccggtcgccgttggcgacgtggtgtgctgctacgcccgctgcgtgaagcgcggcaacacctcggtgacaatcaatatcgaagtgtgggtgaaaaaagtttcttcagaaccgattggccagcgctacaaggcgacggaagcgctgtttatctacgttgccgttgataatcagggaaaaccacgtcctctgccagcggaataa

SEQ ID NO: 134936 - DNA, 537 bp, Enterobacter cloacae
atgacgtaccaacaagctggacgcatagcggttatcaaacgcattttaggatgggttatctttattcccgccgtgctgtcgacgctgatttctgtgctcaaatttatgtatgagcacagtgaaaagaaacccggcattgatgcggtaatgatggattttgcgcacgtgatgattgagatgatgcgctttaacacgccgttcctgaactttttctggtacaactcgccgctgccggattttcaccatagcctgaacatcggcttctggatcatcttcattctggtgttcgtcggcatggccctgcaggcttccggcgcgcgaatggcgcggcaggcgaaatttctccgcgaggggattgaggatcagctgatcctcgaacaggccaaaggcgcagatgggttaacccgcgagcagctcgctgaacgcattgtggtaccgcgccatactatcctggtgcagtatttcccactgtacgtgctgccggtgatcgtgattgtcatcggttactttttcttttcgctgctgggctttctgtaa

SEQ ID NO: 134937 - DNA, 669 bp, Enterobacter cloacae
atgtcagcgaagcgccgcattgaggccgcgatatttgatatggacgggttgctgattgactcggagccgctctgggatcaggcggaggtcgaggtcatggagagcctgggggtggatacccgtcgccgcgatgaactgcccgacctgctcggtctgcgaatcgacctggtggtggatctgtggtacgcgcagcagccgtggcacggcgtagaccgggcggaagctaccgcgcgcattattcgtcgcgccattgagctggtggaagcctcacgcccgctgctgccgggcgtacgcgaggcagtggccctgtgtaaagctcagggcttaaaggtgggcctggcctcggcctcgccgctgatgatgctggagaaagtgctcgatatgtttgaactgcgcgaccagtttgatgctctcgcctctgcggagcatttaccctggagcaaaccgcacccgcaggtctacctcaactgcgccgctgccctgggagtcgacccgcagcgctgcgtcgcgctggaggattcggtcaacggcatgatcgccagcaaagccgcgcgcatgcggtctatcgtggtgccggaagcggagaacagccgcgacccgcgctttgcgctggcggacgtcaagcttccgtcactgctggcactcactgctgagaatttgctcggctaa

SEQ ID NO: 134938 - DNA, 762 bp, Enterobacter cloacae
atggtactgaacgccttcgacctgacgggtaaggtcgccatcgtgaccggttgcgataccggcctgggacagggaatgacgctgggcctggcgcaggccgggtgcgatatcgtcggcatcaaccgtaaaattccccatgatacggccgcccaggtgctggcgctgggccgccgctttcacgccattcaggcggatctcagccaagagaatgatatgagcggtctggtcgaccaggcggtggcggcgatgggccgggtcgatattctggtcaacaacgccggaattatccgccgccatgatgccctgaccttcacggaaagcgactgggacgcggtgatcgacctgaatctcaaagcggttttctttctcagccaggcggtcgccaggcagttcattcgccagggggaaggcgggaaaatcattaacatcgcctcgatgctctcgtttcagggcgggatccgcgtcccctcctacaccgcttcgaaaagcggcgtgctgggtttgacccgtctgctggccaacgaatgggctggccagggtatcaacgtcaacgccatagcgcccgggtatatggccaccaataacacccaggcgctgcgcgaagatgaagagcgtaaccaggcgatcctcgagcgcattcccgctggtcgctggggagcgccgaaagacctgcaggggccggtggtgtttctcgcctcatcagcggccgactatattaacggctatacgctggccgtcgatggcggatggctagcgcgctga

SEQ ID NO: 134939 - DNA, 591 bp, Enterobacter cloacae
atgacggcggaaggccatctcttcttttcaatcgcctgcgcagtatttgccaaaaacgcagagttaacgccggtgctggcgcagggcgactggtggcatattgtgccctcggcggtattgacctgcctgctgccggacatcgatcacccaaagtcgtttcttggccaacggctgagctggatctcaaagcccgtggcgcgggcctttggccaccgcggcttcacccacagcctgctggccgtctttggcgcgctgacgctgttctatctgaaagtgcctgacagctggattgtcccggcagacgctctccagggcctggtgctgggctatctcagccacattctcgccgatatgctcacccccgccggtgtgccgctgctgtggccctgtcgctggcgcttccggctgccgatccttgcgccgcgcaagggcaatcagctcgaacgcgccttgtgtatggcgctgttcgtctatgccgtctggatgccgcagacgctggcggacaacagcgcgatacgctggtcatccggggtgatcaattccctgcagatcaccttcaatcgctttataagtcaccagagtgggcgataa

SEQ ID NO: 134940 - DNA, 1392 bp, Enterobacter cloacae
atgaactttccattaatagcgaacgtagtcgtgttcgccgtattactgtttgcgctggggcaaacacgccataaacagtggagcctggccagaaaagtgctggtcggtctggcgactggcgtggtctttggtctggcgctgcagctgatctacgggtctgacagccaggtgctgaaggattccatccagtggttcaatatcgtcggcaacggttacgtccagctgctgcaaatgattgttatgccgctggtcttcgcctccatccttagcgcggtggcccgcctgcacaatgcctcgcagctggggaaaattagcttcctgagcatcggtactctgttgttcaccaccctgatcgccgccctggttggcgtgctggtgaccaatatgttcggcctcaccgccgagggtctggtccagggcagcgcggagaccgcccgtctgaacgccatccagagcaactatgtggggaaagtagcggatctcagcgtcccgcagctgatcctttccttcgtgccgaagaacccgtttgctgacctgaccggggctaacccaacctccatcatcagcatcgtcattttctcggcgttcctcggcgtcgcagcgcttaagttgctgaaagaggatgtggaaaaaggccagcgcgtgctgaccgcgatcgataccctgcagggctgggtaatgaagctggttcgtctggtcatgcagctgaccccttacggtgtgctggccctgatgaccaaagtggttgccgggtcgaatttgcaggacatcatcaagcttggcggcttcgtggtagcctcgtacattgcgctgggtattatgtttgtcgtccacggcctgctgctggcgattaacggcgtcagcccgctgaagtacttccgtaaagtctggccggtgatcaccttcgcctttaccagccgctccagcgccgcctccattccgctgaacgttgaggcgcaaacccgtcgtctcggcgtaccggagtcgattgccagcttctccgcctcctttggcgccaccatcggccagaacggctgcgctggtatctatccggcaatgttggcggtgatggtcgcgccgaccgtgggcatcaacccgctggatccgatgtggattgccaccctcgtgggcatcgtcaccgtcagctcggcgggcgtcgccggggtgggcggcggcgcgaccttcgccgcgctgatcgtcctgccggcgatgggcctgccggtgaccctggtagccctgctcatctccgtcgaaccgctgatcgatatggggcgtaccgcgctgaacgttaacggctcaatgaccgccggcacgctgaccagccagtggctgcgccagaccgataagtcgatcttcgatagcgaggaagaagccgaactggcgcatcgctaa

SEQ ID NO: 134941 - DNA, 333 bp, Enterobacter cloacae
atgcgcatcggcggcgaaggggcgacgaacggggccacaatcggctatgatagaggtttctgtttcccgctatgtttagtgaatccatttgttatgaaaccattgcgccaacaaaatcgccctgtcattagctacgtgccgcgcgtggagcctgcgcccccggaacatgccgtgaaaatggaccattttcgcgatgtctggattttgcgcgggaagtatgtcgcttttctgctgatgggggagcatttccgtcgctcaccggcattcagcgtgccggagtcggcgcagcgctgggctaaccaggtgcgtcaggaaggtgagattgaagcctga

SEQ ID NO: 134942 - DNA, 2259 bp, Enterobacter cloacae
atgtctgataagcacccgaaccctcaccaacagcaggcaccggtccacgacagcgaggaagcgcagccgggtctcgattcgctggcgccggacgatcgggagtggcgccccacgccgaaacctaccgctccgggcgtcgaacccaccgccccaggcagcctgaaagcgcccgatactcataacagcaaactggattccctggaggcgcaacgcaaagggggggaagattttccgctgaccaccaaccagggcgtgcgcattgctgacgatcagaattcgctgcgcgccggtagccgcggcccaacgctgctggaagattttatcctgcgggagaagatcacccactttgaccacgagcgtattccggagcgtatcgttcatgcccgcggctctgccgcccacggctacttccagccctacaaaagcctggctgcgttgactaaagccgattttctttcgtcagccgataaaatcaccccggtgtttgtacgcttttccaccgtgcagggcggcgcggggtcggcggacaccgtccgcgatattcgcggcttcgctaccaagttttacactgacgaagggatttttgacctggtgggcaacaacacaccggtcttcttcatccaggacgcgatgaagttccccgactttgtccacgccgtgaagcctgaaccccactgggccatcccacaggggcagagcgcccacgatactttctgggactatgtttccctgcagccggaaacgctgcacaacgtgatgtgggcgatgtcggatcgcggcatcccgcgcagctatcgcaccatggaaggcttcgggatccataccttccgtctgattaatgccgagggcaaagccaccttcgttcgctttcactggaaaccggtcgccggcaaggcgtcgctggtgtgggatgaagcgcagaagctgaccggccgcgaccccgattttcatcgccgcgatctatgggaggccatcgaagccggggactacccggaatttgagcttggcctgcaattgatccccgaagagaatgaatttgcttttgacttcgacctgctcgatcccaccaagctgatccccgaggcgctggtgccggtgcagcgggttggcagaatggtcctcaaccgcaacccggataacttctttgccgaaaatgaacaggcggccttccatcccggacatatcgtcccgggcattgatttcagcaacgatccgctgctgcaggggcgtctcttctcttacaccgatacgcaaattagccgcctgggtgggccgaacttccatgaaatccccatcaaccgtccgacctgcccgtatcataatttccagcgtgacgggatgcaccggatggacattgacaccaatccggccaactacgagcccaactcgattaacgacaactggccgcgcgagacgccgcctgccgccaaacgcggtggctttgagtccctcgccgagcgcgtcgacggcgaaaaaatccgccagcgcagcccttcgttcggcgaatattacgcccagccgcgtctgttctggctgagccagacgccgattgaacagcagcatattatcgatggtttcagcttcgaactcagcaaagtggtccgcacctggatccgcgagcgggtggtcgatcatctggcccacattgatactaagcttgcggaagcggttggggcgaacttagggatcgaactgagcgacgatcagcgcaacattaccctgcccgccccggtcaatggcgtggagaaagaccccagcctcagcctctacgccgacgccgaaggagatgtgaaaggtcgcgtggtggcagtcctgctcaacgaacgcacctcagcgcaggatctggttcagctcctgcaggcgctgcaggcccagggcgtgcacagcaagctgctctactcgcgaatgggcgaagtcattgccgacgatggttctccgctgccgattgccggcaccttcgccggttccccttcgctgacggtggatgcggtggtggtgcccggcggcgacctcagcgccctgagtcagagcggtgacgcgcgctattacctgctggaagcctataaacatctgaagccgatcctgctggcaggggatgcgcggcagctgacgtccgttctgcatgttccgacccagggtgaagagggggtcatcgtcaccgatgcgctcgacacgccagcggcggacaaactgctcgccctgatgacggcccaccgcgtgtggtcgagaagcccgaaaatcgccgctattccggcgtag

SEQ ID NO: 134943 - DNA, 1347 bp, Enterobacter cloacae
atgagccagaaattaaaagtagtcactattggcggcggcagcagctataccccggaattactggaaggatttctgaaacgttatcatgaactgccggtaagcgaactgtggttggtagacgtcgaagagggccaggagaagctcgatattatccacgcgctgtgccagcggatggtggaaaaagccggcgtgccgatgaaagtctataaaacgctggatcgccgcgcagcgctgcagggcgcagatttcgtcaccacccagctgcgcgtgggccagctgaaggcgcgtgaaaaagatgagcgcatcccgctgagtcacggctacctgggtcaggagaccaacggggcgggcgggttgtttaaaggactgcgcaccatcccggtgattttcgacatcgtgaaagatgtgcaggaaatttgccccgacgcatggatcatcaacttcaccaacccggcgggcatggtcaccgaggcggtctatcgccacaccaatttcaaacgctttatcggcgtgtgcaacattcctatcggcatgaagatgttcatcaccgacgtgctgcagctgagcccgagcgatgagctgaatatcgacctgtttggtctgaaccacctggtgttcgtccgcgacgtgctggttaacggcgtctcgcgcttcgatgaactgctggacggcgtggcctccggccgtctgaccgcgaactcggtgaaaaacatcttcgacctgccgtttagcgaagggctgatccgttccctgcgcctgatcccatgctcttacctgctctactactttaagccaaaagagatgctggcgattgagatgggcgagtactacaaaggcggtgcgcgcgcccaggtggtgcagaaggtggagaaacagctgttcgagctgtataaaaacccggatcttaacgttaagccgaaggagctggagcagcgcggcggggcctattactctgatgccgcttgcgaagtaatcaatgccatctataacgacaagcagactgagcactatgtgaatatcccgcatcatggtcatgtcgataatatcccggcggactgggcggtagagatgagctgcaccttaggccgcgacggcgcgaagccgacgccgcgcattactcatttcgatgagaaggtgttagggcttatctacaccatcaaggggttcgaagtggcggccagccaggcggcgatcagcggtgagctgaacgatgtcctgttggcgctgaacttaagcccgctgatccattccgatcgtgacgccgaacagctggcgcgggagatgattctggcgcatgaaaaatggctgccgaactttgcggcgacgatcgaaaaactaaaatcgtaa

SEQ ID NO: 134944 - DNA, 825 bp, Enterobacter cloacae
atgatgaccaccgagatcagtaccgccagagaacaacagctgttcaacgggaagaactttcatgtggtcatctataacaaaacggaaagcgtgagcgggcttcaccagcatgattactacgaatttaccgtggtgttaaccgggcgctattaccaggagatcaatggcaaacgggtgctgctggagcgcggggatttcgtctttatcccgatgggctcgcaccaccagagcttttacgagttcggggcgacgcgcatccttaacgtcggcatcagcagacgcttctttgagaaacactacctgccgctgctgccgtttggtctggtggcttcgcaagtctacgccgtgcagagcgcttttctcggctacgttgagtcggtcatcgcctcactcaattttcgcgaaacggaatttgacgaatttatcgagctggtctccttttatgtcattaaccgtttacgccactatcgtgaagagccggttgccgacgtgacgccgcaatggttaaaaaataccgtggaagccatgcatgataagctgaaattcggtgaaggcgctctcgaaaatatggttcgcttatccggaaaaacgcaggaatatttaacccgggcgacccagcgctattatggtaaaacgccgatgcagataattaatgatatccgtatcaactttgccaaaaaacagctggaaattaccaattattcagtgacggatattgcgtatgaatcaggttacagcagcccgagcctgtttattaaaacctttaaaaaactgacgtcgtttacgccgagcagttatcgcaaacatttgaccagtattaattaa

SEQ ID NO: 134945 - DNA, 348 bp, Enterobacter cloacae
atgtttgatctggacaacatcgacgcggtagagaccccggaaaatgacctcgaagaggtagtgatggggctgattatcaactccggacaagcccgtagcctggcctatggcgcgctgaagcaggcgaagcagggcgactttgccgcagcgaaagcgatgatggagcagtcgcgccaggcgctgagcgaggcgcatcgcgtgcagacccagcttatcgaaagcgatgagggcgaagggaaaatgaaggtcagcctggtgctggtgcatgcccaggaccatctgatgacctccatgctggctcgtgagctggtggccgaattgattgagctgcacgagaaggtacaatag

SEQ ID NO: 134946 - DNA, 1359 bp, Enterobacter cloacae
atgagtaaagtgatcgattcgcttgaaaaggtactccttccttttgcagtgaaaataggaaagcagccgcatattaatgcaataaaaaatggatttattaaattaatgccgttgaccctcgccggggccatgtttgtgttaattaacaacgtttttctgagcttcggcgaaggctctttcttttattccatgggcattcgcctggatgcctccaccattgaaaccttaaacggctttaaggctatcggcggaaacgtctataacggcaccctcgggattatgtcgctaatggcgccgttctttatcggctccgcgctggcggaagagcgcaaagttgacccgatggcagctggcctgctggcggtggcggccttcatgaccgtgaccccgtatagcgtgggcgaagcctatgcggtgggcgccaactggctgggcgggcagaacatcatctccgggatgattatcggtctggtcgttgcggaactgttcaccttcgtgatccgtcgcaactgggtgattagactgccggacagcgtgccggggtcggtatcacgctctttctcagcgctgatcccgggcttcttgatcctctccatcttcggtattatctcgtgggccctggcgagctatggcagcaacttccaccagatcatcatggactctatctcgacgccgctggcggcgatgggcagcgtggttggctgggcatacgttatctttaactctctgctgtggttcttcggtgtgcacggttctctggcgcttaccgccctggataacggcatcatgacgccgtgggcgctggaaaacatcgcgctgtacaaccagtacggctctgttgatgcggccatcgaagcgggcaaacagttccacttctgggctaaaccgatgctcgactcctacatcctgctgggtggctccggggcgacgctgggtctgattatcgccatctttatcgcttctcgccgcgctgaccatcgtcaggttgccaagctggcgctgccgtcaggcatcttccagattaacgaaccgattctgtttggtctgccgatcatcatgaacccggtgatgttcatcccgttcgtgctggttcagccgattctggcggccattacgctggcggcctacagcctggggattatcccaccggtgaccaacctggcgccgtggactatgccgaccggtttgggagcgttctttaacagtaacggcagcgttgccgccctgttggtggccctgttcaaccttggcgtcgctaccctggtctacctgccgtttgtggtgctgtcgaataaagcgcagaccgttatcgagcaggaagagagcgaagaagacatcgctaacgcactgaaattctga

SEQ ID NO: 134947 - DNA, 321 bp, Enterobacter cloacae
atggaaaagaaacacatttatctcttctgctcggcaggcatgtccacgtcactgctggtctccaaaatgcgggcgcaggcggaaaaatatgaagtcccggtcattattgaagcctatcccgaaaccctcgcgggcgaaaaagggccggaagccgacgtagtattattagggccacaaattgcgtatatgttaccggaaattcagcgcctgctgccgaataaaccggttgaagttatcgactcccttctctatggcaaagttgatggtttaggggtattgaaagccgccgtcgcggctattaagaaagctgcagcacaataa

SEQ ID NO: 134948 - DNA, 339 bp, Enterobacter cloacae
atgaacaaaagcttagcaggaatactgggcgtcaccgtcgcgttaaccttactggcgggctgtaccgcttacgatcgtaccaaagaccagtttacccagccggtggtgaaagatgtgaagaaagggatgtcgcgtcagcaggtgatgcagatcgccggcaaaccttcaacggaagtcaccatggtccatgcccgcggcacctgccagacctatatcctcggtcaacgagatggtaaagttgaaacctactttgtggccctcgacgaaacgggtcacgtcatgaactccggctaccagacctgcgccgagtatgataccgacccgcgcaacgccaggtaa

SEQ ID NO: 134949 - DNA, 828 bp, Enterobacter cloacae
atgacgctacaacaagagattattcaggcgctgggcgcaaagccgcagattgatgtcgcaggcgagatccgccgcagcgtcgatttcctgaagtcatacctgcagacctacccgtttattaaatcgctggtgctgggtatcagcggcggtcaggactccaccctgacgggaaaactgtgccagatagcgattaacgaactgcgtgccgaaaccggcgacagtagcctgcagtttatcgccgtccgtttaccctatggcgtgcaggctgatgagcaggactgccaggacgccatcgcatttatccagcctgaccgggtgttgacagtcaatattaaagctgcggtgctggccagcgaacaggcgctgcgcgaagcaggcatcgaactgagcgacttcgttcgcggaaatgaaaaagcccgtgagcgaatgaaggcccagtacagcatcgccggaatgaccaaaggagttgtggtcggtaccgaccatgcggcggaagcgattaccggctttttcaccaaatatggcgacggcggcaccgacatcaacccaattttccgcctgaacaaacgtcagggcaaacagctgctggcccatctcggctgcccggaacatctgtataagaagctgcccaccgccgacctggaagacgatcgcccctccctgccggatgaagtggccctgggtgtcacctacgagaacatcgacgattatctggaaggcaaaacgctggacccgagcatcgccaaaacgatcgagggctggtatctgaaaaccgaacacaagcgtcggccgccgatcaccgtctttgacgatttctggaaaaaatag

SEQ ID NO: 134950 - DNA, 864 bp, Enterobacter cloacae
gtggccagaaagcaatcagccccgcgtctcgagtttgaggcggcggcgatctatgaatatcccgaacatcttcgcccgtggctggaggcgctgccgaagctgccgggcgtctatcagtttcacggcgacagcgacacgatgccgctctatatcggtaagagcgtcaacctccgcagccgggtgttatcccacctgcgcacccctgaagaggccgcgatgctgcgtcagtcgcggcgtatcacctggcagcgcaccgctggcgagctgggagcgctgctgctggaggcgcggttgattaaagagcagcagccgctgtttaacaagcggctacggcgtaacaagcagctctgcgcctggctacttgcggacgaccggccgcagattgtctatgcccgtgaggttgatttctcgcaccagcagcatctctatggcctgttcgccaaccggcgggcggcgctgcagatgctgcagagcctcgctgacgaacagcgcctctgttatggcctgcttggtctggaaccgctcagccgcggccgcgcctgctttcgctccgcgctgggccgctgcgccggggcctgctgtggaaaggagagcgtggaggcgcacaaagagcgcctgctggcgcagatgagcagactgcagctggtgtgctggccgtgggcggggcccgtggcgctggaggagcgcggcccggacatgacgcagtatcacgtcattcataactggctgtggctgggcgccgttgaatcgctcgaccaggcggcggagttgacccgtctgcccgccggatttgaccaggatggttacaagatcctctgtaagcctttgctcagcggagactatccgctgcatccgcttggctga

SEQ ID NO: 134951 - DNA, 483 bp, Enterobacter cloacae
atgaagaaactcactgcactgtttgttgcctctactctggctctgggcgcggctaacctggcacacgccgccgataccaccaccgcgccgagcgacagcaagccgatgatgatgcatcataaaggcggcccgggtcagcatgacatgatgtttaaaggcctgaacctgaccgatgcgcagaagcagcagatccgcgacatcatgaagagccagcgcgaaaatatgaaacgtccgtcccttgaagaacgccgcgcgatgcacgatctgatcgccagcgacaccttcgataaggcgaaggcggaagcgcagatcgataagatggaagcgcagcataaagcgatggcgctgtcccgcctggaaacgcagaacaagatctacaacattctgaccccagagcagaaaaaacagttcaatgctaattttgagaagcatctgacagaacgcaacgcgccggcaggtaaaatgcctgcacctgctgaataa

SEQ ID NO: 134952 - DNA, 375 bp, Enterobacter cloacae
ttgctcgggctcttccgccagcacgccgaacatatcagcctggccgatggcctcggctttcgcgtgctggtcagcggctttcaacgcatcgcccagcgaattcatcagcgccgcgcgatgtgggccgagacgatcgaacgccccggacataatcagcttttccagcacccgacggttgagctttttaatatcggttcgcgcgcagagatcgaacagctcgcggaaatagccgccattgttgcgcgcctcaataatcgcttcgatcggtccttcgccgacgcccttgatggcgccaatgccgtagacgatctcgccatcgtcgttgacgtggaaatggtacaggccggagttaatatccgggggcaggatttttag

SEQ ID NO: 134953 - DNA, 444 bp, Enterobacter cloacae
gtgcgatttgttaaatccgtaaccggcgaatttctccaccaggtcgaagattttcatcgccagttcgccgtctatgccgtttttcttcgccccatcctcaaagatagaacgctgcttggccatctcctccggctttttcttacccatcgcacgacgcagcatgtccgcgccgccgagggtatatccggacagcacctgggcaatctgcatgacctgttcctgatacaggatgatgccgtaggttggctccagcaccggtttcaggctttcatgctgccactgcacgtccggataagagatctcctcgcggccatgcttacggtcgataaagttatctaccatccccgactgcagcgggcccgggcgaaacagagccaccagcgcgatcatatcttcgaagcagtccggctgcaggcgtttaatcagatctttcatgccgcgtga

SEQ ID NO: 134954 - DNA, 1614 bp, Enterobacter cloacae
atgcagcccctgctcatcgcaatacagtggcgcgaaatcggtgattttggttggagcgataactaccccaccggcatgtttaccggcgtttcgcgtcaccccttccagcttacgcgccatgtcgatcagcgctttcacttcttcgtccgcctcgtagatctccggcagctgcggctcggcctcaaaggctttcgccagcgtcatgcccggatcgggcggcaccagcttggagatacgatcgacaaatccgtacgggtgacccagcacgcgaccgacatcgcggatgaccgctttcgccgccatggtaccgaaggtgatgatctgcgataccgcgtcgcggccgtacatatccgccacgtgctcgataacctggtcgcgtttctccatgcagaagtcgacgtcgaagtcgggcatcgagacacgttcagggttaaggaaacgttcgaacagcaggtcgaactccagcgggtcaagatcggtgatcttcagcgcataggccaccagcgaaccggcgccggaaccgcgtcccgggccaaccggcacgccgttatccttcgaccactggataaactccatcacaatcaggaagtagcccgggaaccccatctggttgataacctggagttcaatatccagacgctggtcatactccgggcgcttttcagcacggacggcaggatccgggaagaggaattccagccgctcttccagaccctctttcgatttcatgaccaggaaatcttccgtggtcatatcgccggtcgggaactgcggcaggaaatattcgccaagccgcacggtgacgttgcagcgcttggcaatttcaacgctgttcgccagcgcttccggaatatcggcgaacagctcgcacatctcttcctcgctgcgcatatattgctgcggcgagtagttgcgcggccgtttcgggtcgtcgagcgtaaagccgtcgtggatcgcgacgcggatttcatgggcgtcgaaatcgctggtgtcgagaaagcggacatcgttggtcgccaccaccggcagaccgcgcgcttccgccagcgccacggcggcgtggagataggcctcttcatcctgtcgaccggtacggatcagctccagaaaatagcggtccgggaaatgctcttcgtagaaggcgacgcactgttcaaccagcggcatattgccgcggatcaggctgacgccaacgtcacctttccggccgccggagagcagaatcagcccttcctgatgttccaccagccagtcgcgatcgatccacggccccagggcgccgtagccgcgctgataggcacgggaaatcaacagggtcaggttctggtagccggtgttgttcgccgccagcacggtcagctcggtaaattcgtcgccgagcaggtcgcactgcacgtgaaagtcggcgccgacgatcggcttaatccccgcgccgtgtcccgtcccgtagaacttcaccagtccgcagaggttggtgaaatcggtgatcgccagcgctggcatgccaagcgaggccgccttcttcaccagcggcccggtctttgccagcccatcgatcatggaatagtcgctgtgcacccgcaggtgtacgaaacgtggttcagccatctttag

SEQ ID NO: 134955 - DNA, 600 bp, Enterobacter cloacae
atgatggagttcgtctatccgcatacccatctggttgccggcgtcgatgaggtcgggcgtggccccctggttggcgcggtggttaccgcggcggtgatcctcgatccggcgaagccgattgtgggtctgaatgattccaaaaaactcagcgagaagcgtcgtctggcgctgttcgatgagattaaagagaaagcgctgtgctggagcctggggcgcgccgagccgcacgaaatcgacgagctgaatattctgcatgccactatgctggcgatgcagcgcgccgtcgccggcctgagcattgttcctgagtttgtccttatcgatggcaaccgctgtccctcgctaccgatgccctcccaggcggtggtgaaaggcgacagccgggtggcagaaatcagcgcagcgtctattctggcaaaagtcactcgtgacgccgaaatggccacgctggacctcgcatttccccactacggatttgcccagcataaaggctatcccaccgctgttcacctgcagaagctgcaggaacacggcgcaacagagcatcaccggcgcagttttggcccggtgaagcgtgccctgggcctggcgtccaactaa

SEQ ID NO: 134956 - DNA, 1152 bp, Enterobacter cloacae
atggctgaacagcgtcccctgacgattgccctggtcgccggagaaacctccggcgatattctaggcgctggtctcatccgcgcgcttaaagcacgcatcccgaatgcgcgctttgtcggcgtggcggggccgctaatgcaggcggaagggtgcgaagcctggtatgaaatggaagagctggcggtgatgggcattgttgaagtgctcggtcgcctgcgtcgcttactccatattcgcgccgatttgacccgccgcttcggcgagctgcgtcccgatgtcttcgtcggcatcgacgcccctgactttaatatcaccctcgaaggaaatctgaaaaagcagggcatcaaaaccattcactacgtcagcccgtcggtctgggcctggcgacaaaaacgcgttttcaaaatcggcagatccaccgatctggtgctggcctttctgcctttcgaaaaagcgttttatgacaaatttaacgtcccctgccgctttattggccataccatggcggatgcgatgccgctggatcctgacaaaggcgctgcgcgcgaccggttagggatcccgcacagcgtgcgctgcctcgctctgctacccggcagccgcggcgcggaagtcgaaatgcttagcgccgacttcctgaaaaccgcgcagcttctgcgcgccacctatcccgatctgcaggtggtggtgccgctggttaatgctaaacggcgggagcagtttgagcgtattaaagctgagacggcgccggatatgatcgtgcatatgcttgacggtcaggcgcgcgatgcgatgatcgccagcgacgccgcgctgctggcctccgggacggcagcgctggagtgtatgctggcgaaatgcccgatggtggttggctaccggatgaagccgttcaccttctggctggcgaagcggttggtaaaaaccgactacgtctcgttaccgaacctgctggccggtcgcgaactggttaaagagctgctgcaggatgagtgcgagccccaggcgctggcagccgctctgcagccgctgctggccgatggcaaaaccagccatgagatgcatgagacgttccgcgccctgcatcagcagatccgctgcaacgccgatgagcaggcggcggacgccgtactggagttagcaaaacaatga

SEQ ID NO: 134957 - DNA, 789 bp, Enterobacter cloacae
gtgattgataaaaccgcttttgttcatcctaccgccattgtagaagaaggcgccgtgattggcgctaacgttcacattggtccgttttgtattgttggcgctaacgtcgaaatcggcgaaggcaccgtgctgaagtctcacgttgtcgttaacggccacaccaaaatcggccgtgacaatgagatctatcagttcgcttccatcggcgaagttaaccaggatctgaaatatgctggcgaaccgacccgggtggaaattggcgatcgcaaccgcattcgcgaaagcgtcaccattcatcgcggcacagtacagggcggtggattaacaaaggtgggcaacgataacctgctgatgatcaacgcccacgtggcgcacgattgtacgcttggcgatcgctgcattctggccaataacgcgacgctcgcgggccatgtttcgctggatgattatgtcattatcggcggcatgacggcggtgcatcagttctgcgtcattggctcacacgttatggttggcggctgctccggcgtggcgcaggacgttccgccgttcgtaattgcccagggcaaccatgcgacgccgttcggcgttaacatcgaagggctgaaacgccgcggcttcagccgggaagcaatcaccgcgatccgcaacgcgtataaactgctgtaccgcagcggcaaaacgctggaagaagccaagccggaaatcgccgaactggctgctcagcatcctgaggttcagccgtttgtcgatttcttcgctcgttctacccgcggcttgattcgttaa

SEQ ID NO: 134958 - DNA, 456 bp, Enterobacter cloacae
ttgactactgacactcatactctgcacattgaagagattctggaacttctgcctcaccgttacccgttcctgctggtagaccgcgtgctggattttgaagaaggtcgttttctgcgcgcagtaaaaaatgtttctgtaaacgagccgtttttccaggggcacttccctggtaagccgattttgccgggcgtcctgattctggaagcaatggcgcaagccaccgggattctggcgttcaaaagcgtcggaaaactggaaccaggcgagctttactacttcgcgggtatcgatgaagcacgcttcaaacgcccggtagtaccaggcgatcagatgattatggaagtcactttcgagaaaacccgccgcggcctgacccgtttcaaaggcgttgcgctggttgacggtaaagtggtttgcgaagcgacgatgatgtgtgcgcgtagccgggaggcctga

SEQ ID NO: 134959 - DNA, 1026 bp, Enterobacter cloacae
atgccttcaattcgactggctgatctcgcgcagcagttggatgcagaattacacggtgatggcgatatcgtcatcaccggcgttgcgtccatgcagagcgcgaaaacgggccaaatcactttcatggtcaaccctaagtaccgtgagcacctggccgcttgccaggcttctgccgttgtgatgacgcaggatgatttaccttttgcccatagcgccgcgctggtagtgcgtaacccctacctgacctacgcgcgcatggctcaaattcttgataccacgccgcagccggctcaggatatcgcgccgagcgcggtcatcgatccgtcggcgaagctgggtagcaacgttgccatcggcgccaacgcggttatcgaatccggcgtagtgctgggcgataacgtagttatcggcgcaggctgcttcgttgggaaaaatacgaaaataggcgccggctcgcgtttgtgggctaatgtgaccgtttaccatgagattgagatcggcgagaattgcctgattcagtccagcacggtgattggcgcggatggctttggctacgctaacgatcgcggtaactgggtaaagatcccgcagttgggtcgcgtcattattggcgatcgcgtggagattggcgcctgcaccacgattgaccgtggtgcgctggacgataccgtgattggcaacggggttatcattgataaccagtgccagattgcgcataacgtggtgattggcgacaataccgcggtcgctggcggcgttatcatggcgggcagcctgaaaattggccgctactgcatgattggcggcgccagcgtgattaacggccatatggaaatctgcgataaggtcaccgtcacggggatggggatggtgatgcgtcctatcagcgaacctggcgtatattcctccggtattccgctgcagccgaacaaggcgtggcgtaaaaccgctgcgctggtgatgaatattgacgagatgagcaagcgcctgaaagcgattgagcgcaaggttaatcaacaagactaa

SEQ ID NO: 134960 - DNA, 486 bp, Enterobacter cloacae
gtgaaaaagtggttattagctgcaggtctgggtttggcaatggtaacttccgctcaggcggcagataaaattgccctggtgaacatgaacagcctgttccaacaggttgcccagaaaactggcgtttccaacacgctggaaaacgagttcaaaggccgcgctagcgaactgcagcgtatggaaggcgacctgcaatccaaaatgcagcgtctgcagtccatgaagccgggcgccgaacgtaccaaactggaaaaagacgtgatggctcagcgccagaccttctcccagaaagcgcaggcgtttgaacaggatcgcgcacgtcgttccaacgaagagcgtggcaaactggttacccgtatccagactgccgtacagagcgtagcgaaagatcagagcatcgatctggtggttgacgcgaatgccgttgcatataacagcagcgatgtaaaagacatcaccgctgatgtgctgaaacaggttaaataa

SEQ ID NO: 134961 - DNA, 2430 bp, Enterobacter cloacae
atggcgatgaaaaagttgctcatagcgtcgctgctgtttagcagcgcgactgtatacggtgctgaagggttcgtggtgaaggacattcatttcgaaggcttgcagcgtgtcgctgttggtgcggccctcctcagtatgccagtgcgtcctggcgatacggtgaccgacgatgatatcagtaacactattcgcgcgctgtttgccactggcaacttcgaggacgtccgcgtcctgcgcgatggtgataccctgctggtgcaggtgaaagagcgtccgacgatcgccagcatcaccttctccggcaacaagtcggtgaaagatgacatgctgaagcagaaccttgaggcctcaggcgttcgggtgggcgagtcgcttgaccgcacgaccatcgcggatatcgagaagggtcttgaagacttctactacagcgtcggtaaatacagcgccagcgtcaaagcagtcgttacgccgctgccgcgtaaccgtgtcgatttgaagctggtcttccaggaaggcgtctccgcaaaaattcaacagatcaacatcgtcggcaaccatgcgttttcgaccgatgagctgatctcccacttccagctgcgcgatgaggtgccgtggtggaacgtggtcggcgaccgtaaataccagaagcagaagctagcgggcgaccttgaaaccctgcgcagctactacctggatcgcggctatgcccgtttcaacatcgattctacccaggtcagcctgacgccggataagaaagggatctacatcaccgtcaacatcaccgaaggcgatcagtacaagttttccggagtgcaggtgacgggcaacctcgctggccattccgcggaaatcgaagcgctgactaaagttgagccaggcgaactgtacaacggcgcgaaagtgaccaagatggaaaacgacatcaagaaattgttgggtcgttatggttacgcctatccgcgcgtgcagtcgcagccggagatcaacgacagcgataaaaccgttaagctgcacgttaacgtcgacgcaggcaaccgttattacgtgcgtaaaattcgcttcgaaggcaacgacacctctaaagatgccgtactgcgccgcgaaatgcgccagatggaaggcgcatggctgggcagcgacctcgtcgatcagggtaaagaccgtctcaatcgtttaggtttctttgaaacggtggatactgatacccagcgcgtgccgggcagcccggaccaggtcgacgttgtctacaaggtgaaagagcgtaacaccggtagcttcaacttcggtatcggctacggcaccgagagcggcgtcagcttccaggcgggcgttcagcaggataactggttaggtactggctatgctgtcgggatcaacggtaccaaaaacgactaccagacctataccgagctgtcggtgaccaacccgtacttcaccgtagacggtgtaagcctcggcggtcgtgtcttctataatgactttgatgcaaacgatgcggatctgtctgactataccaacaaaagctatggtacagacattacgctgggcttcccggtcaatgaatacaacacgctgcgcgccggcgtcggttatgtgcataactccctgtccaatatgcagccgcaggtggcaatgtggcgttaccttaactcgatgggccagtatccggacaacaccaacgaccggaactcgttcagtgcgaatgacttcaccttcaactacggttggacctataacaagcttgaccgcggcttcttcccaacggaaggttcgcgcgtcaacctgaacggtaaggtgaccattccgggctcagataacgagtactacaaagcgacgctggataccgcgacctacgtgccgatcgacaacgatcatcagtgggtagtactgggtcgtacgcgctttggttatggcgatggtatcggcggcaaagagatgccgttctatgagaacttctatgccggtggttccagcaccgtgcgtggcttccagtcgaacaccattggtccgaaggcggtgtacttcccggcaagcagtcgtcatgatgatgacgatagttacgataatgaatgtaagagcaccgaatccgcaccgtgtaaatccgatgatgcggtgggcggtaacgcgatggcggtggccagccttgagctgattaccccgacgccgtttattagtgacaaatatgcgaactcggtccgtacttccgtcttctgggatatgggtaccgtatgggatactcactgggattcgagcgcgtacgctggttatccggattacagcgatccgagcaacatccgtatgtctgcgggtattgccgtgcagtggatgtcgccgttggggccgttggtcttctcctacgcccaaccgttcaaaaagtacgatggagacaaagccgaacagttccagtttaacattggtaaaacttggtaa

SEQ ID NO: 134962 - DNA, 1353 bp, Enterobacter cloacae
atgctgagcgtgctctggaatctggcggcttttatcattgcgcttggcgtactgattacggtgcatgagtttggccatttttgggtggcgcgccgctgcggtatccgggttgagcgtttttctatcggcttcggcaaagcgctgtggcggcggatggataagcagggcacagagttcgtcatcgccctgatcccactgggcggctacgtcaagatgctggatgagcgtgttgaagcggtggcgccggagatgcgtcattatgccttcaacaataaaaccgtcggtcagcgtgcggcggtgattgccgccggccccatcgctaacttcattttcgctatctttgcttactggctggtctttatcatcggcgttcccggcgtgcggccggtggtgggtgaaataacgcccaattcggttgccgcgcaagcacaaattgcaaaaggaacggaacttaaagcgatagatggtatcgaaacgcctgattgggatgcggtgcgtctgcagctggtggccaaaatcggcaacccgcaaacaatagttaccgtcgcccctttcgggaccaatcagcgccaggataaaatcgtcgatctgcggcactggtcgtttgagccagacaagcaagatcccgtgacctcgctggggatccagccgcgcagcgcgcagattgatacggtgctggctgaggttcaggcgggatcggcagcccagaaagcgggtttgcaagcgggcgaccggatcgttaaagtcgatggtcaaccgttaacgcagtggatgacgtttgttaatctggtgcgcgataatccgggcaaagcgctggcgctggagattgaacggcaggggagtgcgctgccgttaaccctgacgccggatgcgaaaacggtgaaaggtaaggcggaagggttcgcaggggtggtgccaaaggtcatcccgctgcctgaagaatacaagacagtacgtcagtacggaccgtttgccgccatcgctgaagccacggataaaacctggcagctgatgtcgctgacggtcaggatgctgggtaaattgataaccggtgatgtcaaactgaacaacctcagtgggccgatctctatcgctcagggggctggaatgtcagcggagtttgggttgatttattatctgatgttcctggcgctgattagcgtgaacctcggaatcatcaacctgttccctctacccgtactggatgggggacatctgctgtttttagcgattgaaaagctgaagggcgggccggtatccgagcgagttcaagactttagttatcgcattggctcaatactgctggtgctgttaatggggcttgcacttttcaatgatttctctcggttataa

SEQ ID NO: 134963 - DNA, 783 bp, Enterobacter cloacae
atgggctttgctatcgtcaccctggtggtctgtatgctcgccgcctgggagtggggacaactgagcggttttacctcgacgtcgcagcgggtttggctggcggtgctgtgcggccttctgctggcggcgatgctttttctgctgcctgaataccactatgacgttcatcaaccgatggttgaagggtcgctatgggcctcttttgcctggtggatcgtcgcgttactgctggtgctctcatacccggcgtcggcggcattctggcgccactctaaggtgctgcgcctcatcttcggcattctgaccatcgtcccgtttttctggggcatgctggcgctgcgtgcctggcactatgccgataaccactacagcggcgcgctgtggctgctgtacgtcatgatcctggtgtggggcgcagactctggcgcctatatgtttggtaaaatgtttggcaagcacaagctggcgccgaaggtctcaccgggtaaaacctggcagggcttttttggcggtttgctgaccgcggcagtgatttcctgggcctacggcgtgtgggcccatcttgacgtcacgccgacggtgctgctggtctgttcggtggtggcggccctggcttcggtgctgggcgacctgacggaaagtatgtttaagcgcgaggccggcattaaggatagcgggcacttgattcccggacatggtggtattctcgatcgtatcgacagcctgacggcggcggtaccggtcttcgcctgtctgctactgttggtcttcaggacgatttga

SEQ ID NO: 134964 - DNA, 777 bp, Enterobacter cloacae
atggacttaaaacgcgtgatgttgtctgctaatcaaactgtcagcgaaatatcgcccacccatggctgccgtcatgtcgccattattatggatggcaacggccgttgggcgaaacggcaaggtaaaattcgcgctttcgggcataaggccggtgcgaaatccgtgcgtcgcgcggtctccttcgcggcgaataatgggattgaggcgttaacgttatacgcgttcagcagcgaaaactggaaccgtccggctcaggaagtcagtgcgctgatggaactgttcgtctgggcgctggatagcgaagtcaaaagcctgcaccgacacaatgtgcgtctgcggattattggcgacaccacgcgcttcaatgcgcgcctgcaggagcggatccgcaaagcggaagcgctaaccgcaaacaataccggcttaacgctgaatattgcagccaattacggcggtcgctgggatattacccagggcgttcgtttgctggcgaaacaggtacaggacgggacgctgctgcctgagcagatcacggaagacatgctgagtcagcaggtctgcatgcatgaactggctcccgttgatttagttattaggaccgggggagagcaccgaataagtaactttctgatttggcaaattgcctatgccgaactttactttacggatgttctttggcccgattttgctgaacaggactttgaaggtgcactccatgcctttgttaatcgagagcgtcgtttcggcggcactgagccgggtggcagtcatgcctga

SEQ ID NO: 134965 - DNA, 1203 bp, Enterobacter cloacae
atgaagcaattaaccgttctcggttcgaccggctccattggctgtagcacgctggacgtggtgcgccataaccctggtcgcttttccgtcgccgcgctggtcgcggggaaaaacgttgaccgtatggttgaacaatgcctggaatttaccccccgttacgcggtgatggacgatgcgcaaagcgctgagtggttgcgcacccgtctgcatgagcatggctgtcgcaccgaggtgctaagcggccagcaggcggcggccgaggtcgcggcgctggatgaggtcgatcaggtcatggcggcaatcgtcggcgcggcgggactggtgccgacgctggcggcgatccgcgccgggaaaacggtattgttagcgaataaagaatcgctggtgacctgcggtcgcttattcatggaggcggtgcaacagtcgggggcgcgattgctaccggtcgatagcgagcataacgctatttttcagagtatgccggagacaattcagcagcatctgggatacgctgatcttgcccggaacggcgtctcgtctatcctgctgaccggctccggtgggcctttccgcgagacggccgtggctgaactggcggcgatgaccccagatcaggcctgccgtcatcccaactggtcgatggggcgcaagatctccgtcgattcggccacgatgatgaacaaaggcctggaatatattgaagcgcgctggctgtttaacgcctcggcccagcagatggaagtgctgatccatccgcagtcggtgatccactcgatggttcgctatcaggatggcagcgtgctggcccagcttggggagccggatatgcgcacgccgatcgcccataccatgggctggccgcagcgactgaattccggcgttaaaccgctggacttctgtcagttgagcaatctgagcttctccgcgccggactatacgcgatatccgtgcctgaagctggcgatggacgcgtttgacgtcggccaggccgcgaccacgacgctgaatgcggctaatgaagagtcggttgccgcgtttctgcatggcgatatccgctttaccgatattgcggcggttaacctggcggtgctggataagatggacctgcaggagccgcaaagcattgatgatgttctggttatcgacgccgaggcgcgcgcaatcgctcaccagcagctgcagcggttggttgcgcaggcgtaa

SEQ ID NO: 134966 - DNA, 558 bp, Enterobacter cloacae
gtgattagcgatatcagaaaagatgctgaaatccgcatggaaaaatgcgtcgaagcattcaaaaaccaaatcagcaaaattcgcacgggtcgtgcttctccgagcctgctggacgggattgttgttgaatactacggtactccgaccccgctgcgccagctggccagcgtcaccgtcgaagactcccgtaccctgaaaatcaacgtctttgaccgttctatgtccgcggccgttgaaaaagcgatcatggcgtcagacctcggtctgaacccaagctctgccggcagcgatattcgtgtcccgctgccgccgctgaccgaagagcgtcgtaaagatctgaccaagatcgtgcgtggtgaagccgagcaggcgcgcgttgccgtgcgtaacgttcgccgtgacgccaacgataaagtcaaagcgctgctgaaagaaaaagagatcagcgaagatgacgatcgccgttctcaggacgacgtgcagaaaatgactgacgccgccatcaaaaaagttgacgcggcgctggcagacaaagaagcggaactgatgcagttctaa

SEQ ID NO: 134967 - DNA, 726 bp, Enterobacter cloacae
atggctaccaatgcaaaacccgtctacaaacgtattctgctgaaattaagtggcgaagcgctgcagggctcagaaggcttcggtattgatgcaagcatacttgaccgcatggctcaggagatcaaagagctggttgagctgggtattcaggttggcgtagtaattggtggcggtaacctgttccgtggtgctggtctggcgaaagcgggtatgaaccgcgttgtgggcgaccacatgggcatgctggcaacggtcatgaacggcctggcaatgcgtgatgcgctccaccgcgcctatgtgaacgctcgtctgatgtccgccatcccgctgaacggcgtatgcgacaactacagctgggcagaggcaatcagcctgctgcgcaacaaccgcgtagtgatcctctccgctggtaccggcaacccgttctttaccaccgattccgcagcctgcctgcgcggtatcgaaattgaagccgatgtggtgctgaaagccaccaaggttgacggcgtattcaccgctgacccggcaaaagatccttctgccaccatgtacgatcagctgacctacagcgaagttctggaaaaagagctgaaagtcatggatctggcggccttcaccctggcgcgtgaccataaattaccgattcgcgtcttcaacatgaacaaacctggcgccctgcgtcgcgtggtgatgggcgaaaaagaaggcacattgatcacggaataa

SEQ ID NO: 134968 - DNA, 852 bp, Enterobacter cloacae
atggctgaaattaccgcttccctggtaaaagagctgcgcgaacgtactggcgcaggcatgatggattgcaaaaaagcgctgactgaagcgaatggcgacatcgagctggcaatcgaaaacatgcgtaaatccggcgcgatcaaagcggcgaagaaagcaggcaacgtggctgctgacggcgtgatcaaaaccaaaatcgaaggcaactacggttacattctggaagttaactgccagactgacttcgttgctaaagatggtggtttccaggcatttgccgacaaagtactggacgccgctgttgcaggtaaaatctccgacgttgaagttctgaaagcgcagttcgaagaagaacgtgttgcgctggttgctaaaatcggcgagaacatcaacatccgtcgtatcgctgttctggaaggcgacgttctgggtagctaccagcacggtgcgcgtatcggcgttctggttgccgctaaaggcgctgacgaagagctggttaagcagctggcaatgcacgttgctgcaagcaagccggaattcgttaagccggaagacgtgtctgctgaagtggtagagaaagagtaccaggttcagctggacatcgcgatgcagtccggtaagccgaaagaaatcgcagagaaaatggttgaaggccgcatgaagaaattcaccggcgaagtttctctgactggtcagcctttcgttatggagccgagcaaatctgttggccagctgctgaaagagcacaacgctgacgtgactggcttcatccgctttgaagtgggcgaaggcattgagaaagttgagactgactttgcagcagaagttgctgcgatgtccaagcagtcttaa

SEQ ID NO: 134969 - DNA, 726 bp, Enterobacter cloacae
atggcaactgtttccatgcgcgacatgctcaaggctggtgttcacttcggtcaccagacccgttactggaacccgaaaatgaagcctttcatcttcggcgcgcgtaacaaagttcacatcatcaaccttgagaaaaccgtaccgatgttcaacgaagctctggctgaactgaacaagatcgctgctcgtaaaggtaaaatccttttcgttggtactaagcgcgctgcaagcgaagcggtaaaagacgctgctctgagctgcgatcagttcttcgtgaaccatcgctggctgggcggtatgctgactaactggaaaaccgttcgtcagtccatcaaacgtctgaaagacctggaaactcagtcccaggacggtactttcgacaagctgaccaagaaagaagcgctgatgcgcactcgtgagctggacaagctggaaaacagcctgggcggtatcaaagatatgggcggcctgccggacgcactgttcgttatcgacgctgaccacgagcacatcgctatcaaagaagcaaacaacctgggcatcccggtatttgctatcgttgataccaactctgatccggacggcgtagacttcgttatcccgggtaacgacgatgcaatccgcgcagtaagcctgtacctgggcgctgttgctgctaccgttcgtgaaggtcgctctcaggacctggcttctcaggcggaagaaagcttcgtagaagctgaataa

SEQ ID NO: 134970 - DNA, 795 bp, Enterobacter cloacae
atggctatctctattaagacatctgaagacatcgaaaaaatgcgcgttgccggccgcctggccgccgaagtgctggaaatgatcgaaccctacgtcaaaccgggcgtcagcaccggcgaactggaccgcatctgtaacgactatatcgttaacgagcagaaggccatttccgcctgcctcggctatcacggctatccgaaatccgtctgcatttcggtcaatgaagtggtctgtcacggtatccctgatgacggcaagctgctgaaagatggcgatatcgtgaatatcgacgtgaccgtcattaaagatgatttccatggcgatacctccaaaatgtttatcgttggcaaaccgacgattctcggcgagcgcctgtgccgcatcactcaggaaagcctgtacctggcgctgagaatggtgaagccaggcatcaacctgcgcaccatcggcgcggcgatccagaaatttgtggaagccgaaggtttctccgtggttcgcgagtactgtggccacggcatcggccgcggcttccatgaagaacctcaggtgctgcactacgattcgccggagaccaacgtcgtactcaaaccaggcatgaccttcaccatcgagccgatggtcaacgccggtaaaaaagagatccgcagcatgaaagacggctggacggtgaaaaccaaagaccggagcttgtctgcgcagtacgagcatactattgtggtgacagacaacggctgcgaaattctgacgctacgcaaggatgacaccatcccggcgataatctcgcacgatgaatga

SEQ ID NO: 134971 - DNA, 2664 bp, Enterobacter cloacae
atgagcaactcattacctgacacagcctcccctctcctgcccgtcccgccagaacacccggtgagctggccgcagggcgatctgaactgtgccgcaatcaaggcgcacatcgataccttccagcactggctgggcgaggcgtttgactccggcatcgtcgcggagcagctcatcgcggcgcgcaccgaatttatcgaccagttgctgcagcgattatggatcgcctgcggttttgaatctgtcagcgacctggcgctggtcgccgtcggcggctatggccgtggcgaactgcacccgctctcagacgtcgatctgctgatcctcagtcgtaaaaaactgccggacgaccaggcgcaaaaagtcggcgaactgctcaccctgctgtgggacgtcaagctggaggtgggccacagcgtacgcaccctcgaagagtgcctgctggaaggtctctcggatctgaccgttgccaccaacttaatcgaatcgcgcctgctgatcggcgacgtcgcgctgttccttgaactgcaaaaacatatttttagcgacggcttctggccatcggaaaagttcttcgccgccaaggtcgaagagcagaacgtccgtcatcagcgctatcatggcaccagctataacctcgagccggacgtgaaaagcagccccggcggcttgcgcgatatccatacgctacagtgggtggctcgccgccatttcggcgccacctcaatggatgagatggtcggcttcggctttctgaccgaagccgagcgcaatgaactcaatgagtgtctgcatcagctgtggcgcatccgtttcgcgctgcatcttgaactcacgcgctatgacaaccgtctgcttttcgaccgccagctcagcgtggcccgccggctaggctatgaaggcgacggcaaccagccgattgaacacatgatgaaggacttcttccgcgttacccgccgggtgagcgagctgaatcagatgctgcttcagctgtttgaggaggctatcctcgccctgaccgaggatgaaaagccacgcccgatcgatgatgatttccagctgcgcggcacccttatcgatctgcgtgacgacacgctgtttattcgcgaaccgcaggccattctgcgcatgttttatatcatggtgcgcaatagcaccatcaccggcatctactcaacgacgttgcgccatctgcgccacgcccgccgtcatctcacccagccgctgtgctatatcccggaggcgcgcacgctctttcttagtatgctgcgccatcagggggcggtaagtcgcgggctgctgccgatgcatcgccacagcgtactgtgggcctatatgccgcagtggtcgcatatcgtcggccagatgcagttcgacctgtttcacgcctacaccgtcgatgaacacaccgtccgggtgatgctcaagctggaaagctttgccaaagaagaaacccgcagccgccacccgctgtgcgtggagctgtggccgcgcttaacgcacccggagctgatcttaattgctgccctgttccacgacatcgccaaagggcgcggcggcgaccactcgatcctcggcgcgcaggatgtgctgaagtttgccgagctgcacgggctgaactcgcgcgaaacgcagctggtcgcctggctggtgcgtcaccacctgctgatgtcggtcaccgcccagcggcgcgatattcaggatccggaggtgattaagcagttcgccgaggaggtgcaaacggaaaatcgtctgcgctatctggtgtgtctgaccgtcgccgatatctgcgccaccaacgaaaccttatggaacagctggaagcagagcctgctgcgtgaactctatttcgccaccgagaagcagctgcgtcgcggcatgcaaagcaccccggacatgcgcgaacgagtgcgtcaccatcagctgcaggcgctggccctgctgcggatggacaatattaatgaagaggcactgcatcagatctggaaccgctgccgcgccaactatttcgtgcgacatacgccgacgcagctcgcctggcacgcccgcaacctgctgcgccacgatctgaataaaccgatgatcctgctgagctcgcaggccacccgcggcggtacggagatttttatctggagcccggatcgtccttacctgttcgccgcggtgtgtggcgaacttgaccgtcgcaacctcagcgtccacgacgcgcagatcttcaccacccgcgacggtatggcgatggatacctttatcgtccttgagcccgacggcagccccctttccgccgaccgccacgaggcgatccgccaggggctggagcagaccatcactcagcgcagctggcagcctccggccccgcgtcgtcaggcggcaaagctacgccatttttccgtggacaccgaggtgaatttcctgccgacccataccgaccgaaaatcgtttctggagctgatagcgctcgaccagcccgggctgctcgcccgcgtcgggcaggtgttcgccgacctcgggatatcgcttcacggggcgcgaattacgacaattggtgagcgagtagaagatttatttataatcgccaccgccgaccggcgtgcccttaataatgagctgcaacaagaagtgcaacaacggttgacagcggccctcaatccaaacgataaagggtga

SEQ ID NO: 134972 - DNA, 825 bp, Enterobacter cloacae
atgcagcagttacagaacgttattgagtccgctttcgagcgtcgcgccgacattacgccggctaatgtggataccgtgacccgcgaagcggttaaccaggttatcacccttcttgattccggcgcgctgcgcgtcgctgagaagatcgacggtcagtgggtgacgcatcagtggctgaagaaggcggtactgctctctttccgtattaacgataaccaggttatcgatggtgcggaaagccgctacttcgataaagtgccgatgaaattcgctgactacgacgaagcgcgtttccagaaagaaggtttccgcgtggtgccgccggccgccgtgcgccagggcgcgttcatcgcccgcaacactgtgctgatgccgtcctacgttaacatcggcgcctacgttgacgaaggcaccatggttgatacctgggccaccgtcggctcctgcgcgcagatcggtaaaaacgtgcatctgtccggcggtgtcggcatcggtggcgtactggagccgctgcaggcgaacccgaccatcatcgaagataactgcttcatcggcgcgcgctctgaagtggttgaaggggtgattgtcgaagaaggctccgtcatctccatgggcgtttacctcggtcagagcaccaaaatctacgatcgcgaaaccggcgaagtcttctacggccgcgtaccggctggctcggtggtggtctcaggcaacctgccgtcgaaagatggtaaatacagcctgtactgcgcggtgattgtgaagaaagtcgatgccaaaacccgcggcaaggtcggcattaacgaactgctgcgcaccatcgactaa

SEQ ID NO: 134973 - DNA, 387 bp, Enterobacter cloacae
atgtacgataatctgaaaagtcttggcattaccaaccctgatgagatcgatcgctatagcctgcggcaggaagctaacaacgacattctgaaaatctattttcagaaagacaaaggcgaattcttcgccaagagcgtgaagttcaaatatccgcgtcagcgcaaaaccgtcgtcgccgacggcgtcggccagggctacaaagaggtccaggagatcagccccaatctgcgctacgttatcgacgagctggatcagatctgccagcgcgatcgcactgaaatcgatctcaagcgtaaaatcctcgacgatttacgccatctggaaagcgtggtcaccaataagatcagcgaaatcgaagccgatctggaaaagctcacccgtaagtaa

SEQ ID NO: 134974 - DNA, 1212 bp, Enterobacter cloacae
atgcagcgcgacgatgactcttttatgctggtgcccagcaaaggggaggactacatggctggctggcatcttgataccaaaatggcgcaggatattgtggcgcggaccatgcgcatcatcgataccaatatcaacgtgatggatgcccgcgggcggatcatcggcagcggcgatcgggaaaggattggtgaattgcacgaaggcgcgctgctggtcctctcccaggggcgggtggtggatatcgacgacgcggtcgctcgccatctgcacggggttcgccaggggattaacctgccgctgcgcctggagggggagatcgtcggggtgatcggcctgaccggcgagccggagtcgctgcgaaaatatggcgagctggtgtgcatgacagcagagatgatgctggagcagtcgcggctgatgcatctcctggcccaggacagccgtctgcgcgaagagctggtgatgaacctgattcaggcggaagagcataccccggcgctgaacgaatgggctcagcgtttaggcatcgatctcaatcagccgcgcgtggtggcgatgattgaggtagacagcggtcagctcggcgtggacagcgcgatggcggaactgcaacagttacagaacgcgctgaccacccccgatcgcaataatctggtggccattgtctcgctcacggaaatggtggtgctgaaaccggcgctgaacagctttggccgctgggacgctgacgatcacgtccggcgcgtcgagcagcttatcgccaggatgaaagagaatggccagctgcgctttcgcgtggcgctgggcaacttcttcaccggcccaggaagtatcgcccgctcttaccgtaccgcacggacgacgatgatggttggcaagcagcggatgccggagagccgcagttatttctatcaggatctgatgctgccggtgctgcttgacagcctgcgcggcggctggcaggccaatgagctggcccgtccgctggcgcgtttgaaggccatggacaacaacgggctgctgcggcggacgctgcaggcgtggtttcgccataacgtgcagccgctggcgacgtcaaaggcgctgtttattcatcgcaatacgctggagtaccggttgaaccgtatctcggagctgaccggcctggatctcggtagctttgacgacaggctgctgctgtatatcgcgctgcagctggacgaacaacgctaa

SEQ ID NO: 134975 - DNA, 1434 bp, Enterobacter cloacae
atgaaaaaaaccacgttagcaatgagtgcactggctctgagtttaggtctggcgttgtccccgctctctgcgagcgcggcagaaacggcatcttcggccactaatgcacagcagatgccaagcctggccccgatgctggagaaggtgatgccgtcggtggtgagcattaacgttgaaggtagcaccaccgttaataccccacggatgccacgtaacttccagcagttctttggcgataattcgccgttctgccaggatggttctcctttccagagttcgccgttttgccagggcggcggacagggcggtcagcctgacggcggccagcagcagaaatttatggcgctgggctccggcgtcatcattgatgccgccaaagggtatgtggtgaccaacaaccacgtcgtggacaacgccaccacgattaaggttcagctgagcgatggccgtaagtttgatgccaaagtcgtcggcaaagatccgcgctctgatatcgcgctgattcagattcaggatccaaaaaacctgacggcgattaagcttgccgactccgatgcgctgcgcgtcggtgattacaccgtggctatcggcaacccgttcggtctgggcgaaaccgtgacctccgggattgtctccgcgctgggccgtagcggcctcaacgtggaaaactacgaaaactttatccagaccgatgcggcgattaaccgcgggaactccggcggtgcgctggtgaacctcaacggcgagctgatcggtatcaacaccgccattctggcgccggacggcggcaacatcggtatcggttttgctatcccgagcaacatggtgaaaaacctgaccgagcagatggtgaaatatggccaggtgaaacgcggtgagctcggcattatgggcaccgaactgaactctgagctggcgaaagcgatgaaagtcgatgcccagcgcggggccttcgtcagccaggtaatgccaggttcggcggccgcgaaagcgggcattaaagccggcgatgtcatcacctccctcaacgggaaagcgatcagcagcttcgccgcgctgcgtgcccaggtcggcaccatgcctatcggcagcaaagttgagcttggtctgctgcgcgacggcaaaccggtgaccgtgaccgtcgaactgcagcagagcaaccagacccaggttgactccagcaccatcttcaacgggattgaaggggcggaaatgagcaataagggtcaggataagggcgtggtggtcaataatgtgaaagccggtaccccggcggcacagattggcctcaagaaaggcgacgtcatcgtcggggcgaatcagcagccggtgaaaaacatcgccgatctgcggaaaatcttcgacgccaaaccgtccgtactggcgctgaacattcagcgcggcgacgcctctatctatctgctgttgcagtaa

SEQ ID NO: 134976 - DNA, 1515 bp, Enterobacter cloacae
atggcaaagattgattttcgcaacaagataaactggcgtcgacgcttccgttcgccgccgcgggtggagacggagcgcgacatcctgcggatctttgaaagcgatcggggacggatcgtcaactcgccggcaatccgccgcctgcagcaaaaaactcaggtcttcccgctcgagcgcaacgcggcggtgcgcactcgcctgacccactcgctggaggtgcagcaggtggggcgctatatcgccaaagaggtgctgagccggctgaaagagctgaggctgctggaagagtatggcctggaagagctgaccgggccattcgagagcgtggtggagatggcctgcctgatgcacgatatcggcaatcccccgtttggccattttggcgaagcggcgattaacgactggttccgtcagcgcctggcgcccggcgatgcgctcgggcagccgctgaccgacgatcgctgcgaagtgcaggccttacgcctgcatgacggagagacatcgcttaatgcgctgcgccgtaaagtgcgccaggatctctgcagctttgagggcaacgcgcagggcattcgtctggtccatacgctaatgcgtatgaacctgacctgggcgcaggtgggatgtatcctgaaatatactcgtccggcgtggtggtctgaggagacgccggccagccacagttatttaatgaagaaacctggctattatttagccgaagaagagtatgttgcgcgtttgcgtaaagaactggatctcgcgccttacaatcggtttccattaacctggattatggaggctgcggatgacatctcatattgcgtcgcggatctcgaggacgcggtggaaaaacgtatttttagcgcagaacagctctatcagcatctttacgacgcctggggcagtcatgaaaaaggctcgttattttcgcaggtagtagaaaatgcctgggagaaatcgcgagccaattatctgaagcagagcgcggaagatcagttttttatgtatttgcgggtgaatacgctgaataagctggtgccctacgcggcgcgccgatttattgacaacctaccggcaatcttcacaggggactttaatcatgcgttgctggaggacgacagcgattgcagtcagctactggagctctataaaaatgtggcgatgaaacaggtctttagccatccggatgttgagcagctggaattgcagggctaccgggtgatcagcggcctgttggatatctatcagccgctgctgaaattatcgctggaggatttcagcgaattagtagcgcaggagcgggtacggcgtttacccattgcctcccggctgtatcagaaactttcgacccgtcaccggctggcctatgttgaagcggtaaataagctggcgcgtacggcgcccgaatttgcgctgatggaatactattatcgctgccgtctgattcaggactatatcagcgggatgacggatttgtatgcgtgggatgaatatcggcgactcatggcggtggaatag

SEQ ID NO: 134977 - DNA, 699 bp, Enterobacter cloacae
atgaaaattggcattattggcgctatggaagaggaagttacccttctgcgcgacaaaatcgaaaaccgccagaccatcaccattggcggaagcgaaatctataccggccaacttcacggcgttgacgtcgctctgctgaagtctggtatcggaaaagtagcggcggcgatgggcgcgaccctgctgctggagcgctgccagcctgacgtgatcattaataccggttctgccggcggcctggcgtcgacgctgaaggtcggcgatatcgtcgtctccgatgaagcgcgctaccacgacgccgacgtcaccgccttcggctatgaatacggccagctccctggctgcccggcgggttttaaggcggatgaaaaactggtggccgccgcagagagctgcattaaagcgttagatctcaacgccgttcgcggcctcatcgttagcggggatgccttcattaacggctctgtcggtctggcgaagatccgccataatttcccgcaggcgatcgccgtggaaatggaagcgaccgccatcgcccacgtctgccataactttaaggttcccttcgtggtggttcgcgctatctccgacgtggccgaccagcagtcccacctcagctttgaggagttccttgcggtcgccgccagacagtccaccctgatggtggagaatctggtacagaacctggcacgtggctaa

SEQ ID NO: 134978 - DNA, 801 bp, Enterobacter cloacae
gtggctaagtcgctatccttcgcgcttgccgcgctgctgttactcgccccggcgtggctgctggccgcgccgcgggtgatcaccctctcccccgccaataccgaactggcctttgccgccgggatcacgccggtcggcgtcagcagctattccgattatccttcgcaggccaaaacgatcgaacaggttgccagctggcagggaatgaacctggaacgcatcgtggcgctcaagccagacgtggtgctggcctggcgcgggggcaatgccgaacgccaggttaaccagctgcagtctctgggtattcatgtcctgtgggtacagacctcgaccatagaagagatcatcgctaccctgcgtgagctggcgcagtggagcccgcagccggaaaaagcacagcaggcggcgcaggcgatgcagcaggaatacgatgcgttgaaagcgcgctatgccaacgcgccgaagaaacgcgtcttcctgcagttcggctccgcaccgctgttcaccagcggccccggttcgattcaggatcaggtgctaaggctttgcggcggcgagaatatcttcgccaccagtcgcgttccctggccgcaggtgagccgcgaacaggtgctggcccgccagccgcaggcgatcgtggtgaccggggatgccagccgcattgccgaagcgcagcgcttttggcaacatcagctcaccatttcgttgattgcgttacacagcgactggtttgaacgcgccggcccacgtattatcctcgccgccaaacaactttgtgcggcgcttgaccaggtaaaataa

SEQ ID NO: 134979 - DNA, 624 bp, Enterobacter cloacae
atgcttgtctattggctggatattattggcacagctgtcttcgcgatctccggcgtactgctggccggaaaactgcgtatggacccattcggcgtgctggtgttaggggtagtgacggcggtaggcggcgggaccatccgcgacatggcgctggcgaatggcccggtattctgggtcaaagatcccaccgatctggtggtggcgatggtcaccagcatgctgaccatcctgctggtccgccagcctcgccggctgccgaaatggctcctgcccgttcttgatgccgtcggtctggcggtgtttgtcggcattggcgtcaataaagcttttctcgctggcagcggcccgctggtcgcggtgtgcatgggggtggtgaccggcgtcggcggcgggattattcgcgacgtgctggcgcgggaaattcctatgattctgcgtaccgaaatctacgccaccgcctgtatcgtcggcggtattgtccacgccacggcacacgacacctttcatctcccgctggagaattcggcaatgatggggatggtggtcaccctggtaattcgtctggcggctattcgctggcatctgaagctgccgacgtttgccctggacgataacggtcggtaa

SEQ ID NO: 134980 - DNA, 345 bp, Enterobacter cloacae
atgagtgatgacgtagcgttgccgctggagtttaccgaagccgcagccaataaagtaaaacacctgattgcggatgaagataatccgaacttgaaactgcgcgtgtatatcaccggcggcggttgcagcggtttccagtatggcttcacctttgacgatcaggtgaacgaaggggatatgaccattgagaaacagggcgtcggcctggtggttgacccgatgagcctgcagtatctggtcggcggctcggtcgactataccgaagggctggaaggttcgcgctttatcgtgaccaatccgaacgcgaaaagcacctgcggctgcggctcctcgttcagcgtttaa

SEQ ID NO: 134981 - DNA, 1512 bp, Enterobacter cloacae
atgtgccgcaagggcatttttttgacgacgcagcgcgccgggacggctaaaatgccgctctcttcatttgtattaccaataattgataacggcatgaaagcagaaactccctcttttgaagcacatcagtttgtgcgggtgcgtcgcggcgatgcggtgcgccgtctgattcaacgcgataaaacgccgctggcggtgctgtttatggcggcagtggtcggcacgctggcggggctggtgggcgtcgcctttgaaaagagcgtgaactgggtgcagaaccagcggatcggcgcgctggcgcaggtggcggaccactggtatctggtctggccgctggcgtttatcctgtcggcgctgctggcgatggtcggctattttctggtgcgtcgttttgcgccggaggccggcggctccgggattccggaaattgagggcgcgctggaggagctgcggccggtgcgctggtggcgcgtgctgccggtgaaattcgttggcggcatggggacccttggcgccgggatggtgctgggtcgtgaaggaccgatggtacagcttggcggcaacattgggcgcatggtgctggacgttttccgcatgcgcagtccggaagcgcggcatacgctgttggcgaccggtgcggcgtcggggctttcggcggcctttaatgcgccgctggccggtattctgtttatcatcgaagagatgcgcccgcagttccgctacaacctaatctccattaaagcggtgtttaccggcgtgatcatgtcgagcattgtgtttcgcattttcaacggcgaagcggcgatcattgaggtgggtaaactaagcaacgccccggtaaataccctatggctgtatctggtgctgggcatgctgtttggctgctttggcccgctgtttaattttctggtgctgcgcactcaggatctgttccagcgcatccacggcggcaacatcaaaaaatgggtgttgattggcggattaatcggcgggctctgcggtctgctggggctgatgcagccctccgcggtgggtggtggctttaacttgatccctatcgccgctgccggtaacttctccgtcggactgctgctgtttatctttattgcccgcgtggtgaccacgctgatctgcttctcttccggcgcgccagggggcattttcgcgcctatgttggcgctcggcacgctgctgggcacggcgttcggcatggcggctattccgctgtttccggcctaccatctcgatgccggcaccttcgcgattgccggtatgggggcgctgctcgccgcctcggtgcgtgcgccgctgaccgggatcgtgctggtgcttgagatgaccgataactatcagctcattttgccaatgattattacctgccttggcgcaacactactggcgcaattcctcggcggtaagcctttgtattcgaccattctgcagcgtactctggcgaagcaggaagccgagcaggcggcaaaagcgcagcaggctccccgggagaatacttga

SEQ ID NO: 134982 - DNA, 1281 bp, Enterobacter cloacae
atgagcaaatctgaaaatctgtaccacgctgcgcgcgaactgatccccggcggcgttaactcgccggtgcgcgctttcaccggcgtcggcggcacaccgctgtttatcgaacgcgcggatggcgcttacctctatgacgtggatgggaaagcctatatcgattatgtcggttcctggggtccgatggtgctgggccacaaccacccggctatccgcaatgcggtgatcgaggcggcatcccgcggcctgagctttggcgcgccgaccgaaatggaagtgaaaatggcggccctggtgaccgagctggtgccgaccatggatatggtgcggatggtgaactccggtaccgaagccaccatgagcgccattcgcctggcgcgcggcttcaccgggcgcgacaaaatcattaagttcgaaggctgctaccacggccatgccgactgcctgctggtgaaagccggttccggcgcgttgaccctcggccagccgaactcgccgggcgtcccggccgatttcgccaaacataccctgacctgcacttataacgacctcgcctcggtgcgcgcggcgttcgagcagtatccgcaggagatcgcctgcatcatcgtcgagccggtggccggaaatatgaactgcattccgccgcagccggaattcctgccgggcctgcgcgccctgtgcgacgaatttggcgccctgctgattatcgacgaagtgatgaccggcttccgcgtggcgctggcaggcgctcaggcttactacggcgtggagccggatctgacctgtctggggaaaatcatcggcggcgggatgccggtaggcgccttcggcggccgccgtgaggtaatggacgctctggcgcccaccggtccggtctatcaggcgggcaccctctccggcaacccgatcgccatggcggctggcttcgcctgcctgaacgaagtggcgcagccgggggtccatgaaaccctgactgaactgactaaccagctggcgcaaggcctgctggacgcggcgcgtgacgccgggatcccgctggtggtcaataacgtcggcggcatgttcggcatcttctttaccgatgccgaaaccgtcacctgctatcaggacgtggtgaagtgcgacgttgaacgattcaagcgcttcttccatctgatgctggaggaaggcgtgtacctggcgccgtcagcgtttgaggccggctttatgtccgtggcccacagcgaagaagatatcgacaacaccatcgacgccgcgcgtcgggtatttgccaagctgtaa

SEQ ID NO: 134983 - DNA, 1983 bp, Enterobacter cloacae
atgaatacgcgtctctcgccgttagctattatcctgctggccgggctgctgggcgtcgccttcgcgctgagcatcgtcaacctcaatgtcgccttgccctatgcgcagtggcggcaggcgctgtggcagccggatgtcgatgatattgcccaaatgctgtttcattacagtttgttaccgagactggctgttgcgctgctggtgggggccgggctgggactggttggcgtcctgttccagcaggtgctgcgtaatccgctggcggaaccgaccacccttggcgtcgccaccggcgcgcagctggggataacggtcaccacgttatgggctattcccggcgtgctggcgtcgcaattcgccgcgctggccggggcctgtctggtgggcgcgctggtgtttggcgtctcgtggggtaagcgcctgtcgccggtaacgctgatcctggcggggctggtggtcagcctttactgtggcgcgcttaaccagctgatggtgattttccatcacgaccagctgcaaagcatgttcctgtggagcaccgggacgctgacgcagaccgactggagcgtagcgcagcgcctgtggccgcagctgcttggcggggcaatactcaccttgctgctgctgcggccgctgaccctgatggggctcgatgacggggtggcgcgtaacctcgggctggcgctgtccctggcgcgcctcggcgccctgacgctggcgatcgtcatcagcgcgctgctggtgaacgcggtagggattatcggctttatcggcctgttcgcgccgctgctggcgaaaatgcttggcgcccgtcggctgctggcgcggctgctgctggcggcgctgatcggcgcgctgctcctgtggctttccgatcaggtgatcctctggctgagccgggtatggcgggaagtctccaccggctcggtcaccgccctgattggcgcgccgctgctgctgtggctgctgccgcggttgcgcagcatcagcgccccggtgatgaacggcggcgataatgtgcagcctgagcgctatcatgtgcaatggtttgttctcgcaggcgtcgcgttgctgctgctggcggtgagcgtggcgctggcctttggtcgcgatgcccacggctggctgtgggcccacggcgatctgctggagcaactgctgccctggcgctggccgcgggtgctgtcggcgctgttcgccggggtcatgctggcggtcgccggctgtattatccagcgcctgaccggcaacccgatggccagcccggaagtgctgggcatcagctccggcgcggcttttggcgtggtgctgatgctgttcttcgtgcctggcgacgcctttggctggctgctgccggccggcagccttggcgcggcggccaccttgctgatcattatgctcgccgccgggcgcggcggcttctcgccgcatcggatgctgctggcggggatggcgctgagcaccgccttcactatgctgctgatgatgctgcaggccagcggcgatccgcgtatggcgcagatcctgacgtggatctcggggtcgacatatagcgcgacgccggagagggtggtgcgtagcggcgcggtaatgctggcgctgctggcgctggcgccgctctgtcgtcgctggttaaccatcctgccgctgggcggggaggcggcgcgagcggtgggcatggcgctgacgtcatcgcggattgttctgctgctgctggcggcctgcctgacggcggcggcgacgctgaccatcggcccgctgagctttgtcgggctgatggcgccgcatatcgcgcggatgatgggcttccggcgaaccctaccgcatatggtgatctccgggctgactggcgggctgctgctggtcttcgccgactggtgcggacggatgatgatgttcccgtatcagatcccggcggggctactgtcgacctttatcggcgcgccttactttatttatttgttgagaaagcagagtcgctaa

SEQ ID NO: 134984 - DNA, 357 bp, Enterobacter cloacae
atgatctctctgctcgatccccggcacgtgctggtgtttggcgaaaactgcctgttccaggaggtgcttgatcgcttcggtattaaaaacgcctggcacggcgaagcggcattctggggaagcgttagcgttggcatcgacaggctggcggcatttaacgaagccgatgtcatctgtttcgaccatggcaatgagcgagatatggctcaactgctggcgacgccgctctggcaggcgatgcccttcgtgcgcgcgggccgcttccagcgcgttccggcggtctggttctacggcgcgacgctgtcagcgatgcattttgcccgcgtgctggctgatgcccaggggagtccggcatga

SEQ ID NO: 134985 - DNA, 531 bp, Enterobacter cloacae
  misc_feature (490)..(499): n is a, c, g, or t
atgatgaacccaactctgataacccgacgccgcctgctgatcgcgatggcgctctcgccgctgctgtggcagatgcgcggcgcgcaggcggccgacgtcgacccgcagcgcgtggtcgccctggagtggctgcccgcggagctgctgctggcgctcggcgtgacgccctatggcgtggccgatattcccaactatcgcttgtgggtgaacgaacccgcgctgcccgactcggtgatcgatgttggtctgcgtaccgaacccaaccttgaactgctgacgcagatgaaaccgtcgtttatcgtctggtcggcgggctacggcccgtcgccggagaagctggcgcgtatcgcgcccggccgcggtttcaccttcagcgacggcaaacggccgctggcgatggcccagcgttcgctactggaaatggccgatctgctgggcaaaacgcagcaggcgaagcgccatctggcggagttcgacgcgctgatggagnnnnnnnnnnttttgccgggcgcggcgatcgtccgctgctga

SEQ ID NO: 134986 - DNA, 798 bp, Enterobacter cloacae
atgcaggaacagactccgcacgcagaaaccaccttcgcgctggatcgcgtcactttccgtgtgcctggccgcacattgctccatccgctctcgctcaccttcccgtccggaaaagtcacaggcctgatcggccataatggctccggcaagtcgacgttactgaaaatgcttgggcgtcatcagccgccctccgcaggcgaagtgctgctggacgggcagccgctggagagctggggcagcaaagcctttgcccgcaaagtggcctatctgccgcagcagctgccgccggccgaaggtatgacggtgcgcgagctggtggcgatcggccgctatccatggcacggcgcgctgggtcgctttggcgcagcggaccgtgagaaagtagaagaggcgattgcgctggtggggctgaagccgctcgctcatcgtctggtggacagcctctccggcggtgaacgccagcgggcgtggatcgccatgctggtggcgcaggacagtcgctgcctgctgctcgatgaacccacctcggcgctggatattgctcatcaagtcgatgttctggcgctggtgcatcgtctcagccagcagcgcggcctgacggtgatcgccgtcctgcacgatattaatatggcggcccgctattgcgactatctggtggccctgcgcggcggagaaatgattgctcaggggacgccggcggaactgatgcgcagcgacactctggaacagatctacggcatcccgatggggatcctgccacacccggccggtgcggcgccggtaagctttgtctattga

SEQ ID NO: 134987 - DNA, 2208 bp, Enterobacter cloacae
atggcgcgtccaaaaactgctcagccaaatcactcgctgcgtaaagtcgcagctgtagtagccacggcggttagcggcatgtctgtctacgcacaggcagcagaacaaccgaagcaagaagaaaccatcaccgtcgttgccgccccggccgcccaggaaagcgcctggggaccggcgccgactatcgcggcaaaacgctccgccacggcgaccaaaaccgataccccgattgaaaaaacgccgcagtctgtgtcggtggtgacgcgccaggagatggagatgcgccagccgacgacggtaaaagaggcgctctcctatacgccaagcgtcttctccactcgcggcagttcgaccacctatgacgtggtcaccattcgcggcttcaccacctcgacgaccgtcaacaccaaccagtatctggacggcatgaagctgcaggggaataactactctgaagtctccatggatccttacttcctcgagcgcgtggaagtgatgcgcgggccaacctcggtgctgtacggcaacagcaacccgggcggtatcgtcagcatggtcagcaagcgcccgactaccgagccgctgaaagaagtgcagtttaagatgggcaccgacaatctgtggcagaccgggtttgactttagcgacgccattgatgatgccggcgtttggtcgtatcgcctgaccggccttggccgcagtcaggatgcccagcagcagatggcgaaatcgactcgctacgcggtggcgccctcctttagctggcgtccggacgataaaaccgacttcaccttcctgagcaacttccagaatgacccggatgcgggctactacggctggctgccgcgcgaaggcaccgtggtgccgtattacgacgccaacggtaaggcgcacaagctgccgaccgatttcaacgaaggcgagtccgataataaaatctcccgccgccagaagatggtgggctacagcttctcccatcagttcgatgacacctttaccgtgcggcagaacctgcgctatgccgatgtgcatacgctctatcgttccgtatacggcaacggctatgtcgcgccgggctacatgaatcgcgcctacgtgcgctccgacgagcacctgaacaccttcaccgtcgatacccagctgcagtctgatttcgccaccggcgcggtcagccatacgctgctgaccggcgtggactactcgcggatgcgtaacgatgtggatgccgactacgggacggcggatcctatcagcatgagcaatccgcagtacggcaatccgaatattcaggtcaccttcccgtacgcggtcctcaaccggatggagcagaccggcctgtacgcgcaggatcagatggagtgggataaatgggtgatgaccctgggcggccgttacgattacgccacgacctcaacgttaacccgcgccaccaacagcctggcggagaatcacgaccagcagttcagctggcgcggcggcatcaactacctgttcgataacggcatctctccgtacttcagctacagcgaatcgtttgaaccggtatcgggttccaacagccgcggccagccgttcgatccgtcgcgcggtaagcagtatgaagccggcgtgaaatacgtgccgaaagatatgccggtggtggtcaccgcggcggtctatcagctgaccaaagacaagaacctgacggctgatccggctaaccaggcgttcagcatccagaccggcgagatccgctcccgcggccttgagctggaggcgaaggcggcggtgaacgccaatattaacgtcaccgcggcctacagctacaccgatgcggagtacactcacgatacggtgttcaacggcaaacgtccggcggaagtgccgcgtaacatggcctccctgtgggcggattataccttccacgaaaccgcgctgagcggtctgacgattggggctggggcgcgctatatcggttcaacggtcagctactacaaaaatgacaccagcaccggtaagaaaaatgatgcctttagtgtggccggttatgcgctgatggatgcgacggtgaaatacgatctggcgcgctttggcctgccgggatcgtcggtcggcgtcaacgtcaacaacctgttcgaccgcgaatatgtctccagttgctacagcgaatacgcctgctactggggtgccggacgtcaggtcgtcgccaccgccaccttccgtttctaa

SEQ ID NO: 134988 - DNA, 2553 bp, Enterobacter cloacae
atggcgggagatgaccgcgagcctatcggacgtaagggaagaccctcacgtccgactaaacagaaagtcacccgtcgccgggtccgggaagaggactacgacgacgagtatgatgacgatgattatgaggatgagaaaccggtgccgagaaaagccaaaggcaaaggtggcaagcctcgtcggaagcgcagctggctgtggctgctggtcaagctggggattgtcttcgcggtgctgattgccgcctatggcgtctacctcgaccagaaaatccgcagccgcattgacggtaaagtctgggagctgccggccgcggtctatggccggatggtcaaccttgagccggacatgcagatcagcaaaaacgagatggtgcgtctgctcaacgccacgcagtatcgccaggtcagcgcgatgacgcgccccggcgaatataccgtgcaggctaacagcatcgagatgatccgtcgtccgttcgatttcccggacagtaaggaagggcaggtgcgcgcgcgtcttaccttcgacggcgaccatcttgagaccatcgagaatatggataataaccgccagttcggtttcttccgcctcgatccgcgtcttatcaccatgctgcagtcgccgaacggcgagcagcgcctgttcgtgaagcgcagcggcttccccgatctgctggtggataccctgctggcgaccgaagaccgccacttctatgagcacgatgggatcagtctctactccatcggccgcgcggtgctggcgaacctgacggcaggccgaacggtgcagggggcgagtaccctgacccaacagctggtgaaaaacctgttcctctccagcgaacgctcctactggcgtaaagccaacgaagcgtatatggcgctgatcgtcgacgcccgctacagcaaggatcgcatccttgagctgtatatgaacgaggtgtacctcggccagagcggcgataacgaaattcgcggcttcccgctggccagcctgtattacttcggccgtccggtggaagagctgagcctcgaccagcaggcgctgctggtggggatggtgaaaggggcgtcggtctataacccgtggcgtaacccgaaactggcccttgaacgacgcaatctggtgctgcgtctgctgcagcagcagcaggttatcgaccaggagctgtacgacatgctcagcgcccgtccgctgggcgtgcagccgcgcggcggggtgatttcaccgcagccggcgtttatgcagatggttcgtcaggaactgcaggcgaagctgggcgataaagtgaaagatctctccggcgtgaagatcttcaccactttcgactcggtggcgcaggatgcggcggaaaaagcggcctccgaagggatcccggttctgaagaaacagcgtaagctggcagacctggaaaccgccatggtggtggttgaccgcttcaccggcgaagtgcgggcgatggtcggcggcgcggagccgcagttcgccggttataaccgcgcgatgcaggcccgccgatcgattggttctctggccaagccggcgacctatctgaccgcgctgagccagccgaatcagtatcgcctgaatacctggatcgccgatgcgccggtgacgattcgcctgtccaacggtcagacgtggtccccgcagaacgacgatcgtcgtttcagcggtcaggtgatgctggtcgatgccctgactcgctcgatgaacgtcccgacggttaacctcgggatggcgctgggcttgccggcggtagtcgatacctggactaaactgggggcgccgaagaatcagctcaacgcggtgccgtcgatgctgcttggcgcgctgaacctgacgccgattgaagtggcccaggccttccagaccatcgccagcggtgggaaccgtgcgccgctttccgcgctgcggtcagtgattgccgaagatggcactgtgctctaccagagctatccgcaggcggagcgcgcggtgcctgcccaggcggcctacatgacgctgtggactatgcagcaggtggtgcagcgcggtacggggcgtcagctgggggcgaagtatccgggcctgcatctggcggggaaaaccgggaccaccaacaataacgtcgatacctggttcgccggcatcgacggtagtcaggtgaccatcacctgggtgggtcgcgacaataaccagccgaccaaactgtacggcgccagcggcgcgatgtcgatttaccagcgctatctggcgaaccagacgccaacgccgctggtgctgacggtgccggaagacgtggttgatatgggcgtggacagcaacggcaacttcgtctgcagcggcggtatgcgttcgctgccggtctggaccacgcagccggatgcgctgtgccgtcagggcgaaatgatgcaacagcagcagttgcagcaacaggaagcgaaaaatccgtttaatcagtccgggcagcaaccgccgccgcagcagcaacagcagcaacagccgccgaagcagcaggaaaagagcgacggcgtcgcgggctggatcaaggatatgttcggcagtaactga

SEQ ID NO: 134989 - DNA, 558 bp, Enterobacter cloacae
gtgattgttcgtgatgacagtgaaagaggcatcccgcctctggtggcgcatcagccgccgtcctcgctggatgatgcgccggtgagctgcggtcggatggtgcagatccccggctggattatcccgctgtacgccggattatttatcgcgctcggctggtttggcggcgagcagtggcgtcacccggcaccgccgcaaacgctgcccttgccggtggcgcatgcggcgcttctgccgttaaccgctgccggagaggccgcgccaaagacgccgccgccggcggcaaaagccagcgcgcccgcggcgccggaagtggacagcgatacgctgccgcctctgcgctacagcgcccatgtctacgcctcgcgaccggaaaagcgcagcattgtgttaaacggcaaagcgtggacggagggcgattcacccctgccgaacctggtggtggagcagatccagcaggatgtgacgatcttcagcttcaacggcacgacctttaccctcgcggcgctggaggactggccgggcggaaaaattgacgaggagccgaaagaggaataa

SEQ ID NO: 134990 - DNA, 3309 bp, Enterobacter cloacae
atgctcagatatacctgtcatgccctatttcttggatcgttagtattattgagtggctgtgataacagctcttcctcttctacctctggctcaccgggttcaccaggcaatcctggcaacccaggaactcccggcacgcccgacccgcaggatgtcgtcgtccgcttaccggacgttgccgtcccaggcgaagcggtgcaggcttccgccaggcaggctgtcattcatctcgtcgatatcgccggcatcaccagcagcacgccggccgactatgcgacgaaaaacctctatttatggaacaacgaaacctgtgacgcgctgagcgcgccggtggcggactggaatgatgtcagcaccaccccgaccggcagcgacaaatatggcccttattgggtgatcccgctgactaaagagagcggatgcatcaacgttatcgtccgcgatggcaccaataagcttatcgacagcgacctgcgcgtctctttcagtgatttcaccgatcggacggtatcggtcatcgccggcaacagcgcggtctatgactcccgcgccgacgccttccgcgccgcctttggcgtggcgctggccgatgcgcactgggtcgataagactactctgctgtggccgggtggggaaaataaacccattgtgcgcctctattacagccacagcagtaaggtggccgccgacagtaacggcgaatttagcgataaatatgtcaagctgacccccaccaccgtcagccagcaggtaagcatgcgcttcccgcatctcgccagctatccagcctttaaactgccggatgatgttaacgtcgatgaattgctgcagggcgagacggtggcgatagccgcggaaagcgatgggatcctgagctcagccacccaggtgcagaccgccggcgtgctggacgatacctatgccgccgccgccgaggcgctgagctatggcgcccagctaaccgatagcggcgtgaccttccgcgtctgggcgcccacggcgcagcaggtcgagctggtgatctatagcgcggacaagaaagtgatagccagtcacccgatgacccgcgacagcgcctccggcgcctggtcctggcaggggggaagcgacctgaagggcgccttctaccgctacgcgatgacggcctaccacccgcagtcgcgtaaagtcgagcagtacgaagtgaccgatccctacgcccacagtttgtcgaccaactcggagtacagccaggtggtcgatctcaacgacagcgcgctgaagccggaaggctgggacgggctgacgatgccgcacgcgcagaaaaccaaagccgacctggcgaaaatgacgatccacgaatcgcatattcgcgatctctccgcctgggatcaaaccgttcctgcggagctgcgcggtaagtatctggcgctcaccgcccaggaaagcaatatggtccagcatctgaaacagctgtcggcctcgggcgtgacccatattgagctgctgccggtcttcgatctggcgacggtcaatgagttcagcgacaaggtcgccgatattcagcagccgttcagccgcctgtgcgaggtcaatagcgcggtgaagagcagcgagtttgcgggctattgcgacagcggttcgacggttgaagaggtgctgactcagctgaagcagaacgacagcaaggataacccgcaggtgcaggcgttgaatacgctggtggcgcagaccgactcctataactggggctacgatccgttccactacacggtaccggaaggatcctacgccaccgatccggaaggcacagcgcgtattaaagagttccgcaccatgattcaggcgatcaagcaggatctgggaatgaacgtcattatggacgtggtgtacaaccacaccaacgccgccggcccgaccgatcgcacctcggtactggataagatcgtcccctggtactaccagcgtctgaacgaaaccaccggcagcgtggaatcggctacctgttgctccgactcggcgccagagcaccggatgttcgccaagcttatcgccgattcactggcggtatggaccaccgattataagatcgatggcttccgcttcgacctgatgggctaccacccgaaagcgcagatcctctcggcctgggaacgcattaaagcgctgaacccggatatctacttctttggcgaaggctgggattccaaccagagcgatcgctttgaaattgcctcgcaaatcaatctcaaaggcaccgggatcggcacgttctccgatcgtctgcgcgacgccgtgcgcggcggcgggccgttcgactccggtgacgcattacgccagaaccagggcgtgggcagcggggccggcgttctgccgaatgagctgaccaccctgaccgacgatcaggcgcgtcacctcgccgatctgacccgtctcggcatggccggtaaccttgcggactttgtgctgatcgacaaagacggtgcggtgaagagaggcagcgagattgactataacggcgcgccaggcggctatgcggctgatccgacggaagtcgtgaactatgtgtcaaaacacgataaccagacgctgtgggacatgatcagctataaagccgctcaggaggcggatctcgatacccgcgtccggatgcaggcggtgtcgctggggacggtgatgctcggccaggggatcgcctttgaccagcagggctcggagctgctgcgctctaaatcctttacccgcgattcgtatgattccggcgactggtttaaccgcgtggactactccctgcaggacaacaactacaacgtcggtatgccgcgcagcagcgatgatggcagcaactatgacattatcgcccgggtgaaagacgcggtggctactccgggtgaaacggagctcaagcagatgaccgcgttttatcaggagctgaccgcgctgcgtaaatcgtctccgctgtttaccctcggcgacggcgcgacggtgatgaagcgcgtggacttccgcaatactggcgccgatcagcagacgggtctgctggtgatgaccatcgatgacgggatgcaggctggcgccagtctggacagccgtgtcgacggcatcgtggtggcgatcaacgccgcgccggaaagccggacgctgcaggacttcgccggcacatcgctccagctgagcgctattcagcaggcggcgggcgaccggtcgctggcgagcggcgtgcaggttgccgctgacggttcggtcacgctgccggcctggtcggttgccgttctcgagttgccgcagggcgagtcgcagggcgctggcctgccggtgagcagtaaataa

SEQ ID NO: 134991 - DNA, 522 bp, Enterobacter cloacae
gtgggagccacgaccgttttcgccgacaaaaccgaccgcgtgagagtcatccaccatcaccagcgcgtcgtatttatccgccagatcgcacacgcccttcaggttggcgatcacaccgtccatggagaacacgccgtcggtggcgatcagcacgtggcgagcccccgcttcacgggcctctttcaggcgcgcttccagctcaaccatgtcgttgttggcgtagcggaaacgcttcgctttgcacaggcgtacgccatcgatgatggaagcgtggttcagggcgtcggagataatcgcgtcttctgcgccgagcagggtctcaaacagaccgccgttggcgtcgaagcaggaggagtacagaatcgcgtcttccattccgaggaagctcgccagcttttgctcaagctgtttgtggctgtcctgcgtaccgcagatgaagcgtacggaggccatgccgaaaccgtgggtatccatgccgttttttgcagcggcaatcagctcagggtgattcgcaagacctaa

SEQ ID NO: 134992 - DNA, 852 bp, Enterobacter cloacae
atggcggaaagcctgcgcggcgggctgtcgatcggcatgtccggctttggtttctggagtcacgatatcggcggtttcgaaaacaccgcgccggcccacgtctacaagcgctggtgcgccttcggcctgctctccagccacagccgcctgcacggcagcaaatcctatcgggtgccatgggcctacgatgacgagtcctgcgacgtggtgcgccacttcacgcagctgaaatgccgcatgatgccgtatctctatcgtcaggcggcgctggccaacgagtgcggcacgccgatgctgcgcgcgatgatgctcgagtttccggacgatccggcctgcgactatctcgatcgccagtatatgctgggcgattcggtcctggtggcgccggtgttctccgaggccggcgaagtgcagttttatctgccggaagggcactggacgcatctgtggcataacgatgaattgccgggtagccgctggcataagcagcatcacgatgcgctgagcctgccggtctacgttcgcgacaacagcctgctggcgctgggcaacaatgaccagaagccggattacgcctggcatgagggcaccgccttccagctgttccaccttgaggatggacgcgaggcacgctgtgacgttccggcggcagacggctcgacgatcttcaccctgaaggccaggcgccagggtaacgccatcgccgtgagcggcgaaggcgaggcccgcggctggacgctgtgtctgcgcaatatcccgcaggtcgcgggcgtgcagggcggtacgcagaccggtagcgaactgggcgtggtggtgagcgccgagggtaatacgctgacgattacgttgtaa

SEQ ID NO: 134993 - DNA, 723 bp, Enterobacter cloacae
atggacgtagaaaatatctttcgtgacgtgaagctaagcaaaacggaaatgaccgtgctgcgctttattcagaacgacccggagcagtgtatccgccagggagttcgcgctgtggccgaacagtgctacagcaacccctcttccctggtccggctagcgaaaaaactgaagttcagcggctggctggagctggtttactttatcaagttcaatatcaccatgccgaagctcgatgtcaccaacgatatcgactacatgagcgttcagccggaagaagcgctgacgccgctgctggcaagccttaaccagcagcgcatcctgatccacggcagcggcttttcacagctgatcgcccagtatatttacaacaagtttctcgtcaccggcgtgaatgccagcctggcgctgtggcccgattacgaaatcctcgaacagaaaaacgccgcctgcttcgactccatctggatcatttctaaatccgggcgcagcagctcggcgctcaactgggttaaggccctggaggggaaggagattaatctggtctgctttaccggcgactaccaaagcccgctggcgcaggccgcggatacggcgtttattattcacgacccgcagaagttcgatgatgatatttactggagcaacccgtttttcggctactgcatcttaggctttgagcgactattgaagatgtggtttaccagtctacgtagcaatagttag

SEQ ID NO: 134994 - DNA, 1380 bp, Enterobacter cloacae
atgaaattaaccgtattaggcgggggcggcgttcgctctgcatttttagcgaaatctctggcctataacgctcaccgcattggtttaacagaagtcgtttttctcgataactctgctgataatctggcgatatttggcgaaattgcccgctatgtatttaataccattcgcccggatattcagtttagtaccaccaccgacccggtcgtagcgctgcaggacgccaactatatcattaccaccctgcgggttggcggcgatgaaagccgcattcgcgacgaacgtattgcgcttgagcataacactctcggccaggagaccaccggcgccggcggtttcgcgatggccatgcgctcgatcccggcgatccttcgctattgccggctgatcgaagaacatgccgccgaagacgccattctgtttaactttaccaacccgtcaggtctggtgacggaagcgattattaagtccggctttaagcgccgggtctatgggatctgcgatgccccctccgagctgattcgtgaactgccggcgatccttggctgtgaggagcgcgacctcagcgtggaatgctatgggctgaaccatttctcctggtttacccacttcaccgtccgtggggaagaggtgaccgaacggctgatcgccagcccggaactgtaccagaagacggcgatgcagtacttctccccggagctggtacggctttgcgataatcagctcctcaatgaatatctctattattactactatcgcgacgaggcgctgaaggcgattcagggggccggcgaaacgcgcggagagcagatcgcccgcatcaatcaggagatgcgcgaggcgctgcgcaccgtggatgccagaacgcaaccggaggccgccttcaccatctggatgcagcattacctacgccgggaaaacagctatatgcagaacgaatcccggcaggagaaattccacacccgcgaaccgctgacgctgcgccagtttatcgaagagccggacaccggcggctatgccggagtggcgctggatatcctggaagcggtgaacagcaccaccaccaagcggatcgtggtgtcgatccagaatcacgacacgctcgactttttgcgccctgacgacgtgatcgagatcagctgcgacctgagccgggatggcctcaagccggtgacgccggtgaaggtgccgacggcgcagaagaatatgattgcctgcgtgaaagagtatgagcggctggcggtggcggcgatcctgcagcaggataaaccgctggcggtgcgggcgctgatggcgcacccgctgatcggttcctattcgctggcgaaaaccctggtcgaagcctacctcgacgatgagcagttcgccgcctggcggtaa

SEQ ID NO: 134995 - DNA, 1560 bp, Enterobacter cloacae
atgcctgaaatacgtcagcgtattctggagaatatgcaaaaattctcccgggccatgatcggcgccgtattgttcttgccggtcattggcttaattctggccctcagttcagtattaactaatccgacattaattgctgaaaccagtttcttacatcagcttgggcaaatgctcggcgacaccttttggcctttatttggcaacctcggcttattattttgcgtcggcatcagctatggcctggcaaaggataaaaaaaccgaagtcgcactggtttcagtgatgtgctttattatgtttcttggcgccaaccactcctggctggaacacacccatggactcgccgaaaaaattaacggtgaatattatggcaccgggcaaacccagctgctgggctttgtggtggtggatatgggcgttttcctgggcattattctcggctgcacgattgcgtgggtgcacaataaagtctctgccattgagctgcctggcgcgctgtcgatgtacggcggcgccaagctgacgctggtggcgatgacgccggtggttatcttctacgccatcgcctttacctggatttggccctttatgacccacggcatctccgccctcaccggttttatgaaaaatgccggggtcgccggggtcttcgtctatggtttctttgaaaaattccttatccccaccggcctgcaccatttcgtctggtcccccttccagctcacccagattggcggcacgctgaacgtggatggtcaggtggtctccggcacccaggccattttcctcgcctatatgcgccatcccgacctgacgccggtcatgaacgacgcattacgtttttcgcagcaagggatgaccactatctttggcctggcgggcgcctcgctggcgttctaccacaccgcgaaaccggagaagaaagcgatggcgaaggcgattctgctgccggcgattatcacctcgatgctgaccggcatcaccgagccgattgagttcaccttcttatttgtctcaccgctgctgtgggtgatccacgcgacgttaaccgccgcctcgcaggccatttgcgacatattcaccgtacgtccctggggagcatcgggcctgatcgagtttctgatctataacctgccgctgccggtctccttaacgcgctggccgggctatgtccttatcggtatcggccagttcgccgtctactacgtgattttccgcaccctggtggtgaagctgaacctgaaaacgccgggccgggaagatgacgagaacgtgaagctctacagcaaagcagagtaccgccagaaagtcgcgcaaccgcagtcggtcaccgatgacattatccgcggcctcgggggcaaggagaatattctctccgtcgataattgttttactcgcctgcgcgtggccgtgcgcgatatggcgcgggttgatgacacgcaattaaaaaataccggcgccaacggcgtcgtacgcaatcgaaatgaagttcaggttatttatggcgtcaaagtgggacaggtacgttcccgggttgataactggttagcagaaaattaa

SEQ ID NO: 134996 - DNA, 1716 bp, Enterobacter cloacae
atgaaatttcttggaaagctgattctctggctgctagtcgctctgctgctcgtcattattggcgcgtggttcctgctgcaaacccactggggcgcccgccaggccagcgcctggctcagcaatggcaccggctggcaggtctccttcgatgagatggagcacgatttctcctccccccttcatgtgcagttgcgaaacgtcacctttggtcgggaaggcaagcctgccactttggtggcaaaaacggtcgacattggcttcagcacccgccagtttagcgatccgctgcatgcggatgagatagtccttaacgacggcactctgaatctgtcaccccactctgcagacctgccgttcgctgccgaccggctgatgttgcgcaatatggctttcaacagcccggaaaccggctgggcgctcagcgcgcagcgcgtcaccggcggcgtcagcccatggacgccggaggcgggcaatgtgctggggaaaacggcgcagatccagatgagcgcgggctcgatgacgctcaatggcgtcgaagccagcaacgttctgattcagggtaagattgatcagggcgaggtcaccctctccaccctcggcgccgatgtcgcccgcggcaccttaaccggcaatgccaaacgcagcgccgatggcagctggcgggtggataacctccagctcaacgagattcgactgcagagccccgcctcgctgaccgagtttttcgcgccgttaaccacggtcccctctctgcagattggccgcctggacatcaccgacgcccgcctgcagggaccggactgggcggtaaccgacctcgacctgagcctgcgcaacctgacccttagccacggcggctggcagagtgaggacggcacgctgtcgatgaacgccagcgaatttatctacggctcgctgcatcttttcgacccgatcctcaatgccgaattctctccccagggcattgcgctgcgccagttctcctcgcgctgggagggcggcatggtgcgcacctccggcaactggctgcgcgccgggaacgccctggtgctcgacgataccgctttcgccggactagagtacacgctgccggcgaactggaaacagctgtggatgacgccgctgccagcctggctgcaaagcctgacgctgaaaaaattcagcgccagccgcaatctgatcatcgatgtggaccctgctttcccgtggcaaattaccgccctcgatggctatggcggcgagctacagctggtgaaaaacggtagctggggagtatggaacggcagcgcgacgctgaacgccgcggcggcgactttcaaccggatcgacgtgcgccgcccatcactcaaactgaacgccacagcctcgacggtcaatatcactgagcttagcgccttcaccgagcgcggcattttgcaggccaccgccgcggtatcccagctgccgcagcgccaggtcaatctgagcttcagcggccgcggcgtgccgctaaatattctgcaggcctggggctggccgtcgctacctataagcggggatggcaatctccagctgaccgccagcggcagcgtgcaggccgatgccccgctcaaaccgacgatcaacgggcagctcagcgccgtgaatatggagaaacagcaggtggcgcaaatcatgcgcaacggcgaggtcagccccgcccccgccgcgccagcgcccgctcccgtcaccccatag

SEQ ID NO: 134997 - DNA, 1392 bp, Enterobacter cloacae
atgtccgttaacaccgcagagtcagaaaatgcgcaaccggttgcgcataaaccagccagcgaattaatctaccgcctcgaagatcgcccgccgctaccgcaaaccctgttcgccgccttccagcacctgctggcgatgtttgtcgcggtgatcaccccggcgctgttaatctgccaggctctcggtctcccggcgcaagatacccaacatatcatcagcatgtcgctgttcgcctccggcgtcgcctctattattcagatcaaagcctggggcccggtcggctccgggctgctctccatccagggcaccagcttcaactttgtcgccccgctgatcatgggcggtaccgccttgaaaaccggcggcgccgacgtccccaccatgatggccgccctcttcggcaccctgatgctggccagctgcaccgaaatggtcctctcccgggtccagcacctggcgcgccgtatcattaccccgctggtttccggcgtggtggtgatgattatcggcctgtcgctgattcaggtcggactgacttccatcggcggcggctacgcggcgatggccgaccacacctttggtgcgccgaaaaatctgctgctggcgggtatcgtgctggcgctgattattatcctcaaccgccagcgcaacccgtacctgcgcatcgcctcgctagtgattgccatggctgccggttatctggcggcgtggttcctcgatatgctgccagccaacaccgccccgaccaacagcagcctcatcaccgtcccgacgccgctctattatggcctcggcatcgactggagtctgctgctgcccctgatgctggtgtttatgatcacctccctggaaaccatcggcgatatcaccgccacctccgacgtctccgaacagccggtctcgggtccgctgtatatgaagcgcctgaaaggcggcgtgctggctaacggcctgaactccttcgtttccgcggtcttcaatactttcccgaactcctgcttcggccagaacaacggcgtgatccagctgaccggggtcgccagccgctacgtcggctttgtggtcgccctgatgctgatcgtcctcggcctgttcccggcggtgagcggcttcgtgcagcacatccctgagccggtgctcggcggcgccacgctggtgatgttcggcaccatcgccgcgtccggcgtgcgcatcgtctcccgtgaaccgctgaaccgtcgggcgatcctgattatcgctctgtcgctggcggtaggcctcggcgtgtcgcagcagccgctgatcctgcagttcgccccggactggctgaaaaacctgctttcctccgggattgccgccggcggtatcacggcgattgttctgaatttaattttcccgccagaaaaggcgtga

SEQ ID NO: 134998 - DNA, 1203 bp, Enterobacter cloacae
atgtttcatctcgataccttatcgacgctcgttgccgcaacgctcgtgctgttactcggcagaaaactcgtacaaaccgttcccttccttaagaaatacactattcctgaacccgttgccggcggtctgctggtggcgctggcgctgctggcgctgaaaaaaagcatggatatcgaaattgatttcgatatgagtctgaaagacccgctgatgctggcgttcttcgccaccatcggtcttaacgccaacctcgccagcctgcgggccggcggcaaggtgctgggcactttcctgatcgtggtggttggcctgctgctgctgcagaacgccctcggtatcggcatggcgacgctgctggggctggatccgctaatgggtctgctggccgggtcgattaccttatccggcggccacggcaccggggcggcgtggagtaagctgttcgttgagcgctacggttttgccaacgccaccgaggtggcgatggcctgcgcgactttcggcctggtgctgggcggcctgatcggcggcccggtggcgcgttatctggtgaagcactcttcctcaccggacgggacaccggacgatcaggtggcgccaaccgcctttgaaaagccggacgtggggcgggtgatcacctcgctggtgctgatcgaaagtatcgccctgatcgccatctgtctgacgctgggcaaggtggttgcgcaactgctggcggggagcgtcttcgagctgccgaccttcgtctgcgtgctgtttatcggcgtgatcctcagcaacagcctggcgctggcggggttgtatcgggtgttcgatcgcgcggtatcggtgttgggcaacgtcagcctgtcgctgttcctcgccatggcgctgatgagcctcaagctgtgggagttggcctcgctggcgctgccgatgattattatcctggcggtgcaggcgatggcgatggcgctgtatgcggtgttcgtcacctatcggatgatgggcaaaaactacgatgccgcggtgctggcagccgggcattgcgggtttggcctgggggcaacgccgacggcgatcgccaatatgcaggcgattaccgaccgtttcgggccatcgcatatggccttcctggtagtgccgatggtgggggcgttctttatcgatatcgtcaacgcgctggtgattaagctgtacctgctgctgccgatatttggctga

SEQ ID NO: 134999 - DNA, 1512 bp, Enterobacter cloacae
atgaccgacaaaaaatatatcgttgcgcttgaccagggcactaccagctcccgggccgttgtgatggatcatgatgccaatatcgtcagcgtctcccagcgagaatttgaacaaatttatcctaagccaggctgggtcgaacacgacccgatggaaatctgggcttcccaaagctcgacgctggtcgaagcgctggccaaagcggatatcaactccgatcagatcgcggccatcggcatcaccaatcagcgtgagaccgtggtggtgtgggagcgagagaccggtaaacccatctacaacgctatcgtctggcagtgccgccgtaccgcggagatctgcgagcagctcaagcgtgacgggatggaagagtatatccgcaaggccacaggcctggtggtggacccgtacttctccggcaccaaggtgaaatggatcctcgaccatgtcgaaggttcccgtgagcgtgcgaagcgcggcgagctgctgttcggcaccgttgacacctggcttatctggaagatgacccagggccgcgtgcacgtcaccgactacaccaacgcctcgcgtaccatgctgttcaacattcacgacctcgactgggacgacaagatgctcgacgcgctagacattccgcgcgccatgctgccggaagtgcgcaagtcttccgaagtgtacggccagaccaacatcggtggtaaaggcgggacccgtattcctatcgccgggatcgccggtgaccagcaggcggccctgttcggccagctgtgcgtcaaggaagggatggcgaaaaacacctacggcaccggctgctttatgctgatgaataccggcgaaaaagcggtcacctccacccacggtctgctgaccaccatcgcctgcggcccgcgcggcgaggtgaactacgctctggaaggggcggtgtttatggccggcgcgtctattcagtggctgcgcgacgagatgaagctcatcagcgatgccttcgactccgagtacttcgccaccaaagtgaaggataccaacggcgtatacgtggtacccgcgttcaccggtcttggcgcaccgtactgggacccgtatgcccgcggcgcgattttcggcctcacccgcggcgtgaactccaaccacattatccgtgcgacgctggagtccatcgcctttcagacccgcgacgtgctggaagcgatgcaggctgactccggcattcgtctgcacgccctgcgcgtagacggcggcgcggtggctaataacttcctgatgcagttccagtccgatatcctcggcacccgtgtcgagcgtccggaagtacgcgaagtgacggcgctgggcgcggcctatctggccggtctggcggtcggtttctggcagaatctggatgaactgcaggagaaagcggtgattgagcgcgaattccgcccgggtattgaaactactgagcgtaactatcgttacagcggctggaagaaagcggtgaaacgcgcgttagcgtgggaagagcacgacgaagcgtaa

SEQ ID NO: 135000 - DNA, 852 bp, Enterobacter cloacae
atgagccaaacatcaaccttaaaaggccagtgcatcgcagagttcctcggtaccgggttgttgatctttttcggcgttgggtgcgtggctgcgctcaaggtcgcgggagccagcttcggacaatgggaaatcagcatcatctggggtctgggcgtcgccatggcgatctacctgaccgccggggtctccggtgcgcaccttaacccagcggtgactatcgcgctgtggctgttcgcctgcttcgaaggccgcaaagtggttccttttattatttcgcaattcgctggcgccttttgcgctgcggcattagtttacgggctttactacaatcttttcctcgattatgaaaccacccaccatatgattcgcggcagcgtggaaagcctcgatctggccggcattttctccacttacccgaacccgcacatcaattttgtgcaggccttcgcggtagagatggtgattaccgctatcctgatgggcgtcatcctggcgctaaccgacgatggcaacggcataccgcgcggcccgctggcccctctgctgattggcctgctgattgcggtgattggcgcctccatgggaccgctgaccggcttcgccatgaacccggcgcgtgacatcggcccgaaagccttcgcctggctggcggggtggggtgacgtcgccttcaccggcggcaaagatattccttatttcctggtgccgctgtgcgcaccggtggtcggcgcggcgctgggcgcattcagctatcgtaagctgattggccgtcacctgccttgcgacacctgcgtggaggaagagcaacagagcccctcctcttccaccgctcaacataaagcttcgctgtaa

SEQ ID NO: 135001 - DNA, 240 bp, Enterobacter cloacae
atgtcattagaagtgtttgagaaattagaatctaaggttcagcaggcgattgataccatcactctgttgcagatggaaatcgaagagctgaaagaaaagaacaacaccctggtgcaggaagttcagagcgcgcagcatggtcgtgaagagctggagcgcgaaaacagccagctgaaagagcagcagcagggctggcaggaacgtctgcaggcgctgctgggtcgcatggaagaagtctaa

SEQ ID NO: 135002 - DNA, 990 bp, Enterobacter cloacae
atgaataagtggggcgtagggttaactctgttgctggcatccgccagcgttctggcaaaagacattcagctattaaacgtatcttatgatccaacgcgcgagctgtacgaacagtacaacaaagcgtttagcgcacactggaagcaggagaccggcgacaacgtggtgatccgccagtcgcatggtggctctggcaaacaggcgacctcggtgattaacggtattgaagcggatgtggtcacgctggcgctggcctacgatgtcgacgctattgccgaacgcggccgcatcgataaaaactggctgaaacgcctgccggataactctgcgccgtatacctccaccatcgtgttcctcgtccgcaagggcaatccgaaacagatccatgactggaacgatctgatcaaaccgggcgtgtcggtcattaccccgaacccgaaaagctccggcggcgcccgctggaactacctggcggcctggggctatgccctgcatcagaatcacggcgaccaggcgaaagcccaggaattcgtcaaggcgctgtataaaaacgtggaagtgctggactccggcgcgcgcggttcgaccaataccttcgtagaacgcggcatcggcgacgtactgatcgcttgggaaaacgaagcgctgctggcgaccaacgaactgggcaaagacaagtttgaaatcgtgaccccaagtgagtcgattctggctgagccgaccgtctcggtggtcgacaaagtggtggataagaaaggcacgcgccaggtggcggaagcatacctgaagtatctctactcgccggaaggccaggagattgcggcgaagaacttctaccgcccgcgcgatccgaatgtggcgaagaaatatgctaacgaattcccgaaactgaagctgtttaccatcgatcaggagttcggcggctggacgaaagcgcagaaagagcacttctccaacggcggcaccttcgaccagattagccagcgttaa

SEQ ID NO: 135003 - DNA, 765 bp, Enterobacter cloacae
atgagaagagtaagatactttttgctggcgctgctggtggcgatcctcgcggcgctggcgggcggctactactggctgcactctggcaacccggacgcattacgcaagattgtcctgcagcagtgcgtaccccatcagcaacagcagcaaaacccgtcgccgtgcgcggaagtgaacctcaagggcggctatgtgctgtttaaagaccgtaacggcccgctgcaatatttgctgatgccgacctaccgcatcaacggaaccgaaagcccgctgctgctggatccgttgacgccgaactttttctggcaggcctggcaggggcgtgaaatcatgagccagcgccacggcgcgccggttcctgataacgcggtatcgctggcgatcaactcgcgcagtggacgtacgcaaaaccatttccatattcatatctcctgcctgcgccccgatgtgcgcgcgcagttagataaggatgccgcagcgatcagcagccgctggctgccgctaccgggcgggcttcagggccacgaatacctggcgcgccgggtgacggaggcggagctggcccagcgtagcccgttcctgatgctggcggaagaggtgccggaggcgcgtgaacatatgggacgcttcgcgctggcaatggcgcaacagagcgacggctcgctggtgctgctggcgacggagcgtaacctgctgaccctgaaccgggcttcagcggaagaaattcaggatcatcgctgcgccatccttaacgcaaaccactag

SEQ ID NO: 135004 - DNA, 498 bp, Enterobacter cloacae
  misc_feature (411)..(420): n is a, c, g, or t
atgtcgctctggcttacccacccgctgttccttccttcattgattgtcggcgtcaccatcgtgctctgggcgacgtcgctgctgccggaatttatcaccgcgctgctgttcttcgcagcggcgatgatggcgaaaatcgctccgccggaggtgatcttcggcggctttgcctcttcggcgttctggctggtgttcagcggctttgtgctcggcatcgccatccgtaaaaccggactggcggaccgggcggcgcaggcgctgtcggccaggctcaccgactcctggccgcggatggtcgccagcgtggtactcctgagctacgccctggcgttcgtgatgccctccaacatggggcgcatcgcgctgctgatgccgatcgtggcggcgatggcccgccgcgcgggcattgcnnnnnnnnnngcctggcgctggcggtggggttcggcacctttcagttgtcggcgacgattttgcccgccaacgtgccgaatctggtga

SEQ ID NO: 135005 - DNA, 810 bp, Enterobacter cloacae
  misc_feature (317)..(326): n is a, c, g, or t
atgagtggcgcggcggaaggctcgtacggtatccatctgaattatgttccctatttactgctgcatacgccggtgcttggctggctgaaaggggcggtgctggtggcgctgatttgctggctgtttcccggcaagccgcatccaccgcgcgacctggcgccgctgccgccgatgagccgcgacgagaaacgtctggcgtggctgctggcggtggtcctctcgctatgggtgaccgagagctggcacggcgtcggcccggcgtggaccggcctggcggcggctgtgatcacgctgctgccgcgggtgggctttatcannnnnnnnnntatcaacggcgaggagtttgccagcgggttgaatatgcgcacctgcatttacgtcgccgggattctggggctagcgatcgccgtcacccaaaccgggattggcggcgcggtgggcaatgcgctgctgcaggtgatgcccctggataaagacaatcctttcaccagctttctcgccctgaccgggataaccagcgcgctgaactttattatgaccgccaacggcgtgccggcgctgtataccacttttgcccagagctttgccgacgccaccggcttcccgctgctaagcgtgattatgattcaggtgctgggctattccacgccgctgctgccctatcaggcgtcgccgatcgtggtggcgatggggttaggcaaggtcccggcgagggcggggatgcaactgtgtctggcgctggcggcggtgagttatctgattttactgccgctggactacgcctggtaccagctgttggggaaactgtaa

SEQ ID NO: 135006 - DNA, 768 bp, Enterobacter cloacae
atgcgacatcctttagtgatgggtaactggaaactgaacggcagccgccacatggtaaacgaactggttgcgaacctgcgtaccgagctggctggcgtaagcggctgtgcagttgccatcgccccgccggaaatgtatctggacctggctaagcgcgcggcagaaggcagccacattcacctgggcgcgcagaacgttgacgtgaacctgtccggcgcattcaccggtgaaacctccgccgaaatgctgaaagatatcggcgcgcagtacatcatcatcggccactccgagcgtcgtacctaccacaaagaatccgacgagctgatcgcgaagaaattcgccgtgctgaaagagcagggtctgaccccggttctgtgcatcggtgaaaccgaagccgaaaacgaagcgggcaaaacggaagaagtttgcgcgcgtcaaatcgacgccgtgctgaaaacccagggcgctgccgctttcgaaggcgtggttatcgcttacgaaccagtatgggctatcggtaccggcaaatcagcgaccccggctcaggcgcaggcggtgcacaaattcatccgtgaccacattgctaaagctgacgccaaaatcgctgagcaagtgatcatccagtacggcggttccgttaacgctggcaacgccgcagagctgttcacccagccggacatcgacggcgcgctggttggcggcgcctccctgaaagctgacgctttcgcggtgatcgttaaagcagcagaagcagcgaaaaaagcgtaa

SEQ ID NO: 135007 - DNA, 603 bp, Enterobacter cloacae
atgaagaagtggacaattttgtggttaagtgggctgatgggccttgccgtcggcccgcacgcgttgtccgcagagagcgaatcgacgaccgcggcagcgccctacctgctcgccggcgcgccgagctttgaccagtcgatcagtcagttccgcgagaaattcaacgccgataacccaaagctgcctctgaacgaattccgttccatcgccaccagtcgcgatcgggctaacctgacccgcgccgccagcaaaattaacgaaaatctctatgcctccaccgcgctggagcgcggcacgctgaagatcaaatccatgcagatcacctggctgccgatccaggggccggagcaaaaggcggccaggaccaaagcgctggagtatatgagcgccatgatccgcgccttcgtgccgacttttagccaggcgcaaagccagcaaaaactgcagaaactgctggccgccggcaagggcaagcgctacttcgccgataccgaaggcgccgtgcgctatgtggtggcagatcatggggaaaagggcctgaccttcgccattgaaccgattaagctggcgctatctgaaacgctggaaggtaacaataaatga

SEQ ID NO: 135008 - DNA, 429 bp, Enterobacter cloacae
atgaccctacagcagtggttattctcaattaaagggcgcattggccgccgcgatttctggatctggattgccatctggctggtgaccatgagcgccttgtttaccctggcaggcagcaatctgctcaacctgcagacggcggcgtttattatcgtctgcctgctgtggccgacggcggcggtggtggtcaagcggctgcacgatcgcggcaaatccgggctgtgggcgctgctgatggttctggcgtggatgctgctggcggggaactgggcgatgttgccgcaggtctggcagtggggcgtcgggcgctttgtgccgacgctgattatcgtcatgatgctgatcgacctgggggcgtttgtcggcacccagggcgagaataagttcggcaaggagacccaggacgtgcgctggaaagcggacgcctga

SEQ ID NO: 135009 - DNA, 747 bp, Enterobacter cloacae
atggcggactgggttagcggcaaagtgacaaaagtggagtactggacggacgccttgttcagtttatacgtgcgggcgcctgttcatccgtttaccgccgggcaatttaccaagctcgggctggaaatcgacggcgaacgcgtgcagcgcgcctactcctacgtcaacgcccccggcaatcccgacctcgagttctatttggtcaccgtcccggaaggcaagctgagcccgcgtctggcggcgctgaagccgggcgatgaagtcctggtggtgagtgaagcggcaggtttcttcgtcctcgaggaggtaccggattgcgataccctgtggatgctggcgaccggcactgcgctggggccgtacctgtcaattttgcaggaaggcaaggaccttgagcgctttaacaacctggtgctggtccacgccgtccgctacgccgcggacctgagctatctgccgctaatgcgcgaactggagcagcgctatgccggcaaactccgtattcagacggtggtcagccgcgaaaccgtggaaggctcgctgaccggcagggtgccgtttctgattgaaaccggcgcgctggaagaggccgtcggcctgccgatgaccaccgacaccagccatgtgatgctgtgcggcaacccgcaaatggtgcgcgatacccaacagctgttaaaagagacccggcagatgaccaaacatctgcgtcgccggccgggccatatgacggcggagcactactggtaa

SEQ ID NO: 135010 - DNA, 1011 bp, Enterobacter cloacae
atgaaacgagaactggccatcgaattttcgcgtgtcaccgaagccgccgcgctggcgggctataaatggctgggccgcggcgataagaataccgccgacggcgcagcggttaacgccatgcgcattatgcttaacctcgtcaatatcgacggcaccatcgtcatcggcgagggcgaaatcgatgaagcgccgatgctttatatcggcgaaaaagtgggtaccggcaagggcgatgcggtagatatcgccgtcgatcccatcgaaggcacccgcatgacggcgatgggccaggccaacgccctggcggtgatggcggtcggcgataagggctgcttcctcaacgcgccggatatgtatatggaaaagctgatcgtcggcccgggcgctaaaggcgctatcgatctcaatctgccgctggaagagaacctgcacaatatcgcccgcgccctgaacaagccgctgggcgagctgaccgtcaccgtgctggcgaaaccgcgccacgacgcggtcattgcccagctgcagcagctgggcgtgcgcgtgttcgctattcccgatggcgacgtcgcggcctctattctcacctgcatgccggatagcgaagtcgacgtactgtacggcatcggcggcgcgccggaaggggtggtttccgccgcggtgatccgcgccctcgacggggatatgcaggggcgcctgctggctcgccaccacgtgaagggcgataacgaagagaaccgccgcatcggtgaaaatgagctggcgcgctgcaaaaccatgggcattgaagcgggcaaagtgctgcgtctggatgaaatggcgcgcagcgataacgtcgtcttctccgccaccgggatcaccaaaggtgatctgctggacggcatcacccgcaagggcaacatggccaccaccgagacgctgctgatccgcggcaagtcgcgcactatccgtcgtatccagtcgattcattacctcgaccgtaaagatccggacattcagcagcacatcctgtaa

SEQ ID NO: 135011 - DNA, 2082 bp, Enterobacter cloacae
atgtcaggccgcctgttagatgccgttccgctcagttcactcaccggtgtgggcgctgcgcagagcagcaaactggcaaagattggcctgcatacggtacaggatctgctgctgcacctgcctttacgctacgaagatcgcacccatctttacccgatagccgagctacttcccggagtttatgccaccgtggaaggtgaagtgctcaacagcaatatcaccttcggcggccggcggatgatgacctgccagatcagcgatggcaccggcatcctcaccatgcgctttttcaacttcaacgcggcgatgaaaaacagcctcgcgaccggtcgtcgggtgctggcctacggtgaagccaaacgcgggaagtacggcgccgagatgatccacccggaatatcgcgtccagggcgatatgagcaccccggagctgcaggaaacgttaaccccagtctatccgaccaccgaaggcatcaagcaggcgaccctgcgcaagctcaccgatcaggcgcttgagctcctggaaacctgcgcgattagcgaactcctgccgccggagctggcgcaggggatgatgagcctgccggaggcgctgcgtacgctgcaccgcccgcctccctccttgcaacttagcgagctggaaagcggcaagcacccggcgcagcagcgtctgattctggaagagctgctggcgcataacctcagcatgctggcgctgcgggcaggcgcccagcgctatcacgccctgccgctcggcgccaacgataccctgaaaaaccaactgctggcctccctgccctttaagcccaccggcgcgcaggcgcgggttaccgccgagattgaacacgatatggcgctggacgtgccgatgatgcgcctggtgcagggcgacgttggctccggtaaaacgctggtcgctgccctggccgccttgcgcgctatcgtccacggcaaacaggtggcgctgatggcgcccactgaactgcttgccgagcagcatgccaataacttccgcagctggttcgaaccgctgggcatagaagtcggctggctggcgggcaaacagaaaggcaaagcccgtcaggcgcagcaggaggctatcgccagcggcgaagtgcagatgattgtcggcacccacgccatcttccaggagcaggtgcagtttaacggcctggcgctggtgattattgacgaacagcaccgcttcggcgtgcatcagcggctggcgctgtgggagaaaggtcagcagcaggggttccacccgcatcagctgatcatgaccgccacgccgatcccccgcaccctggcgatgaccgcctacgccgatctggacacctcgattatcgacgagctgccgccaggccgaactccggtgaccaccgtcgccatccccgacacccggcgcagcgatattatcgaccgcgtgcgcaacgcctgtacccatgaaggtcgccaggcctattgggtctgtacgctgattgaagagtccgatctgctggaagcccaggcggcggaagccacctgggaagagctcaaactggcgctgccggagctcaatatcggcctcgtccacgggcggatgaaaccggcggagaagcaggccgtgatgcaggccttcaagcagggtgagatgcatctgctggtagccaccacggtgattgaagtcggcgtcgacgtgcctaactcaagcctgatgattatcgaaaacccggaacgtttgggtctggcgcagctgcatcagctcagagggcgcgtcgggcgcggcgcggtcgcttcccactgcgtgctactctataaatcgccgctctccaaaacggcgcagaaacgtctgcaggtcctgcgcgacagcaacgatggtttcgtcattgcccagaaagacctcgaaattcgcggtcccggcgagctgctcggcacccgccagaccggcaacgccgaatttaaagtggcggacttactgcgcgatcaggcgatgatccccgatgtccagcgcattgctcgccacattcatgaacgctatccgctgcaggcccaggcgcttatcgagcgctggatgccggaaaccgaacgctattccaacgcgtag

SEQ ID NO: 135012 - DNA, 690 bp, Enterobacter cloacae
atgaactcaaagcgctacgagcgtatctgcgagatgctcgccaggcgtcagcctgacctgacggtctgcatggagcaggtccataagcctcataacgtctctgcggtcatccggaccgcagatgccgttggcgtacacgaagtgcatgccgtctggccgagcagccggatgcgtaccatggcctccgccgccgcgggcagcaacagctgggtgcaggttaaaacccaccgcactatcgcagatgccgtcggccacctgaaaggccagggcatgcaaattcttgccactcacctttccgacaaagccatcgattttcgtgaaatcgactatacgcgtccaacctgcatcctgatgggtcaggaaaaaaccggcatcacccaggaagcgctggcgctggccgatcaggacatcattatcccgatgatcggcatggtgcagtcgctgaacgtctccgtcgcctcggcgctgatcctttacgaggcgcagcgccagcggcagaatgccgggatgtaccaacgcgccaacagcatgctgccgccacaagagcagcagcgcctgctgttcgaaggcggctatccggtgctggcccgcgtcgccagacaaaaaggtctgccttacccccacgttaacgagcagggcgaagtagaagccgatgccgcgtggtgggctaccatgcaggctgcgaggtaa

SEQ ID NO: 135013 - DNA, 2121 bp, Enterobacter cloacae
ttgtatctgtttgaaagcctgaatcagctgattcaaaactacctgccggaagaccagattaagcgtctgcggcaggcgtatctcgttgcacgtgacgctcacgagggtcagacacgttcaagcggtgaaccctatatcacgcacccggtcgcggtagcctgcattctggccgagatgaagctcgactatgaaacgctgatggccgcgctgctgcatgatgtgattgaagatacccccgccacctaccaggacatggaacagctttttggtaaaagcgtcgccgagctggtagagggggtgtcgaaacttgataagctcaagttccgcgataagaaagaggcgcaggccgaaaactttcgcaaaatgatcatggcgatggtgcaggacatccgcgtcatcctcatcaagcttgccgaccgcacccacaacatgcgtactctgggctcgctgcgcccggataaacgccgacgcatcgcccgcgaaaccctggaaatttacagcccgctggcgcaccgtttaggcatccatcacatcaaaaccgagctcgaagagctgggctttgaagcactgtaccctaatcgctaccgcgtcattaaagaggtggtcaaagcggcgcgcggcaaccgtaaggagatgattcaaaagatcctctccgaaatcgaagggcgtttgcaggaagcggggatcccctgccgcgtcagcggtcgcgagaagcatctatactccatctactgtaaaatggtgctcaaagagcaacgttttcactcgatcatggatatctacgccttccgcgttatcgtccatgatgccgatatctgctatcgcgtgctcggccagatgcacagcctctacaaaccgcgtccgggtcgttttaaagactatatcgccattccgaaagctaacggctatcagtctttgcacacctcgatgatcggcccccacggcgtcccggtcgaggtacaaattcgtaccgaagacatggaccagatggcggagatgggggtagcggcgcactgggcttataaagagcacggcggcgaaagcagcaccaccgcgcagatccgcgctcagcgctggatgcaaagcctgctggagctgcagcagagcgccggtagctcgtttgaatttatcgagagcgtaaaatccgatctgttccccgatgagatttacgttttcaccccggaagggcgcattgtcgaactgcctgccggcgccactccggtggacttcgcctacgcggtgcataccgatatcggtcatgcctgcgtcggcgcgcgcgtcgaccgtcagccctatccgctgtcgcagccgctctccagcggtcagactgtcgaaattatcaccgcgccgggcgctcgcccgaacgccgcctggctgaactttgtcgtcagctcgaaagcgcgcgccaagatccgtcagctgctgaaaaaccttaagcgcgacgattcggtcagccttggccgtcgtctgctcaatcacgcgctgggcggaagccgcaaacttgccgagatcccaccggagaatatccagcgcgaactcgatcgcatgaagctggcctcgcttgacgatctgctggcagagatcggtctgggcaacgccatgagcgtcgtggtggcaaaaaacctgcagcagggcgaagccgctgcggcgccggtaccggctaacgcgtcgaaccacggtcatctgccaatcaaaggcgccgatggcgtgttgatcaccttcgccaagtgctgtcgtccaattccaggtgacccgattatcgcccacgtcagcccgggtaaagggttggttatccaccatgaatcctgtcgtaacattcgcggctaccagaaagagccggagaaatttatggcggttgagtgggataaagagaccgctcaggagttcatcaccgaaatcaaggtggacatgtttaaccaccagggcgcgctggctaacctgacggcggcgatcaacaccgcgtcttccaatatccagagcctgaatacggaagagaaagatggccgcgtatacagcgcctttatccgcctgaccgcgcgcgaccgcgtgcatctggcgaatatcatgcgcaaaatccgcgtcatgccggacgtgattaaagtcacccgtaaccgaaactag

SEQ ID NO: 135014 - DNA, 276 bp, Enterobacter cloacae
atggcacgcgtaactgttcaggacgctgtagagaaaattggtaaccgttttgacctggtactggtcgccgcgcgtcgcgctcgtcagatgcaggttggcggaaaggatccgctggtaccggaagaaaacgataaaaccaccgttatcgcactgcgcgaaatcgaagaaggtctgatcaacaaccagatcctcgacgtacgtgagcgccaggaacagcaagagcaggaagccgctgaattacaagccgttaccgcgattgctgaaggtcgtcgttaa

SEQ ID NO: 135015 - DNA, 624 bp, Enterobacter cloacae
atggctcaaggcacgctttatattgtttccgcccctagcggcgcgggtaaatccagcctgattcaggctttattaaaaacccaaccgttgtatgacacccaggtatcggtctcccataccacgcgggcgccgcgtccgggtgaagtgcacggcgaacactatttcttcgtgaatcacgacgaattccgctcgatgattggcgaaaacgcgtttctggaacatgcagaggtctttggcaactattacggcacgtcgcgtaaagcgatcgagcaggtgctggcgaccggcgtcgatgtcttcctcgatatcgactggcaaggcgcgcagcagatccgtaaaagcatgcccggcgcgcgcagtatttttattctgccgccgtcaaaagatgaactggaccgtcgcctgcgcggccgcggccaggacagcgaagaggtgatcgcgaaacggatggcccaggccgttgcggaaatgagccattacgcggaatatgattacctgattgtgaacgatgattttgacaccgccctgagcgacctgaaaaatatcatccgcgctgaacgtctgcgcatgagccgccaaaagcagcgacatggcgctttaatcaccaaactattggcagactga

SEQ ID NO: 135016 - DNA, 1677 bp, Enterobacter cloacae
atgcgtaaaggagggtggtggctggcgttagggatgttctctgccagcgcgctggcgacgtgtccggactggccgccggccagaggaaggcaggagacatcacgccttcatcagcaaattgtcgcctggaaagaggcttactggcggcagggcgccagcggagtgagcgatgacgtttacgaccagctcaccctgcgcctggcgcagtggcgacaatgctttccgggcgcgacgcctgaggatgacgatctgcctccgcccaccggcgatgcgcgtcatccggtggtccataccggcgtgcgcaagctggcggatgaggacagcgttgcccgctggatgaaaaataaatccgacctgtggatacagcctaaagtggacggcgtggcggtgactctcgtttatcgccaggggcgtctggttcaggccattagccgcggcgatggtctacgcggtgaggcatggaccgcccgagcgcggcagatcccggcgctggcgaaagtgatgaccggtgaactggccgacagcgtactgcagggggaactgtttctgcgccgggacggccatgtccagcagcaggccggggggatgaatgcgcgggcgaaagtcgccgggttgatgatgcgagccgacgcggcggcggcgctcagccaactggacgtctttatctgggcctggccagacggtccgtccgatatgcgccgtcgtcagcagctgctggcgcaggcggggtttaagtacagcggacaatatacccatccggtgtcgcgcatcgagcaggtggcgcagtggcgccagcgctggtatcgctcgccgctgcccttcgtcagcgacggtgtgattgtgcgcgaaggacgcgagccgccgggacgagtctggtcgcccggaaagggcgagtggctggcagcctggaaatatcctccggcatcgcgggtgatgcaggtacgggcgatccgtttcagtaccggccgcagcggcagactcaacgtggtggccgagcttgagccccagcggctggatgataaacgcgtgcagcgggttaacgttggctctgtgtcccgctggcagatgctggatattggggttggcgatcagctgcagatcagtctggcagggcagggtattcctcgggtcgacgccgtcgtctggcggacggccgagcgccataaaccgacgccgccgccggcgaaatttaatgcgctaacctgctatttcgccacccctgagtgcagcgaacagtttctttccaggctgatctggttgtcatcaaagtccgccctgaatgtcgatggcgtgggggaaaatttatggcgcgtcattcagcagcaaaacccgatgacgcatattttttcctggctggcgcttaccgttgagcagctacaggcggtgccagggatttccgccgcccgcgggcagcacctctggcatcagtttgatctcgttcgcaaacgaccttttatccgctgggtgctggcgatggggatcccggtgccgcagggggcgctggcgcagctcgaaagcgagaactggcatctgctggcggcaaaaagtgaagcgcaatggcgcacgctgccgggcgtgggggagatcagagcccgccagctggtggctttcctgcaccatccggacgtggtggcgctggcgcaatggcttagcgggcagcgcatccccggattttaa

SEQ ID NO: 135017 - DNA, 618 bp, Enterobacter cloacae
atgctgcttcatgttctgtatttaatcggtatcaccgcggaagccatgaccggcgcactggctgccgggcgccggcggatggatacgtttggcgtcattattatcgccactgcgaccgcgctgggcgggggttccgttcgcgatatcctgctggggcactatcctcttggttgggtgaagcatcccgaatatgtcatcattgtcgccgtcgccgccgtcctcacgaccattgccgctccggtgatgccgcaccttcgtcggctgtttctggtgctggacgcgctggggctgatcgtgttttccatcatcggcgcgcagatcgccctggacatgggcgaaggcccggttatcgcctctattgccgccgtgatcaccggtgtcttcggcggcgtactgcgcgatatgttctgcaaacgcattccgctggtcttccagaaagagctgtatgccgggatctcctttgccgcagccgtactctatattgctctgcaacattacgtcagcagccacgatgtggtggtgctggctacactgctgttcggctttaccgcccgcatgctggcgctgcgctggaaactggggctaccggtcttccactacacccatgacgcccactaa

SEQ ID NO: 135018 - DNA, 1044 bp, Enterobacter cloacae
gtggcaatcgtggccggcggcgccgtcgccggatttggctggtggctgcttggtcgctacgggcggaggcgggtttctattgcggcggcggtggccaacccctgcgcacccatgcccgcgggcaccacgacgatccacgcgctgctgcagatcgtcaccgtagcgctgggctccccgcttggccgcgaggtggcgccccgggaaatgggcgcgctgggggcggggatggtggcgcgtaagctgcgcctgctggaagatgaaacccgcacgctgattgcctgtggggcgggcgcgggtctggcggcggtctataacgtcccgctggccggggcgttgttcagccttgaggtcatgctgctgtcgtttagctgggaaaaaacgctggcggcgataatgacctcggcgattgccgcctggacggccaccctggggttaggggatgaatcgcaataccattttgtttccagcgcacttccgcacacctttctctggtgggcgattctggcgggcccgattcttggcaccggcgcctggctctttcgtaaagcgaccagcgcagcgcgttcacgcgtccgaagtaactggctgatgccggtgttctgtctgctggggttttcccttcttgccatcctgagcctttatttcccggaacttccgggcaatggcaagggaccaatgcagctggcgctcagcgacgggctgcctctctccatggtcgctgtcctgttagtattgaagatggtggtgattctggcggtgctgcgcggcggcgcggagggtggattgttaaccccagggctggcggtgggcggattggtcagcctgctgctctgcgcgctctggcagctcggcttccctggcggtgataaaagcagcttcgctgtggtgggggcggccgcgtttctcgccgcctccatgcagatgccgttgaccgcagtggcgctggtgatggagtttacccacatggatcacagctatctggctccggcgctgctgtgcgcggcaggggcgtttttaacctgccgggtgctggataaaaaatag

SEQ ID NO: 135019 - DNA, 1059 bp, Enterobacter cloacae
atgaaaattaccgacagcatgcagtgcgatatctggtatcaggcgctgcttgaacgcgcggtggaattcaccggcgtttttttcgtcggcgtgaaaaccaccggcgtattttgtatctcggtctgtcgggcgcgaaaaccccggcgggaaaacgtcgaattttataatgactttaaatccgcgctggatgccggcttccggccatgcaaagtctgtcgcccgacggagaatgcccggacggcccccgcctttgttgaacaagcgctccgcctgctgcgagaagctccaaaggtccgcctcagcgatagcgagctacgtcagcacgatattagcccggaacgcgttcgccgctggttcctgcaaaaccacgggatcacctttcaggcttttcaacggatgcagcgtttgaatatggcgcttcaggaattaaaagcaggccgctcaactaccgatgtcgctttcgatagcggttacgagtccttaagcggcttcggctatacctgcaaaaaattgaccggtttcgcacccagcgcgcaacgccaggttgttttaattcatcgttttaccaccccgttagggccaatgtttgtttgtgcaacgcaacggggaatttgtctgctggagtttgtcgacagacgagcgctggagtcagaattcagcgacctgcagcggcggttcaacgccagcatcatcgcaggtgaaaatgcccacaccaggcaggcgcaacaggaaataacggagtatttcgccggacagcgtcaatcgttcgaggtggcgcttgataccccaggcagcgaattccagcgagcggtctggcgccgtttacagcacgttagcttcggtgagacgacgcattatcaatcgattgcgatggagataggtaaaccaacggccacgcgcgcggtggctgctgcaaacggcgctaaccgcgtcgcgattatcatcccgtgccatcgaattatcggcaaagatggttcgatgaccggttacggcggcggcattgcacgaaaaatatggcttattaaccatgaggcaaccatcagggaaaaacgcggctga

SEQ ID NO: 135020 - DNA, 747 bp, Enterobacter cloacae
atggactttaatgcgcttcaccagcaacaccaacctttgttgcttgccaatgtctgggatgccagcagcgctcaggctgctcagcaggctggttatcaggcgctgggatcctccagcgctgctatcgccgcaatgttagggtatgaagatggcgaagagatgagttttgacgagctgttttatgtcgtctcacgcatcaaaaccgttagcgaactgccgttaagcgtcgatttagaggcgggctacggcgcgacaaccagccacatcattgacaatatccggcgtctggcgcatctcggcgtgagtggaataaatctcgaggatagtcatgtggtggatagtacgcgtcgtcttgacgatgcggagcgctttgccgtcaaactgcaggaaatcacccgcgcctgtcccggtctgtttgttaatgtccgcaccgatacctttcttctcaacgtacaagatgcgctggttcaaacgctctatcgcggtcaactctacgccaaacacggcgcatgcggtttttttgtgccttgcgtcacccgcgcggaggatattaccgccatcgttcaccacgtgcctttacccttaaacgtaatgtgtatgcctgagctggctgacttcagcaccttatcgacactgggcgtaaaacgaatttcgatgggcaattttatttatgctgcgacgcaggccagactgaaagacttattatgtcaggtgcaaacccaacactctttctcaggtgttttttga

SEQ ID NO: 135021 - DNA, 360 bp, Enterobacter cloacae
atgagaatgaccagccgcaaaaaagagatactcagctactttgagccggataacctcgaatgggtgacgggtgagattggtgcgccgccgttcgatgtgtcgggcgtggcctaccttcttcatggcatggcgtcgttcgataagcgccaccagctcgaatcaacccggcgaactcttgaaagtatggttgctggtgggttgcttgagcgggtgacagtgtacgaatcccggcagataaaaagcggcggtgagactagcgcaacggtcgtgcgctacggtttacccggacagtgtgccgttgtgcgcgatactggcggcgctgataacgcaatatcaggtgaatacatgcgggtcagttga

SEQ ID NO: 135022 - DNA, 612 bp, Enterobacter cloacae
gtgagaaacagaacgcgcagctataccacggacttaccctgcattagtctgaaattccttgcgcacatccgcagcaatttggtggacgcagtacccggtacgcagctttcctgccagacagagcgcggaaccctgcatatctcccgacaggcagacggctacgccatgacgatcaacggcgttacacggacaatcagaaccacgaccacacaggctggctacggagttcggcaatggtatgtttgccctcattgcacgaaacgggtagcaaagctgtatatcggcaggaaagatatcggatgccgggaatgctggaatctccactataaaagccagagtgccgccagactggacaggatgcgcatgaagatacaccagcagcgatacgcgatttggggcaacaatgaccttaccaataatctgtttaatgacattcgcatgttcccgaaaccaaaggggatgcgctgggctacgttttacaggaaacgggcggagttgtcggcaatggagatggcttactggaaggaattcagtccggtagtagatagaatcacgggcgtgattgagcgtaagacagggaaagctgccaaagatactggcccgaagctgtaa

SEQ ID NO: 135023 - DNA, 306 bp, Enterobacter cloacae
atgatacgcgacaaaaaggccgaagaactggaggctaaagggttgttccgcagggcggcggcgcggtggcttgacgttatggcggcgtgtaccgaggatgctgacagggagcaggcgaagcggaaccgtgaaagatgccttgaaggcgtaaagcgcccacgctttaagctggaggaatttgcagaccttcacagagcggcaaaagccaccaccaaccgcatggggatagcgcagaacaacggggaggctttcagattgccagccagcagaaaacgagcacgtaaggcgcgcaatgatggcgcataa

SEQ ID NO: 135024 - DNA, 642 bp, Enterobacter cloacae
atggatacacagaacacagttgttgagattggctactatcgttggccgcgagatcttgccattcatgaagccggtcatgccattgctgcatggttttttggcaattcgcaggtagaaatttccctagcaggtaagggaaggatcgcgagaacttatctttacggtgaagtcgatgaatgtaatgccgtcgctgtatggagggtgaattatccgcgaaccgctgacgatataatgccttaccatttgtcttctactgaaaagaggtctgatctgataaatcaagtgagcggagcaatggtctgttctctggctggcatcgtcgcgcaatcaaagtacaccggagaaagtgtcaatgccttgatgaaaacgtcaggtaagtatgacatgcgaaatgttcataatttgatcgaggtgtatcgtgccgctggtggaaaggatgctgatatacagcacaaatccctttcccgcgctcaggcgttgattaccttgaaatggtgggacactatcgcgctggctaagatactggagaatcgtaaccacatgccagccagtaattttcaggccattatgggcactattgatagttatagcccaaaggttttgacgctggatgaactagatgaattagcgggtgaggaatga

SEQ ID NO: 135025 - DNA, 456 bp, Enterobacter cloacae
atgacagcacaactatcagcatacgggcggctggtggcagatccccagaccagaacgacgaacagcggaacgagcatggcaatggggcgtttagcggtatcactgccctgcaatgccgcagcagaggggcaggctactttctggctgggcgttatcgcctttggtaaacaggccgacgcgctggcccgtcacgtaaagggcgatatgttgagcgtatcgggggccatgcagcttaaccaatggacggggaaagatggcgggacacagcagggctatcagatagtggcagacagtgtaatcagcgcaaagacggtaaggccgggcgggaagcgtagcgcgtcagctggcacagataataagggccataccacacaacccgcgccgggatgggaaatatacgataccccagacgcctttgatcagcgcccgccgtttgatgatgaaacacctttctga

SEQ ID NO: 135026 - DNA, 210 bp, Enterobacter cloacae
atgattcagctaaagggcgaaaaaatgaacgaacatcataaaaagcagatcgaagttattagagagattgaagcgcaggggttcaccgcgcaggaggcggcggccttgttactggctggcgaattatcccgactaaatgacagcatggactacctgaaacgagccgccgggaatattgacaacacgttatcaagaatggagggcgcttaa

SEQ ID NO: 135027 - DNA, 2442 bp, Enterobacter cloacae
atgcgtaatatcgaccttatccgcgaagtgaccagcgccgccgctggtaaatggccttatgtgctggctggcctgtctatcgacgtgcctgattcatcgcgccgtcatgccccctgccctgcatgtggtggaaaagaccgtttcagattcgacgacaacgggcgcggcagctttatctgcaaccagtgcggcgcgggcgatggcttagacctgattaagaaggtgaacaactgcgacaccacggaggcggcacagcttgccgctgatgtgctgggtattgattaccgggagacggaaacagacaggaaagcagccagccagagaagggggcaactggaagcagaccgccagcggcatgagcaggagcgacagaaaaaggccgcagaggacgcagagcagcgaagggctacgtttgcccgtctgtatggtgaaatgcgccagaacgtcactgagggcgaatctgagtacctgcaatcaaaagggctggccgggtttaattacccgctaatgccggatggttcgttattgctggcgctggtggacgaatccggcgcagtggcagcagcgcagaccattacaccgcatggagaaaagcgacttctgacgggttcggcaaagcgcggggcatatcacgccgtaaacgcgccagaatcgccgcagagcgttttaattgccgaggggctggcaacggccctttcagttcacctgatgcgcccggacgcgctggcagtggcagcaattgacgcgggcaacctgttacccgtcgcggaagtcatgcgccggaagcacccggatgcgcggatcatcattgccgcagacaacgaccaccacgacgaccagcagaacaccgggaagatagccgcagagaaagccgccttatccgtggctggctgggtatcaatgccgccgactaactataaagccgactggaacgaccaccaccagcaaaacgggctggaagtcgctacggctgcgtttaacgattcgatgtaccaaccgcagggggaagatgtgaaaccgcagctacaggccattgagggcggtaaaaaacgccggagcgcagaggccggggatatttcacagatggccgcgagccagaaggcgcggctactgtctgcccggtgggagcgtctggcagtaaacaccgacagtcaggcggtttatcggtacgcttgcggggtgtgggagaggctgccagaggcagagcttgaacgggagatggtggcaatattcgacgaacacgaggcgcattacacggagaaaggcgttaagtcggttgtagccaccatgaagctacagatcccgcccaccggagagcagccagcggattgtatcggattcagtaacggaatttatgacctgaaagcgcaggagttcagaccgcacgcgcctgataactggctgatgaatcacaacggcattgaatacacgccagcggagcgcggggagacccttgcaacccatgcgccgaatttcacccgctggattaatcacgccaccggagggaatggcgacagagccgcgcggattaaggcggcgttgtttatggttctggctcgccgtcatgactggcagctatttatagaagtaaccggggaaggcggcagcgggaaatctgtatttagcagcatagccgtatcactggcaggtgagcacaacacagccagcgccagcatgggaacgctagacacagccagagggcgggcgcagcttgtgggaaaaagcctgattatcatgccagaccagacccgctatgttggcgaaggcgcagggataaaggccattacaggcggcgacccggtagagattgatggtaagtatgaaaagcagttcaccaccgtgctgaatgccgttgttctcgcaaccaacaacgaaccaatgacctttaccgagcgcaacgggggcattgcccgccgccgtgtgatattcccgttcgataatccggtatcagaagcggagaaagaccccgacctgacagcgaagatccgccgtgaaatgccggtaattattcgtcacttgctggcaatgtttgccgaccagaacaaagctaaaacgcttttaatcgagcagcgcgattccgcagaggcgctgggcgttaagcgcgggacagatccggttatagacatgtgcgcggccttgtattttatgaacgagccgaggggcctgatgatgggcggcggaacgtgggcgggccagccagagccgagggtgtatctctatcatctttacctggcattcatggaatatcacgggctgggtaagccgctttccgtcaacaagttctcacgcgccattaaatcagccgccagagaataccgggccagctacctgacacgcagcattaacggcagagcgcagacgaacgtagggatcaatgagctggcggaggagtttataccgcgagcatatggcagcagcaccgccgaagggggcgatgaatag

SEQ ID NO: 135028 - DNA, 627 bp, Enterobacter cloacae
atgagcaacgtagagaaattcacgcagagaaatgacgacttattacacgccgaagccacaccgcacggcgtcaatatcatgacccgcaatgatgccgggggatatgagcagtttgctcttatcagctacgagagcgccgtgaacggccttgacgccggagagtacgacgacaagccagatatcggatacgccatacattttgccgttgctgatggcggggcgcgtggctggttcgacttcaccgcgcagcataacgtcactatgtggcgctggctgattgctgccactttcatttctgagatgaagcgcgaaaacggcacaaccaccgtcacggaggctgacggcgcaacgtcaaaagtagcgatttactccaatggcacggcggggattgtggtttacccgttcgcggaacgtctggcgatggcgaataacatcgagggcgcaatgattgagcgctacggcattgagcagggagcggcgaacgccattgttttttatcaggccatgatcgacacggagcgcggcgagctgaccccgttcgggcgtcagacgctggctgagctacacgatggattcatttccgatctgaatgaaaacggcttgcctgaaatgccagcggcgcactga

SEQ ID NO: 135029 - DNA, 213 bp, Enterobacter cloacae
atgagcaagttatccctgattgattcagcctgccgtatcaagcaagcgcagcaagttctttctctttggcttgaagcaccgattaaaaaagatagcggcacggatcatcttatcggcgcagtcattaccgttctggatggtatccccgagctgatggattcagtagaaggcgagttggttgatatggatttgggtctggacggcaaagcatga

SEQ ID NO: 135030 - DNA, 261 bp, Enterobacter cloacae
atgaatacagtcgccgtaattgaaccagaaacaatcccgacaggtgacgcaacggcagcggtgcgctatgccagtgaattgcttgagttatggaatctttatctggacgggccattacgtgccgccaatccgctttatggcgccagacttgcgacattaatcaccgagttgagatgcgcaaccattagaaccgagcgcaaagttaatcgcctggctgatgaactaacgaagattcgtgagtaccgggagggcagcgcatga

SEQ ID NO: 135031 - DNA, 180 bp, Enterobacter cloacae
atgcttaattacttccgtgttgcaggatgcgccaccacccggagcggcgaattagtcgagttcgtttatatcgttgacgcccacagcaatatcagcgccaaagctgaggcgctaaatcaggccagaaatgaacgcctgtcccacatccagattaaccgcattcgtgaggtggcagcatga

SEQ ID NO: 135032 - DNA, 810 bp, Enterobacter cloacae
atgactatcgaaaaaagccgattcagttcgggggccgccccgcaacccaacgttaacacgggagtaattaacggcaacgacttcgccgctattgttcccgttattgccggacgcattggcgggcgtgaagccaatactgtgagcgctaaggcgttgcataaggcgctgggggtgggccgcgactttactaactggattaaaggccgaattgaccagtacggttttattgccggaaccgattttatccgtgttgaaaatttgagcacgccaaaacgggcgagcgcaaaaactcgccagcaaatagagcatgattacctgctatcgctggatatggctaaagaagtggcaatggttgaacgcaacgagcagggccgcgccgttcgacgttacttcattcagtgtgaagaggcactacagcgcagcgtgccagagattgccgctcagtatcgccggcacctcaaagcccgcattggtgctgccaacctcttcaagccgatgtgcgccgctctggatgctgcccgggcagaacaggggaaagagacgcaagcccggcactacagcaatgaaagcaacatgatcgcccgtattgtgctgggtggcatgaccgctaagcagtgggcgcaggtgaacggtatcgacggcgaaccgcgcgatagcatgagcgccgcccaactggaacacctcagctacctggagggtacaaacatcacgctgatcgatatgggcatggagtacggccagcgtaaagcggaattaatacgactgtctcagcgctggctggcgaagcgtatgggggtaaaccatgcgtaa

SEQ ID NO: 135033 - DNA, 438 bp, Enterobacter cloacae
atgaaaaaagaaaaccgccccggacagcaggcggctaacaacatagatattcgcggatctgatgttacgccaccagcgcccaccacacaagcgccacgccgcacaccgaagaagcaccgcgcccgcgtctatatgctacgcactggcgtagagggatggacagaaaacgacattcttcgctattgccgcctttcgtctggaaggaactacgccagcgagttagagcgcaggcttgatattcagcttgagcgtatcgacgaaaagaatcccgacgggatcgggtcacatttacgctatcgctttgccgggcgcggtgacgttctaaaagttattcggcttgtgaaccataacgccgacgctgggggctatcaggggctttctcagcctgaaattgccgacattctcaatctatacccggacaatctcaccgccgcataa

SEQ ID NO: 135034 - DNA, 219 bp, Enterobacter cloacae
atggcaacacataacgcaacaacccacacaatcccccaatctggctacatacgacgcttccgccttgctgaattgctgggcgttagcgtttcaaccattgatcgcaaagttcgcagcggctcactaccgcgcccagtaaagctgggcgagaagattaccgcctttgatgcggtagagattaacaactggctggcagagcgtcgcgggaaggtggcctga

SEQ ID NO: 135035 - DNA, 924 bp, Enterobacter cloacae
atgagcaaaaaagaagaccacggcagtattaaaatcccacctatggaatactttacgctcgacagggcggccagtattttgcaatgcgatacagatgatttacttcactatggagttattggggctataccgttatgtgtaatgatgaggcatttctgttctgcgctggtttttgtaggtggcaaagacattcaagatccaattgagttttataacgaacacaaagtaaactcatcatttctttttcgtgatagcaactatgtatctcattttaattccacgctcaccgaacatgacgcatacaaaacagatagtgggcttattttatttagaggattggcgaacgggctatggtgtctgggacgcagtgaaatagaaagtcttctttattctaagagggcaagggtgatagacacgacaattttcaggccgttcggatgggacactttccgcgagaagactggcctttcgtgtcagataattagcgatagatattttaatcagagctggctacctacgctaaacagacaactagccgaaagcatagggtttcagttaagtgagagccgaaaacctgcgcttaatgagactttgacaacttccgatctatttattgccagagataccattttaaaactcaaagacgcaatagatacaggcgagccgattaaaagcatgattaacggaggtgttattcccttaccgccgacggaaatgaatgtaggaaaaccagtaaaaacaacagaaaaacagatgagactaattgtcgcattacttaaacgtataggcttaaccgatagtgatttaaaaggcagcattacacaactgagaaataaagctaacaataaaggtgaggagctaccactcccggatgatgataagacgcttattgattggctgcgaaaagggggagtcaaccgataa

SEQ ID NO: 135036 - DNA, 1260 bp, Enterobacter cloacae
atgccaaagattacagacatgcagatccgcgcatggataaaggccggagatagatttgaaggaagggccgatggcaacggcctttatatttgctaccccaaaaactacacagtccctttctggcgctttcgctataaattcgcaggtaagcagcgagcaatggttatcggctcatatgccgagctatcactatcaaaggccagagagacagccaaagagctatcagctcgcgttgcgctgggttatgacgttgccggggagaagcaggagcgcaaaaccgaagcgctggcgaagatggaagcagaaaaaaacgccatgcgcgtttcagagctggccgctgaatactttgagcgtcagatactgccccgctggaagcacccagatatactccgccgccgtatcgacaaagatataaacccctgcattggcagcatgaaggtggaggacgtgaagccgcgccatattgatgacatgctgaaaggtattgttgaccgtggagcgccgaccatagcaacggacgtgctgagatggacgcgccgcatattcgactacggaatcaaacggcacgcgctggagattaacccctgttcagcctttgaggtggcagacgctggagggaaggaggttagccgcgaccgctggctaacacgcgatgagttaatccagctattcaaagccatgcgcacggctaagggtttcagtcgccagaatgaaatcacgttcaaattactgttagcgttatgcgtccgaaaaatggagttatgcgccgcccgctgggaggagttcgaccttgataaagccgtatggcgcttgccagaggaacgcagcaaaaacggcgacgctatagacattccattagcgccgccagcagtcgaatggctgagagagcttaaaacgttctcatgcaatagcgcatgggtactgccagccagaaagatgcaaaaccgcatgatcccccatattcaggaaagcaccctgcccgttgcgctggcgaaggttcgcgctgaaatgccggacgtgccgaacttcactattcacgacttccggcgcacggcccgcacccatttagccgcgctgggcgttgatccggtagtcgcagaaagatgccttaaccacaaaattaaaggcgtggagggtatctataaccgccaccaatactttgatgaacgccgggctgcgttaacacagtggacgggcttgctggtggcactggaacgcggcgaagaatacaacgtaacgccattgagaaaggcgaagtaa

SEQ ID NO: 135037 - DNA, 864 bp, Enterobacter cloacae
atgatccgcagtatgaccgcctatgcccgccgtgaaatcaagggtgactggggtagcgccgcatgggagctgcgctcggtaaaccagcgctatctggaaacgtacttccgcctgccggagcagttccgtagtctggagcccgtggtacgcgagcgcattcgcgcccgcctgactcgcggtaaagtcgaatgcaccttgcgttttgaacaggatcccagcgctcagggtgaactcatcctcaacgaaaagctggctaaacagctggtaaacgctgccaactgggtgaaaatgcagagcgatgaaggggaaatcaacccggttgatatcctgcgctggccgggcgtgatggccgccaaagagcaggatctcgacgccatcgccgccgacattctggccgctcttgacggcgcgctggacgacttcatcgtcgcccgcgaaacggaaggccaggccctgaaagcgcttatcgagcagcggcttgaaggcgtgagcggcgaagtggcgaaagttcgcgctcatatgccggaaattctccagtggcagcgcgagcgtctggtcgccaagctggaagatgcggaagtgcagctggaaaataaccgccttgagcaagagctggtgctgatggcgcagcgtatcgacgttgccgaagaactggaccgtctcgaagcgcacgttaaagagacctataacattctgaagaagaaagaagctgtgggtcgccgtctcgactttatgatgcaggagttcaaccgtgaatcgaacaccctggcgtcaaaatcgattaacgccgaggtgaccaactccgcgattgagctgaaggtactcatcgagcaaatgcgcgagcaaatccagaatatcgagtaa

SEQ ID NO: 135038 - DNA, 348 bp, Enterobacter cloacae
atgaccctgccggacgagctgattgaagcggcgcgtatcgatggcgcttcgccgatgcgcttctttcgcgacatcgtgctgccgctgtcgaaaaccaacctcgccgcgctgttcgtcatcacctttatctacggctggaaccagtatctgtggccgttgctgattattcaggatgtgaatcttggcaccgccgtcgccggtattaaaggcatgatcgccaccggcgaaggtactacccagtggaatcaggtgatggcggcgatgctgctgaccctgatcccgccggtcgtcatcgttttagccatgcagcgcgcgtttgtgcgcggcctggtcgatagtgagaaataa

SEQ ID NO: 135039 - DNA, 1071 bp, Enterobacter cloacae
atggctggtttaaaactacaggcagtaagcaaaagctgggatggcaaaacccaggtaattcaaccgctgacgctggacgtggcggacggggaatttatcgttatggtcggcccgtcgggctgcgggaaatcaacgctgctgcggatggtcgcgggacttgaacgggtaaccagcggcgatatctggatcgatcgtaaacgggtgaccgagatggagccgaaagatcgcggcatcgcgatggtgttccagaactatgccctttatccgcatatgagcgtggaagagaacatggcgtgggggctgaagattcgcggcatgggtaagggattgatcgccgagcgggtgcaggaggcggcgcgcattcttgagctggatggtctgctcaagcgccgcccgcgggaactgtccggcggccagcgccagcgcgtggcgatgggccgcgccatcgtgcgtgacccggcggtattcctcttcgacgaaccgttgtcaaacctcgacgccaagctgcgcgtgcagatgcgtctggaactgcagcagctgcatcgccgcctgaaaaccacctcgctgtacgtcacccatgaccaggtggaggcgatgaccctcgcccagcgggtgatggtgatgaacaaaggcgttgccgagcagatcggcaccccggtggaagtgtatgagaagccagccagccgctttgtggcgagctttatcggcagcccggccatgaacctgctggaagggcgcatcagcgatgacggcggtcgctttgagctggcgggcggcatgcagctgccgacgaatcatgagcaccggcgccacgctgggcgtaaaatgacgctcggtatccgtccggagcattttatcttaagctcgcaggcgcaaggtggtattccgctgctgatggacaccctggaaattttaggtgccgataacctcgctcacgggcgctggggcgaacagaagctggtggtcagactgccgcaccagcagcgcccggcggcaggcagcacgctatggctgcatctgcctttggaacatctgcacctctttgatggtgaaacaggacaacgcgcatga

SEQ ID NO: 135040 - DNA, 741 bp, Enterobacter cloacae
atgagtaactggccttatccccgcatcgtcgcccatcgcggcggcggtaaactggcgccggagaacaccctggcggctatcgacgtcggcgcccgctacgggcacacgatgattgaatttgacgccaagctgtcgaaggacgggcagatctttctgctgcatgacgataatctcgaacgcaccagcaatggctggggcgtggcgggcgagctggcgtgggacgatctgctgaaggtcgatgccggtagctggttcagccgtgaatttaagggcgagccgctgccgctgctctcccaggtggcggagcgctgccgtcgtcacggcatgatggcgaatatcgaaattaagccgaccaccgggctggggccgcagaccggcagagtggtggcgctggccgcgcgcgatctatggcaaggcatgaccgcgccgctgctctcctcttttgaaatcgacgcccttgaggcggcgcaggaagccgcgcccgagctgccgcgcgggctgctgctggatgagtggcgcgatgactggcgcgaattgaccacccggttgggctgcgtgtcgattcacctcaatcacaaactgctggatgcggcgcgggtggcgagcctgaaacaggctggcctgcacattctggtgtacacggtcaataaaccccagcgcgccgccgaactgctgcgctggggcgtagactgcatctgcaccgatgccgttgatgtcatcgggccgaatttccagccttaa

SEQ ID NO: 135041 - DNA, 321 bp, Enterobacter cloacae
atgaaagcgattctgtttctggcggcgctgatgccgcttggcgtattagcccagccgatcaatattaataacaaccctaaccagccgggttacgtggtccccagccagcagcgcatgcaaaatgagatgaagatccagcaacagcagcagcagagcatgctgaagcaggatctgaacaatcagacccgctcgcagcagcagcatttgcaaaaccagctgcagactaatcagcagcgcgcggcccagggcggcaatctgaatgcgccgcagcaggtgcggccaaataacaacggtgggatgctgcggcagactaatccgtaa

SEQ ID NO: 135042 - DNA, 1746 bp, Enterobacter cloacae
atgataaaaacaacaatatggcgtcaggtggtcatcgctgcgttgctggcggggggcagctttaccgtcgccgccaatccgccaccgccgccgccggtctcttatggcgtagaggaagatgtgttccacccggtacgcgcccggcaggggatggtggcctcggtggacgcgctggcgacccgcgtcggcgtggatatcctgcgccagggcggtaacgctgtcgatgcggcggtagcggtaggctacgcgctggcggtcacccatccgcaggccgggaatattggcggcggcggttttatgatgctgcggactaaagacggcaagaccacggcgatcgatttccgcgaaatggcgccagagcaggccacccgcgacatgttccttgacgaccagggcaacccggacagtaaaaaatcactgacttcgcatctggcctccggcacgccaggcagcgtcgccggtttctccctcgcgctggaaaagtatggcaccatgccgttgaacaaagtgatccgtccggcgattaagctggcggaagaggggtttatcgttaacgatgcgctggcggacgatctgaagacctacggcagcgaagtgatcccgcagcatgaaaatagtaaagcgatcttctggaagaacggcgagccgctgaaaaagggcgatcggctggtgcagaagaacctcggtaagagcctggagctgattgccgagcacggcccggacgccttctataaaggggccatcgccgaccagatcgctgacgagatgaaaaagcacggcgggctaatcaccaaagccgatctcgccggctataaggctgtggagcgtacgccggttagcggcgagtatcgcgggtatgaggtttactctatgccgccgccgtcctccggcgggatccatatcgtgcagatcctcaatatcctcgaaaacttcgatatgcagaaatatggttttggcagcgccgacgccatgcaggtgatggcggaggcggagaaacacgcctacgccgaccgctctgaatatctcggcgaccctgacttcgtcaacgtgccgtggcaggcgctgaccagcaaggcttacgccaaagcgatcgccgccgagattgatgtcaacaaggcgaagccttccagccagatccgtccgggcaagctggcgccctatgaaagcaaccagaccacccacttctcggtggtcgataaagacggcaatgcggtggcggtgacctatacgctgaataccaccttcggtaccggcattgtggccggtgattccggcattctgctcaataaccagatggatgatttctcggcgaagcccggcgtgcctaacgtctatggtctggtgggcggcgacgccaatgcggtggagccgaaaaaacgcccgctgtcgtcaatgtcgccgaccattgtggtgaaagatggcaaaacctggctggtgaccggcagcccgggcggcagtcggatcatcaccaccgtactgcagatggtggtcaataccatcgatttcgggatgaacgtcgcggaagccaccaacgcgccgcgtttccaccatcaatggctgccggatgagctgcgggtggagaaaggctttagcccggataccctgaagctgctggaggcgaaggggcagaaagtggcgctgaaagaggcgatgggcagtacccagagcatcatggtggggccggacggcatgctgtatggcgcctccgatccgcgttcgccggatgatttaacggcggggtattga

SEQ ID NO: 135043 - DNA, 489 bp, Enterobacter cloacae
atgagtgacatcgtgatacgccatgctgaaccgaaagatattgacgcgattcgtcaaattcacgcccagccggaggtgtatcacaacacgctacaggtccctcatccatccgaacatatgtggcgggagcggctaaccgatacgcccggcgtgaagcagctggtggcctgtatcgatgagcaagttgtcggccatttaagcattgccgtcgtccaacgtccccgccgtagccacgtcgccgattttggtgtcagcgtggattcgcgctggcacaaccgcggcgtcgccagcgcgctgatgcgtaccatgattgatatgtgcgacaactggctgcgcgtcgagcgtattgagctgacggtgttcgccgataatgccccggcgattgcggtgtataagaagtacggctttgagatcgaaggcaccggcaggcgttacgcgctgcgcaacggtgagtatgtggatgcgtattatatggcgagaatgaagtag

SEQ ID NO: 135044 - DNA, 654 bp, Enterobacter cloacae
atggacaaacagtatctcgccataaacggcgccctttttttctggcttctcgcgctgatcgcctggtctgtcgatgcaagcgcgctggcgcgcctggcggccgcctgcgcgcttatcgctttcctcctccatagccaacggaacaagattaacgcgatgtttattaagaaaaataaaacggaacctcagatatcagaagcagccacgcctccggcaattaacccagaacccgaagcggtcgccagcaaaaaacacgagactacggtcatcgccagcggggtgcatttcgtcggcaatatagtcgccagcggccatgtctatatccacggtcaggtcaccggcaacattgaggccaaagagcatttgattaaggtaatgcgtgaaggccaggtggagggcaacgtcagctgccgggagctaataattgacggcaaggtgcaggggcagtgtcatggcgacagcatcaccatcgaggagcacggccatctggagggtaccctcgcctatcgcgcgctggcgatcaagaaaggcggcgtttttagcggtcgcgctgaactgctggccgccgcggagaacaaaagtcatattctcggtctggtagcagacgcaccctccaaagccgacgcggagcccgtcaggccgcagagcgcctga

SEQ ID NO: 135045 - DNA, 1038 bp, Enterobacter cloacae
atgactctgcactgcgcatttattggctttggtaaaagcaccacccgctatcaccttccttacgttttgcaccgcaaagaccgctggcaggtagcgcacatttaccgccgccgggcgaagcccgaggagcaggcgccgcagtattcccatattcatttcaccagcgaccttgatgaagtattaaacgatccactggtcaagctggtggtggtctgcactcacgccgacagccattttgaatatgcgaaaaaggcgctggaggcaggaaaaaacgtgctggtggaaaagccgttcaccccgacgctggaggaagcaaaaactctgtttgccctggcgaacagcaaaggcctgacggtgacgccctatcagaaccgccgtttcgactcctgcttcctgaccaccaaaaaggtgattgagagcgggaaactcggcgaactggtggagatcgaaagccatttcgataattatcgcccgctggcggagaccaaccccggcggtccgcaaaacggcgagttctatggccttggcgtgcataccctggatcagctcatttcgctgttcggccgcccggaccatgtctcttacgatctgcgctcgctgcgcaataaagccaacccggatgacacctttgaagcccagctgttctacggcgatatgaaggccatcgttaagaccagccatctggtgcagatcgattacccgaaatttatcgttcacgggcacaaaggttcgtttgtgaagtacggcattgaccagcaggagaccagcctgaaggccaatatcatgccgggcgagccgggatttggcgcggacgacagcgttggcgagctggtgtatgtcaacgaggcaggggagatggtgcgcgaagcggtgccgctggagagcggcgattatggccgggtgtacgacgcgctgtacgacaccctcgtcaacggccagccgaattacgtcaaggaaactgacgttctcaccaatatggagatcctgcagcgcggctttgagcagccttcaccggccaccattacccttacccgataa

SEQ ID NO: 135046 - DNA, 996 bp, Enterobacter cloacae
atgaaaaagaaaagacccgtacttcaggatgtagccgatcttgtcggcgtgaccaaaatgacggtcagtcgctatttacgcaacccggagcaggtctccgaagcgctgcgtggcaagattgccgttgccctcgatgaactgggttatattcccaatcgcgcccctgacattctttccaacgccaccagccgcgccatcggcgtgctgctgccgtcgttaaccaatcaggtcttttcggaagtactgcgcggtatcgaaagcgtcaccgacgccttcggctatcaaaccatgctggcgcactacggctataagccggaaatggaagagaaacgcctcgaatcgatgctctcctggaacattgatggcctgatcctcaccgaacgcacccatacgccgcgcaccctgaagatgatcgaagtcgccggcattccggtggtggagctgatggacagccggtcgccgtgtctcgatattgccgtcgggtttgataactttgaagccgcccggcagatgaccgcggcgatcatcgcccgcggccaccgccatgtcgcctatctgggggcgcgtcttgatgaacgtactatcatcaaacagaaggggtacgagcaggcaatgcttgacgccgggatgacgccctacagcgtgatggtggagcaatcctcgtcctattcttcggggattgagctgatgcgccaggcgcgccgcgaatatccgcagctcgacggcattttctgcaccaacgatgacctcgcggtcggcgcggcgttcgagtgccagcgtctgggactgaagatccccgatgatatggcgatcgccgggttccacggccatgatatcggccaggtgatggagccgcggctggccagcgtcctgaccccgcgcgagcggatggggcgcatcggcgccgaacggctgctggcgcgcattcgtggtgaagcgattacccctaagatgttagatttaggtttcacattgtcaccgggcggatcaatttaa

SEQ ID NO: 135047 - DNA, 576 bp, Enterobacter cloacae
atgagtcagccccggcgcggcgtaccagtccagtgggaggacgctttgagcacgactaaccatgatcaccacgtctatgtcctgatgggcgtttccggcagcggaaaatccgctgtcgccagcgaagtggcgcatcaactgcatgccgcgtttcttgacggcgactttctccatccgcgcagcaatatcaccaagatggcctccggcgagccgctcaacgatgacgaccgcacgccgtggctgcaggcgctaaatgacgccgcgttcgccatgcagcgtaccaacaaggtgtcgctgatcgtctgctcggcgctgaagaagagctatcgcgacattctgcgcaagggcaacccgaacctctccttcatctacctgaaaggcgatttcgacgtgatcgaaagccgtctgaaggcgcgtaaagggcacttctttaaaacccaaatgttggtgacgcagtttgaaacgctgcaggaaccaggcgccgacgagagcgatgtgcttatcgtcgatatcgaccagccgctggaaggcgtggtggccagcaccatcgaggtgatcaacaaaggcagtcactag

SEQ ID NO: 135048 - DNA, 1266 bp, Enterobacter cloacae
atgcacgccttcgtggctttgatggtggtttctattggcgccggcctcttctccggcatgccgctggataaaatcgcggcgacgatggagaaagggatgggcggtacgctgggcttcctggcgatcgtcgtcgcgctcggcgcgatgttcggtaagatcctgcatgaaacgggggcggtcgatcagattgccgtcaagatgctcaaatcctttggccacaatcgcgcgcactatgcgattggtctcgccggtctcatctgcgcgctgccgttgttcttcgaagtggcgatcgtactgctgattagcgtcgccttctcgatggcgcgccataccggtactaacctcgtgaagctggtgatcccgctgtttgccggcgttgccgccgccgcggcgtttctgttgcctggaccggcgccgatgctgctggcgtcgcaaatgcacgccgactttggctggatgatcctgattggcctgtgcgcggccattccggggatgattatcgccggtccgctatggggcaacttcatcagccgctacgtcgaattacatattcctgacgacgtcacggaaccgcatctcggcgaaggcaagatgccctccttcggcttcagcctggcgctgatcctgctgccgctggtgctggttggcctgaaaaccatcgccgcgcgctttgtgccggtgggttccactgcctacgaatggttcgagtttatcggccacccgttcaccgcgatcctggtggcctgcctggtggcgatttacggcctggcggtacgtcagggaatggcgaaagaccgggtgatggagatttgcggccacgcgctgcagccggccgggattattctgctggtgatcggggctggcggcgtcttcaagcaggtgctggttgactccggcgttggcccggcgcttggtgaagcgctgaccggaatggggctgccgatcgccattacctgcttcgtactggcggcggcggtgcgtatcattcagggctctgccaccgtggcgtgcctgacggcggtcggcctggtgatgccggtgattgagcagctgaattacagcggcgcgcagatggcggcattgtctatctgtatcgccggcggctcgattgtggtaagccacgtgaacgacgccggcttctggctgtttggtaaatttaccggcgccagtgaagcccagacgctgaagacctggaccatgatggaaaccatccttggcaccaccggggcgattgtcggtatgatcgccttccagctgctgagctaa

SEQ ID NO: 135049 - DNA, 1107 bp, Enterobacter cloacae
atgaaaaatgttggttttatcggctggcgcggaatggtcggctctgtcctcatgcaacgcatggttgaagagcgcgatttcgacgccattcgcccggtgttcttctctacctcccagctgggacagccagcgccgtcattcggcggtagcaccggtggcacgctgcaggatgcgttcgatctggacgcgctgaaggcgctggacattattgtcacgtgccagggcggcgattacaccaacgagatttacccgaagctgcgcgcaagcggctggcagggttactggattgacgcggcttcttcgctgcgcatgaaggacgatgcgatcattatcctcgacccggttaaccaggatgtgatcaccgccggcctgaacaacggcgtgaaaacctttgtcggcggcaactgcaccgtcagcctgatgctgatgtccctcggcggcctgtttgctcaggatctggtggagtgggtcagcgtggcgacgtaccaggcggcttccggcggcggcgcgcgtcatatgcgcgagctgctgagccagatggggcagctgcataatcatgtggctgcggagctggcggacccggcttccgccatcctggatattgagcgcaaagtgacgtcgctgacccgcagcggcgagctgccggtcgataactttggcgtaccgctggcgggcagcctgatcccgtggatcgacaaacagctggataacggtcagagccgcgaagagtggaaaggccaggcggagaccaacaagatcctcgccacctcgtccgttatcccggtagacggcctctgcgttcgcgttggcgcgctgcgctgccacagccaggcgtttaccatcaagctgaagaaagatgtttctatcccgaccgttgaggagctgctggccgcgcacaacccgtgggccaaagtggtaccgaacgatcgtgagattaccatgcgcgagctgaccccagccgcggtgacgggcaccctgaccaccccggtaggacgcctgcgtaaactgaatatggggccggagtatctatcggcctttaccgttggcgaccagctgctgtggggcgccgcggagccgctgcgccggatgcttcgccagctggcgtaa

SEQ ID NO: 135050 - DNA, 2187 bp, Enterobacter cloacae
atgtctaatcatattgatagagacgtgattaatgcgctaatcgccggtcatttcgcggatcccttttccgtgctcggcatgcaccgtactgacgccgggctggaagtgcgcgcattattacccgatgccaccgacgtgtgggttattgaaccgaaaaccggacgcaaagtcggcaagctcgaatgtctcgactcgcgtggtttcttcagcggcgtcctgccgcggcgtaaaaacgcttttcgctatcagctggccgtcacctggcacgggcagcagaatctgatcgatgacccttatcgctttggtccgctgttacaggaccttgacgtctggctgctgtcggaagggacccacctgcgcccttatgaaacgctgggtgcgcacgctgccaccatggacggcgtcaccggtacccgtttctcggtgtgggcgccgaacgcccgccgcgtatcggtggtggggcagtttaactactgggatggccgtcgccacccgatgcgattccgcaaagagtccgggatctgggagctgttcgttcccggcgcgcacaatggccagctgtataaattcgaactgattgacgcccacggcaatctgcgggtcaaagccgacccttacgcctttgagtcgcaaatgcgtccggaaagcgcctcgcttatctgcgacctgccgcccaaagtggaacagccagcggaccgcagagcggcgaaccagtttgatgccccgatctctatctatgaagtgcatctcggctcctggcgccgtcataccgataataatttctggctgagctaccgcgagctggccgaccagctggtgccctatgcgaaatggatgggcttcacccatctcgaactattgccggttaacgagcacccgttcgacggcagctggggctatcaacccaccgggctctatgcgccgacccgccgcttcggcacccgcgacgatttccgttactttatcaatgccgcgcacgccgccgggctgaacgtcattcttgactgggtgcccggccacttcccggcggatgattttgcccttgcctcgtttgacggcacttcgctgtatgagcacagcgatccgcgcgaggggtatcaccaggactggaataccctgatctacaactacggacgtcgggaagtcagcaactacctggtgggtaacgcgctgtactggatcgaacgcttcggcatcgatgcgctgcgggtcgacgcggtggcctcgatgatctatcgcgattacagccgcaaggcgggagagtggatccccaacgaatacggcggtcgggagaatctggaagccattgagtttctgcgcaacaccaaccgcatccttggcgaacagacgccgggcgcggtcaccatggcggaagagtccaccgattttgccggggtgacccgtccgccagccggcggcggcctcggtttctggttcaaatggaacctcggctggatgcacgacaccctggattacatgaagttcgatccggtgcatcgccgctaccatcatgacaaaatgaccttcggcatgctctacaactacaccgagaattttgtgctgccgctctcccacgatgaagtggtgcacggtaaaaaatcgattctcgaccgcatgccgggcgatgcctggcagaagttcgccaacctgcgcgcctactacggctggctgttcgccttcccggggaaaaagctgctgtttatgggcaatgagttcgctcagggccgcgagtggaaccatgacgttagcctcgactggcatctgctggagggcggcgacaactggcaccacggcgtccagcggctggtgcgcgacctgaaccatacctaccgtcatcataaagcgctgcacgagctggattttgacccctacggcttcgaatggctggtggtcgacgaccatgagcgctcggtgtttgtctttgtacgccgtgaccgggcgggcaacgagattatcgtcgccagcaacttcacgccggtgccgcgccacgactaccgcttcggcattaaccagccgggccgctggcgcgaggcgctaaataccgactccatgcactatcacggcagcaatcagggcaatggcggcgtggtggaaagcgacgctatcgccagtcatggccgcgaacattcgctatcgctgaccctgcccccgctggcgacgatctggctggtccgggaggcgcaatga

SEQ ID NO: 135051 - DNA, 1977 bp, Enterobacter cloacae
atgacctcactcgcggcaggcaaacctgcgccattgggcgccagctatgacggcaagggggtgaatttcgccctcttctccgcccatgcggagcgggtggagctgtgcgtattcgacgagcagggcaacgagcaacgcttcgatctcccggcgcgcagcggcgacatctggcacggctggctggccgccgccgggccgggcctgcgctacggctatcgggtacatggtccctgggacccggcgcaggggcaccgctttaacccggccaagctgttgatcgatcccagcgcccaccgggtcgagggcgatctgcctgacgatgagcgcctgcacggcggcatgtggcagcccgatcgccgcgacagcgccgcggtcgcgccaaaatcgcaggtggtggatctgcgctatgactggcgtggcgataaaccgccgcgtaccccatggggggaaacggtgatttatgaagcgcacgtgaaagggctcaccttgcttaatccgcagctaccggaagccattcgcggaacctataaagcgctgggccacccggcgatgatcgcttacttcaaatcgctgggcatcagcgcccttgagctgttgccggtggcgcagttcgccagcgagccgcgactgcagcggatggggttaagcaactactggggctacaacccgttggcgtggttcgcgctggatccgcgctacgccagcgacccggatcgcgccctggatgagtttcgcgatgcggttaaggcgctgcacgccgccggtatcgaagtgattctggatatcgtgctcaaccatagtgcggaaatcgatctcgaagggcccaccgtctccctgcgcggaatcgacaaccgtagctattattgggtaagggaggatggcgattatcacaactggaccgggtgcggtaatacgctcaatcttagccaccccggcgtggtggagtgggcgcgccagtgtttgcgcttttgggtggatgagtgccatgtcgacggctttcgcttcgacctcgcctcagtgatggggcggacgccggaattccgccaggatgcgccgctgttcgaggctatccgccgcgacagcgtgctgtcgcaggtgaaactgattgcggaaccctgggatatcggcccgggcggctatcaggtgggtaatttcccaccgctgttcgctgaatggaatgaccattttcgcgatagcgcccgacgcttctggctacagcaaaatgtctccctgggggattttgcgcaacgtttcgcggcctccagcgatctctttgcccgcgatggcaagccgccatcggctacggtcaacctggtgacggcccacgatggcttcacgctgcgcgactgcgtttgtttcaatcagaaacacaatgaggcaaacggggaggagaatcgcgatgggactaacaataactacagcaacaatcatggtatagaaggattagaagcgaattttgcggtgattgaacggcggcgcgccagcgcgcatgcgctgctgacgacgctactgctggctcaggggacgccaatgctgctggcgggcgatgaacagggccacagccagcacggcaacaataatgcttactgccaggacaacgccctgacgtggctggactggcgccaggcgaacccgggattaaccgcctttaccgcggcgctgatccacctgcggcgccgtattccggcgctcacccgcaaccgctggtggcaggagggggatggcaacgtccgctggcttaatcgcaacgcccagcccctgactgccgcggagtggcagcagggggccgcgtgtatgcagatccagttgtcggatcgctggctgctcacgctgaacgccaccgcagaggtggtggatatggttttacccgagggggaatggcgcgccgttcctccattcgccggagaggataatccggtcatcatggctgtctggcatgggcccgcgcacggagtgtgcgtatttcaaaggtcgtaa

SEQ ID NO: 135052 - DNA, 1296 bp, Enterobacter cloacae
atggttaggcttgaaaaaaacgatccgctgatgctggcgcgtcaattacccatcaaatccgtggcgttgatcctcgcgggcgggcgtggcacccggctgaaggatctcaccattaagcgtgcgaaacctgccgttcactttggcggcaagttccgtattatcgatttcgcattatctaactgcattaactcagggatccgccgcatcggcgttattacccagtatcagtcgcacacgctggtgcagcacatccagcgcggctggtcgttcttcagcgaagagatgaacgagtttgtcgatctgctgccggctcagcagcgcgtgcatggcgaaaattggtatcgcggcacggcggatgcggtgacgcagaacctggatatcatcagccgctacaaggccgagtacgtggtgatcctcgcgggcgaccatatttataagcaggactactcgcgcatgctgatcgaccatgtcgaaaaaggggcgcgttgcaccgtggcctgcatgccggtgcccattgaagaggcatccgccttcggcgtcatggcggtcgacgaaaacgaaaaaatcattgagtttgtcgagaaacccgccaacccgccggcgatgccgaccgacccgaccaaatcgctggccagcatgggcatttatgtctttgacgccgcctatctttatgagctgctggaagaagacgatcgcaacgagaactccagccacgatttcggcaaagacatcattccgaagatcaccgaagctggcatggcttatgcacatcctttcccgctctcctgtgtgcagtccgacccgaacgccgaaccttactggcgcgacgtggggacgctggaagcctactggaaggctaacctcgatctggcgtcagtcacgccggagctggatatgtacgaccagaactggccgatccgcacccatatggaatcgctgccgccggcgaagttcgtgcaggaccgctccggtagtcacggcatgaccctgaactcgctggtttccggggggtgcattatctccgggtcggtggtggtgcagtcggtgctgttcccgcgcgtgcgggtgaattcgttctgtaacattgattcggcagtcttgttgccagatgtctgggtggggcgctcatgccgcctgcgtcgctgcgtgattgaccgcgcctgtgttatcccggaaggaatggtgattggtgagaatgcggaagaggatgcacgccgcttctatcgctcagaggaaggtatcgtgctggtgacccgcgacatgctgcggaaattagggcacaaacaggagcgctaa

SEQ ID NO: 135053 - DNA, 1434 bp, Enterobacter cloacae
atgcaggtcttacatgtatgttctgagatgttcccgctgttaaagacgggcggtctggcggacgtcatcggcgcactgccggcggcgcaaatcgcggagggtatcgatacgcgcgtgctgttgccggcgtttcccgatatccgtcgcggcgtggtggatgcccaggtggtgacccgccgggataccttcgccgggcggatcacgctgctgtacggccactttaacggcgtggggatctacctgatagacgccccgcatctctatgaccgtccggggagcccttaccacgataccaaccagcacgcttatcccgacaacgtcctgcgctttgcgctgctgggctgggtgggaagtgaaatggccagcggactggatccgttctggcgcccggatgtggtgcatgcccatgactggcacgccggcctgacgccggcctacctggcggcgcgcggacgcccggctaaatcggtgtttaccgtgcacaacctggcgtatcaggggatgttttactcctggcatatgaatgacattgagctgccgtggtcgttctataacatgcatggcctcgagtttaacgggcagatctcgtttctcaaggccggcctctactacgccgaccatattacggcggtgagcccgacctacgcgcgcgagatcaccgagccgcagtacgcctacggcatggaggggctgctgcgccagcgccatcatgaaggtcggctgtcgggaattctcaacggcgttgacgacggtatctggagcccgcaaaacgatctgctgctgccgatgcgctacgatcgcgacacgctggaggagaaggcggagaacaagcgtcagctgcagattgccatgggcctgaaggtcgatgataaagcgccgttgtttgccgtcgtcagccgtcttaccagccagaaagggctggacctggtgcttgaagcgctgccgggtctgcttgagcagggcggccagctggcgctactgggcgccggcgatccggtgctgcaggaaggtttcctcgccgccgccgccgaacacccgggcaaagtgggtgtgcagattggctaccatgaggccttctcccaccgcattatgggcggcgccgacgtcattctggtcccgagccgctttgaaccctgcggcctgacccagctgtatggtctgaagtacgggacgctgccgttggtgcgccgcaccggcggtctggcggacaccgtcgctgacagttcgctggagaatctggccgatggtctggcgacagggtttgtctttgaggacagcaatgcgctgtcattgctgcgcgctatccgtcgcgcctttgtcctctggtcgcgcccgtcgctctggcgctacgtgcagcgtcaggcgatgaatatggattttagctggcaggttgccgcgaactcctatcgcgaactttatcaacgcttgatgtaa

SEQ ID NO: 135054 - DNA, 2448 bp, Enterobacter cloacae
atgaatgtaccctttagctatgcatcaccgacgctgagcgttgaggcgttaaaacattctattgcctataaactgatgtttatcatcggtaaagatccggccatcgccaacaagcatgaatggcttaacgccacgctgtttgccgttcgcgatcgcatggtggagcgctggctgcgctccaaccgcgcgcagctctcccaggaagtgcgccaggtgtactatctgtcgatggagtttctgatcggccgcaccctctcgaatgcgctgctgtcgctgggcatttatgacgatgtgagcagcgcgctggcggagatggggctcgatctcgaagagctgatcgatgaagagaatgaccccgggcttggcaacggcggtctgggccgcctggcggcttgcttccttgactccctggcggcgctgggtctgccgggacgcggttacggcatccgctacgactacgggatgtttaaacagaatattgtcgatggccgacaaaaagaatctcctgactactggctggagtacggtaacccgtgggagtttgagcgccacaacacccgctataaagtgcgcttcggcggccgcattcagcaggaaggaaagaaaacccgctggattgagacggaggagatcattgcggaagcctacgaccagatcatccccggctttgacaccgacgccaccaacacgctgcgtctgtggagcgcgcaggccagtagcgaaattaacctcggtaaattcaaccagggcgactacttcgccgcggtagaggataaaaaccactccgaaaacgtctcccgcgtgctctatccggacgactcgacctactccggccgcgagctgcgcctgcgccaggagtatttcctcgtgtcggccacggtgcaggatatcctgagtcgccattatatgttgcataagacctatgacaacctggcggacaagattgccattcacctgaatgacacccacccggtgctgtcgataccggagctgatgcgtctgcttatcgacgaacataagttcagctgggacgaggcgttcgaggtgacctgccaggtcttctcctataccaaccacaccctgatgagcgaagcgctcgagacctggccggtggatatgctgggtaaaattctgccgcgccatctgcagattatcttcgagattaacgactatttcctcaagaccttgcaggagcagtatccgaacgataccgacctcctcagccgcacctcgattatcgacgagtctaacggccgccgtgtgcggatggcctggctggcggtagtggtcagccacaaggtcaacggggtgtccgagctgcattcccgactgatggtggagtcactgtttgccgaattcgccaaaatcttcccaatgcgctttatcaacgtgaccaacggtgtgacgccgcgccgctggctggcgctggccaacccgccgctgtcgaaagtgctggatgagcatatcggccgcacctggcggaccgatctgagtcagcttgatgagctgaaacagcatatcgactacccgatggtcaatcaggcggtgcgtcaggccaagtttgagaacaaacagcggctggccagctatattgctcaacagctcaatgtggtggtcaatccgaaggcgctgtttgatgtgcagatcaaacgtatccatgaatacaaacgccagctaatgaatgtgctgcacgtcatcacccgctataaccggatcaaggccgatccgcaggccgagtgggtgccgcgggtgaatattttcgccggtaaggcggcctcggcctactacatggccaagcacattattcacctgatcaacgatgtggcggcggtgattaataacgatccgcagattggcgacaagctgaaggtcgtctttatccccaactacagcgttagcctggcgcagctgatcattccggcggcagacctgtcggaacagatctccctcgcaggcactgaagcttccggcaccagtaatatgaagtttgcccttaacggcgcgctgactatcggcacccttgatggggcaaacgtggagatgcaggagcacgtgggcgaagagaatatctttatcttcggcaacaccgcggaagaggtggaggagctacgtcgcagcggttataaaccacgcgaatattacgagcaggatgaagagctccaccaggcgctgacgcagatcggtaccggcgtcttcagcccggcagaaccggggcgctaccgcgacctgctggattcgctgattaactttggcgaccactaccaggttctggcggactatcgtagctatgtggactgccaggatcgcgtcgacgagctgtatcaaaacccggaagagtgggcctataaggcgatgttgaatattgccaacatgggctacttctcttctgaccggacgatccaggagtacgcgaaatatatctggcatatcgacccggtaaggctgtaa

SEQ ID NO: 135055 - DNA, 348 bp, Enterobacter cloacae
atgtgggatgtagaaacgacggatacgtttgatacctggttcgaattacaaagtagagctttaaaagaggatatgttggccacgatgctcatcctgtctgagtttgctccgcagcttgggcgcccgtatgttgatacggtgaaagattcaacgtttcagaatatgaaagaactgcgggttcagcatcatgggctccccatccgcgccttttttgcttttgatcctctgcggaaagctatcgttttatgtgcgggcgataaggatggcatgaatgagaaacgtttttacaaagagatgattactctggctgacagagaattcagccaacacctgactaaggagcgataa

SEQ ID NO: 135056 - DNA, 300 bp, Enterobacter cloacae
atggccacgctaaaagaactcatggcgaaacagagtcctgatagccagcagcgtattgcagcgaaagcggcagagatacgccagtctgtcgctttaaacttgcttcgagaagagttgcaaatgtcgcaaacagagatggctgcggctatgggggtaaagcagccaacgatcgctaaaatggaacaggctgataacgaccctcggctttcgaccctaaaacgctacattgcggcattggggggagaactcagtataaatgtcacattgccgactggaaaaaaagtctcgtttaatttgtga

SEQ ID NO: 135057 - DNA, 1509 bp, Enterobacter cloacae
gtggaaaccaaagatctgattgtgataggcggaggcatcaacggtgccggtatcgcggcagatgccgccgggcgtggtttatccgtactgatgctggaagcgcgcgatctcgcctgcgccacctccagcgccagttccaaactgatccacggcgggctacgctacctcgaacactatgagttccgtctggtcagcgaagcgctggccgagcgtgaagtgctgttaaaaatggccccgcatatcgccttcccgatgcgctttcgcctaccgcatcgcccgcatctgcgcccggcatggatgatccgtatcggcttgtttatgtacgatcatctgggcaaacgcaccagcctcccgggatccaccgggttgcgttttggcgcagaatcggtacttaaaccggaaattgtgcgcggtttcgaatattccgactgctgggtcgacgatgcccgcctggtgctggccaacgcgcagatggtcgtccgcaaaggcggcgaagtgcgtacccgcacccgcgctatctcggcgaaacgtgagaatggcctgtgggtggtggaagcggaagatattgatagcggtgagaagtttacctggaaggcgcgcggcctggtcaatgccaccggcccatgggtcaaacagttcttcgacgaagggatgcatctgcgctcgccttacggcatccgtctgatcaagggcagccacatcgtggtgccgcgggtgcatacccagaaacaggcttatattctgcagaacgaagataaacgcatagtgtttgttattccgtggatggatgagttctctatcatcggcacgacggacgtcgagtataagggcgatccgaaagcggtggccattgatgataaagagatcaactatctgctgaacgtctataacgcgcactttaaaaagaccctcagccgggacgatatcgtctggacctactccggcgtccgtccgctgtgcgacgacgagtcggattcgccgcaggccattacccgcgactataccctggatattcacgatgagaacggtcaggcgccgctgctgtccgtcttcggcggcaagctgaccacctatcgcaaactggccgagcatgcactggaaaaactgaccccctattacaaagggatcggcccggcatggaccaaaaccgcggtgctccccggcggcgatatcggcggcgaccgcgacgactacgcggcaaaactgcgccgtcgcttcccgttcatcagtgaatcactggcccgccattatgcccgcacctacgggagcaacagcgagtggatcctgaaggaagccagcgccctgagcgatctcggggaagatttcggccacgagttttatgaagccgagctgaaatatctggtggagcacgagtgggtgcgcagcctggatgacgccatctggcgtcgaaccaaacagggtatgtggctgactgccgagcagcaggcgcgcatcagcgaatggctggcgcagcatgcgggaaagtctgaactgtcgttagcgtcctga

SEQ ID NO: 135058 - DNA, 330 bp, Enterobacter cloacae
atggaacagtttgaatgcatcaatgttgaagaagcgcaccagaaactgcatcagcagacggcggtactggtcgatatccgcgatccgcaaagctatgcgatgggtcatacgccgggcgcgtttcatctgaccaacgatacgctgggcgcgtttatgcgtgacaacgactttgacacggcggtgatggtgatgtgctatcacggcaacagcagcaagggcgccgcgcaatatctgctgcagcaggggtttgataaggtctatagcgttgacggcgggttcgacgcctggcatcgccatttcccggcggaagtggcgcgcgggacgttttaa

SEQ ID NO: 135059 - DNA, 825 bp, Enterobacter cloacae
atgattacctcttttgccaacccgcgggtggcccaggcgtttgtcgattatatggcgacgcaggggattatcctgaccatccagcagcatacccagagcgacgtctggctggctgatgagagtcaggccgggcgcgtcagggctgagctggcgcgttttctcgaaaacccggcggacccgcgctatctggcggcgagctggcagtccggacagaccaatagcgggttgcgctatcagcgctttcctttctttgccacgctgcggcataacgccggtccgttcacctgggcgattctgctgatctgcatcgcggtgttcatcctgcaaaatctgctgggcgatcagccggtgatgatttggctggcctggccctacgatccttcgctgcagttcgaagcctggcgctatttcagccatgctttcatgcatttctcgctgatgcatattctcttcaacctgctatggtggtggtatcttggcggcgcggtggaaaagcgcatcggcagcggcaagctggtggtgatcaccgtcatcagcgctctgctaagcggcttcgtgcagcaccagtttagcggcccgtggtttggtggcttgtcgggcgtggtctacgcgctgatgggctacgtctggctgcggggcgagcgcgatccgcagagcggtatttatctgcagcgcgggttgatactcttctctttagtgtggttaattgctggctggtttgacgttttcggcatggcgatcgccaacggcgcgcacgtggctggtctggcgaccggcctggcgatggcgtttgttgataccttacatgggcgaaaacgcgcataa

SEQ ID NO: 135060 - DNA, 759 bp, Enterobacter cloacae
atgaaacaaacacaacgtcatgacgccattatcgagctggtaaaaaaacagggttacgtcagcacggaagagctggttgagcagttcgcggtaagcccgcagaccatccgccgcgacctgaacgatttagccgaacagaaaatgatcctccgccatcacggcggcgcggcgctgccctccagctcggtgaacacctcctggcacgatcgcaaagcgacccagacggcggagaaagagcgtatcgcccggcgggtggccagcgagatcccggacggggcgacgctgtttattgatatcggcaccacgccggaagcggtggcgcacgccctgctcgatcacaacgatctgcggattgtgaccaataaccttaacgtcgccaacacgctgatggtgaaagaggactttcgcattattctcgccggcggcgaactgcgtagccgggacggcgggatcatcggggaagccaccctcgactttatctcgcagttccgcctcgacttcggcattctcggcatcagcggcgtagacagcgatggctcgctgctggagtttgattatcatgaagtgcgcaccaagcgggcgatcattgagaattcacgccacgtgatgctggtggtggaccataccaagtttggccgtaacgcgatggtcaacatgggcagcataagtatggtcgatgcggtctataccgacgtgctgccgccggccggcgtgctgaaggtgatcactgataacaaccttcagctggagctgtgctaa

SEQ ID NO: 135061 - DNA, 228 bp, Enterobacter cloacae
gtgccggagcttatccgcaccagcccgctgacccagcgcgagtggcaggtgcttggcttaatctattccggttacagcaacgagcagattgccggcgagcttgacgtggcggccaccaccatcaagacccacattcgcaacctgtatcagaaactgggcgtcgcccaccggcaggacgcggtacagcatgcccagcagttacttaagatgatgggatacggcgtctga

SEQ ID NO: 135062 - DNA, 2451 bp, Enterobacter cloacae
  misc_feature (2386)..(2395): n is a, c, g, or t
atgttgattccgtccaaattaagtcgtccggtccgccttgaacacactgtggttcgtgagcgcttactggcgaaactttccggcgcgaacaattatcgtctcgtgctgatcaccagtcctgccgggtacggtaaaacaacgctcatttctcagtgggccgcgggtaaaaacgatcttgggtggttttcgctggacgaaggcgacaaccagcaggagcgttttgccagctatctgatcgcggcgattcagcaggctaccggcaaccactgcgcggcaagtgaagcgatggtgcaaaaacgccagtacgccagtctctcctctctttttgcgcagctgtttattgaacttgccgactggcagcgcccgctgtatctcgtcattgatgattaccatctgatcaataatccggtgatccatgacgcgatgcgctttttcctgcgccatcagccggagaatatgaccctggtggtcctgtcgcgtaacctgccgcagctgggcattgccaatctgcgcgtccgcgatcagcttctggagattggcagtcagcagctggcctttacccaccaggaggcgaaacaatttttcgactgtcgtctgacatcgcctatcgaagccgacgacagtagccggctgtgcgacgatgtcgccgggtgggccaccgcgctacaactcatcgccctctccgcccgccagaataactcctccgcccaacactccgcccgccgcctcgccgggattaacgccagccatctgtcggattatctggtggatgaagtactggataacgttgacgcccgcacgcgcaactttttgctgaagagttctctgctgcgctcaatgaacgacccgttaatcgtgcgcgtcaccggcgaagagaatggccagatgcagctggaggagatcgaacgccaggggctgttcctgcagcggatggatgattccggcgaatggttccgctatcacccgctgtttggcagcttcctgcgccagcgctgtcagtgggagctggcggttgaactaccggagatccaccgcgccgcggcggaaagctggatggcgcaaggtttccccagcgaggccatccaccatgcgctggcggccggcgatgccaaaatgctgcgcgatatcttgctcaatcatgcctggggcatgtttaaccatagcgagctggggctactggagcagtcgctggcggcgctgccatggtccaatctgctggaaaatccgcgcctgatcctgctccaggcctggctgatgcagagccagcatcgctacagcgaagtcaataccctgctggcgcgcgccgagcaggagatgagtgtggaaatggacaccgcgatgcatggcgacttcaacgcgctgcgcgcgcaggtggcgattaacgatggcgaccaggacgaggcggaacgtctgtcaatggtggccctggaagagctgccgctggccaactattacagccgcatcgtcgccacatcggtgcatggcgaagttctccattgtaagggaaagctgaccaaatccctcgccgtgatgcagcagaccgaacagatggcccgccgtcacgacgtatggcattacgccctgtggagcatcattcagcaaagcgaaatcctcttcgcccagggcttcctgcaggccgcctgggagagccaggagaaagccttccagctggtacgcgaacagcatcttgagcagttgccgatgcatgagttcctgctgcgcatccgttctcagctgctgtgggcatgggcgcgcctcgacgaggctgaagcttgcgcccgccaggggatggacgtgctatccacctatcagccgcagcagcagctgcagtgcctggcgctgatggtccagtgctcactggcgcgcggcgatctggataatgcccgcagccacctgaaccggctggaaaacctgctcggtaatggtcactatcacagcgactgggtctccaacgccgataaggtgcgagtgatctactggcagatgaccggtgataaaaccgcggcggccaactggctgcgccagacgccaaagccggagttcgccaacaaccacttcctgcagagccagtggcgcaacattgcccgggcgcagatcctgctgggcgacttcgaaccggcggaaatggtgctggaagagctgaacgaaaatgcgcgttcgctgcgtttgatgagcgatctcaaccgcaacctgctgctgctcaaccagttgtactggcagtcaggacgcaagagcgaagcgcagaaagccctgctggaagccctgacgctcgccaaccgcaccggttttatcaaccactttgtgattgaaggcgaggcgatggcccagcagctgcgccagctgatccagttgaacacgttgccggagctggagcagcatcgcgctnnnnnnnnnncagcgtattctgcgcgacatcaaccagcatcatcgccacaaattcgcccactttga

SEQ ID NO: 135063 - DNA, 2391 bp, Enterobacter cloacae
atgtcacagactacatttaacaaagctcagtttcaggctgcactgacgcgtcagtggcagcattttggtttacagtccgcttccgagatgacacagcgtcaatggtggcgcgcagtcagcggagcgttggcggaactcctggcggcgcagccggtagcgaaaccggcgcaaggacagcgtcacgttaactacatctcaatggagtttctgattggtcgtctgaccggcaacaacctgctcaacctgggctggtacgagggcgtcagcgacgcgctgaaaggctacgatgtcaacctcaccgatctgctggaagaagagactgacccggcgctgggtaacggcggcctgggacgtctggcagcctgcttcctcgactccatggcgacggtggggcagtcggcgaccggttacggtctcaactaccagtatggcctgttccgccagtcatttgacgatggccagcagatggaagcccctgacgactgggggcgcagcagctacccgtggttccgtcataacgaagcgctggatgtccaggtaggtatcggcgggaaagtcagcaaaaacggcgaatggcagccggcattcgtcattaccggcgaagcctgggacctgccggtgcttggctatcgcaacaacgtcgcccagccgctgcgtctgtggcaggccaaacacgctcatccgttcaacctgaccaaattcaacgatggcgatttcctgcgcgccgagcagcagggcatcgacgcggaaaaactgaccaaggtgctgtacccgaacgacaaccatcaggccggtaaaaaactgcgcctgatgcagcagtacttccagtgcgcctgctcagtggccgatatcctgcgccgtcatcatctggcaggccgcaagctggccgagctggcggattacgaagtgatccagctgaacgatacgcacccgaccatcgccatcccggagctgctgcgcgtgctgatcgacgagcaccagctgagctgggacgacgcctgggcgatcaccagcaaaacctttgcttacaccaaccacaccctgatgccggaagcgttggaatgctgggatgagaagctggtaaaagcgctgctgccgcgccatatgcagatcattaaagagatcaacgaccgctttaaacagctggtggacaaaacctggccgggcgataagcaggtctgggcgaagctggcggtggtgcatgacaaacaggttcggatggccaacatgtgcgtggtgggcggctttgctgtcaacggcgtggcggcgctgcactcggatctggtggtaaaagatctgttcccggaatataaccagctgtggccgaacaaattccataacgtgaccaacggcatcacgccgcgccgctggatcaagcagtgcaacccggcgctggcctcgctgctggatgagacgctgaaaaaagagtgggccaatgacctcgaccagctgatcaacctggaaaaatatgctgacgatgcggcgttccgtcagacttatcgcgatatcaagcaggccaacaaagttcatctggctgagtttgtgaagcagcgtaccgggattgagatcaacccgcaggcgatcttcgatatccagatcaaacgtctgcacgagtataagcgtcagcaccttaacctgctgcatatccttgcgctgtacaaagagatccgcgaaaacccgcagtccgaccgcgtaccgcgcgtcttcctgttcggcgcgaaagcggcgccgggctactatctggcgaaaaacattatttttgccatcaataaggtagcggaagcgatcaacaacgacccgaaagtcggcgataagctgaaggtggtcttcctgccggactattgtgtatcggcagcagaaaaactgatcccggcggcggatatctccgagcagatctccaccgcgggtaaagaagcctctggcaccggcaacatgaagctggcgctgaacggcgcgctgaccgtcgggacgctggatggcgctaacgtggaaatcgctgagcaggtgggcgaggagaacatctttatcttcggccacacggttgaagaggtgaaagccctgaaagcgaaaggctacgatccgctgaaatggcgtaaaaaagacaagctgctcgatgcggtgcttaaggagctggagaacggcacctacagcaacggcgacaagcatgccttcgatcagatgctgcacagcctgctgcagggcggcgatccgtacctggtgctggccgatttcgaagcctacgtagcggcgcaaaaacgggtagatgagctgtatcgcgacgaggaggcctggacccgtgcggctatcctcaacaccgcgcgctgcggcatgttcagctccgaccgctcgatccgcgattatcagcaacgtatctggcaggcgaaacgctaa

SEQ ID NO: 135064 - DNA, 2094 bp, Enterobacter cloacae
atggagagtaaacgcctcgataatgccgcgctggcggcgggcatcagccccagctatatcaacgcgcacggcaagccgcagtctatcgcggctgtcaccaaacagcgcctgctggatgcgatgcatcgctctaccgccgccacgaaagtggcggttaacccgctgccgaacgtgaaaattttcactcacggcaaaaaaatgtcgctgccggtggcaggacgcggtgagtatcagtggatcctgactactgaggacggtaagcagtatcaagggaaaacccgcggcggcgagacgctgccgctgccggccaaactgccggaggggtaccactccctgaccctcacccaggagggggagcgctggcactgccgaactatcgtcgcgccagcgcgctgctatgagccgcagccgctgaaagaggggaaaaagctgtggggcacctgcgtgcagctgtataccctgcgctcagagaaaaactgggggatcggcgattttggcgatctgcgggccatgctgccggaaatcgcccgccgcggcgggtcgtttattggccttaacccgattcatgccctctatccggcgaacccggagagcgccagcccctatagcccgtcttcacgtcgctggctgaacgttatttatatcgacgtcaacgcggttgaagatttccagcgtagcgaagaggcgcaggcgtggtggcagtctccggcaacgcagcaggcactgcaggcggcgcgggaaacggacgatgtggattataccgccgtcactacgctgaaaatgaccgcgctgcgtatggcatggaaacaattctctcgtcgtgaagatgagcagatgacagcgttccgcgagtttgttctgcgcgaaggggaaagcctctactggcaggcggctttcgatgcgctgcacgcctggcaggtacaacaggacccgctgcgctggggctggccggcctggccgaaggcctttcaggatatcgacagcccggaagtgaaagccttctgcgttgagcatgaggatgacgtcagtttctatctttggctgcagtggctggcctggagtcagtttgccgcctgctgggaaaccagccagcgtgacggcatgccgatcggcctctaccgcgacctggcggtgggcgtcgccgagggcgggtcggaaacctggtgcgatcgtgaactgtactgcctgaaagcatccgtaggcgcgccgccggatattctgggcccgctgggccagaactggggcctgccgccgatggatccgcatatcattgccgcccgcgcctatgagccgtttatcgacctgctgcgcgctaatatgcagaactgcggcgcgctgcgcatcgatcacgtgatgtctgtgctgcgtctgtggtggatcccgtatggtgaaaccgccgaccatggcgcttacgttcagtatccggtcgacgatctgctgtcgcttctggcgctggaaagccagcgtcatcgctgcatggtgatcggtgaagatctgggcacggtaccggtggagatcgtcagcaagttacgcaacagcggcgtctattcttataaggtgctctattttgagagtgatgcagagaaaacgttccgcgcgccggcgctgtacccggagcaatcaatggctgtggcgacgacgcacgacctgcccactctccgcggctactgggaaagcggcgatctgacgttaggtaaagcgctgggcctctatcctgatgaggtggtgctgcgcggactgtaccaggaccgcgagctggcgaaacaagggctgctggacgcgctgcataagtacggctgtctgcccaagcgcgccggccataaggcctcgctgatgagcatgacggggatcctcaaccgggggatgcagcgttatattgccgacagcaatagcgccctgctgggcctgcagccggaagactggctggagatggcgacgccggttaacattccgggcaccagcaccgagtacccgaactggcgccggaagctgtccgtcaccctggagcagatgtttgccgatgaacgggtcaataagctgattaaggatctggataaacggcgcaaggcggcgagcaagaaagccgcctcctga

SEQ ID NO: 135065 - DNA, 1317 bp, Enterobacter cloacae
atgccattagtcatcgttgctatcggggttgccctgttgttgctgttaatgatccgtttcaaaatgaacggcttcattgcgctggttctggtggcgctcgccgtcggattaatgcagggtatgccactggataaagtgatcgtctccatcaaaaacggcgttggcggcacccttggcagcctcgcgctgatcatgggcttcggcgctatgctcggtaagctgctggcagactgcggcggcgcccagcgtatcgccaccacgcttatcaataagttcggtaagaagcatattcagtgggcggtggtcctgaccggcttcaccgttggcttcgccctgttctatgaagtgggcttcgtgctgatgctgccgctggtgttcaccatcgccgcctcggcccgtattccgttgctgtacgtcggcgtaccgatggcagccgcgctctccgtcacccacggcttcctgccgccgcatccgggtccgaccgcgatcgccaccatcttccatgccgatatgggcaaaacgctgctctacggcaccattctggctatcccgacggttatcctggcgggaccggtgtttgcgcgcttcctgaaagggatagataagcctatcccggaaggcctgcataacccgaaagtgttcactgaagaagagatgcccggctttggcgtcagcgtctggacctcgctggttccggtgatcctgatggcgatgcgcgccgtggctgagatgatcctgccgaaaggccacgccttcctgccaattgccgagttcttcggcgacccggtgatggccaccctgattgcggtactgattgccctgttcaccttcggtttgaaccgcggccgctccatggagcagatcaacgataccctgacctcttcgatcaaaatcatcgccatgatgctgttgattatcggcggcggcggtgccttcaagcaggtgctggtggatagcggcatggataaatacatcgcctctatcatgcacgaatcgaacatgtctccgctgtttatggcgtggtctatcgccgcggtgctgcgtatcgcgctgggttcggcgaccgtagccgccatcaccgcgggcgggattgccgcgccgctgatcgccaccaccggcgtcagcccggagctgatggttatcgccgttggctccggcagcgttatcttctcccatgttaacgatccgggcttctggctgttcaaagagtactttaacctgaccatcggcgagaccatcaagtcctggtcggtgctggaaaccattatctcagtctgcggcctggtgggctgtctgctgctggggatggtggtgtaa

SEQ ID NO: 135066 - DNA, 576 bp, Enterobacter cloacae
atgatccgtatttccgatgctgcacaagcgcactttgccaaactgctggcaaatcaggaagaagggacgcaaattcgcgtatttgtgattaatcccggcaccccaaacgctgagtgcggcgtatcctactgcccaccggatgcggtggaagacaccgacacggcgctgaaatttgaacagctgaccgcctatgtcgatgagctcagcgcgccctatctggaagacgctgaaattgatttcgtcactgaccagctcggctcgcagctgacgctgaaagcgccgaacgccaaaatgcgcaaagtctctgacgatgccccgctgatggagcgcgtcgagtacctgctgcagtcgcagattaacccgcagctggcaggccacggcggccgcgtatcgctgatggagatcaccgacgacggtctggctatcctgcagttcggcggcggatgcaacggctgctcgatggtcgacgtgaccctgaaagaaggtattgaaaaacagctgctgaacgagtttccggagctgaaaggggttcgcgatctgaccgagcaccagcgcggcgagcactcctactactaa

SEQ ID NO: 135067 - DNA, 351 bp, Enterobacter cloacae
atgctaacagcacacagcttatgctggctatgccaaatgccgctggcagtcgcccgctgggggatctgctcccgctgcagccgcgccctgctcgcctgtcccccgctctgcccgcagtgcggcctgccggcggcggcatcccgtcacccctgcggccgctgcctgcaaaagccgcctccctggcatcggctggtggcggtcaatgactatcgcccgccgctgagcggtctggtgcagcagctgaagtttcaccatcgcccggagctgggggccgccctcgcgcgtctgctgcgtagacgctctggtcggcgtgccgctatggcatcgccgtcgctggcgccggggttataa

SEQ ID NO: 135068 - DNA, 774 bp, Enterobacter cloacae
atgaacgacatctggtggcaaacaatcggcgaaggagattgtcatcttgtgctgctgcacggctgggggctgaacgctcaggtatgggattgcatcacgccgcagctggcttcgcattttaccctccacctggtggatctgccgggctatggccgcagcggcgggtttggggcgatgtcgctggaggcgatggcgcagcgggtgctggagcaggcccctccacaggcggtgtggctgggctggagcctgggcgggctggtggccagccaggtcgcgattatgcgtccggaacgcgtgcaggcgctggtgacggttgcctcttccccctgtttcgcggctcgtgacgactggcccggcatcaagcccgaggtgctggccggatttcagcagcagctgagcgacgatttccagcgcaccgtcgagcgattcctcgccctgcaaaccatgggcacagagagcgcgcgtcaggatgcgcgggcgttaaagcaggcggtgctctcgctgccgatgccttccgccgaggcgctgaatggcggactggagatcctcagaaccgtcgatctgcgtcaggcgctggtcaggctgccgatgccgtttctgcggctgtatggccggctggatggactggtgccgcgcaagatcgtcccgttgctggatgacctgtggccggaaagcgagtcaatcctcttcgataaggccgcgcatgcgccgtttgtttcccatcccgcggccttctgcgagccgctgctggcgctgaagacgcggctggggtaa

SEQ ID NO: 135069 - DNA, 270 bp, Enterobacter cloacae
atgaaacttgttacaggaatggttgcatctctggtgataggcaccctctctttcggcgcattcgccgcgaaagagatccaaaaagaagacgtggcgaagatgaatctgaccaaggtcggtagcattacgacctccaggacgacatcgccgatggacgcccgccgcgatctgtcgaaaaaagccgatgagctgggtgggaaatactttgtggtgattgccgggcagaaaaacgaaaaaaccgtacacgcgaacgctgacgtttataaataa

SEQ ID NO: 135070 - DNA, 240 bp, Enterobacter cloacae
gtggcgtcgttaatggaagtccgcgatatgctggccctgcagggccgcatggaggcgaaacagctcagtgctcgcctgcagacacctcagccgctgattgacgccatgcttgagcgaatggaagccatgggtaaggtggtccggatcagcgaaacgagcgagggctgcctctccggcagctgtaaaagttgccctgaagggaaagcggcgtgccggcaggagtggtgggcgctgcgatga

SEQ ID NO: 135071 - DNA, 1899 bp, Enterobacter cloacae
  misc_feature (21)..(30): n is a, c, g, or t
ttgcccggtcattccgctggnnnnnnnnnnactcgcggacgggggatcgaggcgctgaagatcgccctcgaccgtcatcaggcgaacagcgatcttgagctggtccactatccgcagccgctgctgcgcgaagctgacctgctggcgcagcagatgtcagcgcagatcccgacccggcagcggcgctggctgggtctgcagatgctggagggcgatatctacagccgggcctatgccggcgacgccgccgataaactggatatcgccctggcgaatctcagcgacgagatcgacgacccggcgctgcacatcgctgacgcgcgctatcagaccatcgccgccatttgcgacgccgtcagcaataccctgaccgccgaaccaagccgcttcaccgccgcgatggacaaagtgatcctcaaccgcttcctcgggttgccgatttttctctttgtcatgtacttgatgttcctgctggcgatcaacatcggcggcgcgctgcagccgattttcgatgccggctcagtcgcgatctttgtgcatggcattcaatggctgggttacaccctgcacttcccggactggctgaccgtgttcctcgcccaggggatcggcggcggtatcaacaccgtgctgccgctggtgccgcagatcggcatgatgtatctgtttctctccttccttgaggactccggctacatggcgcgcgccgcctttgtgatggatcgcctgatgcaagccctcggcctgccggggaaatccttcgtcccgctgattgtcggttttggctgcaacgtgccgtcggtgatgggcgcccgcacccttgacgcgccgcgcgagcgtctgatgaccattatgatggcgccgtttatgtcctgcggcgcgcggctggcgatcttcgccgtcttcgcggccgccttctttgggcagaacggcgcgctggcggtcttctcgctctatgtgctgggcattgtgatggccatcctcaccggcctgatgctgaagcacaccattatgcgcggcgaagcctcgccgttcgtgatggagctgccggtgtaccacgtcccgcatatcaagagcctgattatccagacctggcagcgcctgaaaggctttgtgctgcgcgccgggaaggtgatcgtcatcgtcagcatcttcctcagcgcgctgaacagcttctcactgagcggtaaggtcgtcgacaacatcaacgactccgcgctggcctcggtgagccgggtcattacgccggtgtttaaaccgatcggcgtgcatgaagataactggcaggccaccgtcggcctgtttaccggcgcgatggcgaaagaggtggtagtgggtacgctgaacaccctctataccgccgaagatatccagaatgaggaattcaatccgcagaccttcagtctcggcgaagaactgctcgccgccgtcgatgagacatggcagggactgaaagacaccttcagcctcagcgtcctggccaaccccatcgaagccagcaaaggagatggcgaaatggccaccggcgccatgggggtgatgggcagtaaatttggcagcgcagcggcggcatacagctacctgatcttcgtcctgctctatattccctgcatctcggtgatgggcgccatcgcccgcgaatcaagccgcggctggatgaccttctccatcctgtgggggctgaatatcgcctattcgctctcgacgctctattaccagaccgttagctttagcgatcacccgcgctacagtctggtatgtatcctggcggtagtgttgttcaacgtggtgctcttcggcctgttgcgccgggcgcgcagccgggtggacgtctcgctgctggccacgcgaaaaacgccggcctcctgctgttccagcccggctggcgattgccactaa

SEQ ID NO: 135072 - DNA, 483 bp, Enterobacter cloacae
  misc_feature (446)..(455): n is a, c, g, or t
atgcaaaaattaaccgttggtttaattggtaatcctaattccggcaagaccaccttatttaatcagctgaccggcgctcgccagcgcgtgggcaactgggctggggtgaccgttgagcgtaaagaggggattttcgccaccactgaccaccaggtcacgctggtcgacctcccgggaacctactccctgaccaccatctcctcgcagacctcgctggacgagcagattgcctgtcactacatcctgagcggcgacgccgacatgctgattaacgtggtcgatgcctccaacctcgagcgcaacctctatctgacgctgcagctgctcgagctggggatcccctgcgtcgtcgcgctgaacatgctggatatcgccgaaaagcaacaggtgcggatcgatatcgacgccctcgccgcccgtctcggttgcccggtcattccgctggnnnnnnnnnnactcgcggacgggggatcgaggcgctga

SEQ ID NO: 135073 - DNA, 228 bp, Enterobacter cloacae
atgcaattcacacctgatagtgcgtggaaaattaccggtttttctcgcgatattagcccagcataccgtcagaaactgctctccctcggcatgctgcccggttcctcttttcatgtggttcgcgtggcgccgctcggcgatcctgttcatattgaaacccgacgcgtcagtctggtattacgcaaaaaagatctcgccttaatcgaactggaagcggttgcacaataa

SEQ ID NO: 135074 - DNA, 2331 bp, Enterobacter cloacae
atgatgaatgattcgctctgccgcattattgcgggtgaacttcaggccagagccgaacaggtagaagctgccgttcgcctgcttgatgaagggaacaccgtgccgtttattgcacgttatcgtaaagaagtcaccggcggtctggatgacacgcagctgcgtaatctggaaactcgcctcggctatctgcgcgaactcgaagaccgtcgtcaggcgatcctcaaatccatcgctgaacagggcaaactgaccgacgcgctggaaaaagccatcaacaccacgctcagcaaaaccgaactggaagatctctacctgccctacaagccgaagcgccgtacacgcgggcagatcgctatcgaagccgggctcgaaccgctggctgacctgctgtggaacgaaccggcccacgatccggaagcggaggccgcaaaatatattgatgccgataagggcgtagccgacagcaaagcggccctggacggcgcgcgctatattctgatggagcggtttgccgaagacgccgcgctgctggcgaaggtccgtgactatctgtggaaaaacgcccacctggtctccaccgtcgtcagcggtaaagaagaggaaggcgctaaattccgcgactacttcgatcaccatgaaccgatcgccaccgtgccgtcgcatcgcgcgctggcgatgttccgcggtcgcaacgaaggcgtcctgcagctctctttaaacgctgacccgcagtttgacgagccgccgaaagagagccacggcgagcaaattattatcgaccacctgggcctgcgcctgaataacgccccggcggacagctggcgtaaaggcgtcgtcagctggacctggcggatcaaagtcctgatgcatctcgaaaccgagctgatgggcaccgtgcgcgaacgcgcggaggacgaggcaatcaacgtcttcgcccgcaacctgcacgatctgctgatggccgcgcccgccgggctgcgcgccaccatgggactcgatccgggcctgcgcaccggggtgaaagtggccgtcgtcgacgccaccggtaaactggtcgctaccgataccatctatccccacaccggccaggccgccaaagcggccgtcgccgtcgccgcgctgtgtgagaagtacaacgttgagctggtggccatcggcaacggtaccgcctcgcgtgaaaccgagcgtttcttcctcgacgtgcagaagcagttcccaaaggtcaccgcccagaaggtgatcgtcagcgaagccggggcttccgtttactccgcctccgagctggcggcgcaggagttcccggacctcgacgtgtcgctgcgcggcgcggtctccatcgcccgccgtctgcaggatcccctggccgagctggtgaaaatcgacccgaaatccattggcgtcggccagtatcagcacgacgtcagccagacccagctggcgcgtaagctggacgcggtggtggaagactgtgtgaacgccgtcggcgttgacctgaacaccgcctccgttccgctgctgacccgcgtcgccggcctgacccgcatgatggcgcagaacatcgtcgcctggcgcgacgagaatggtcagttccagaaccgccagcagctgctgaaagtcagccgtctggggccgaaagcctttgaacagtgcgcgggcttcctgcgtatcaaccacggcgacaacccgctggatgcctccaccgttcacccggaagcttacccggtggtcgaacgtattctggccgccacccagcaggcgctaaaagatctgatgggcaatagcagtgcgctgcgccacctgaaggcagtggacttcaccgatgagaagtttggcgtcccgacggtcaccgacattatcaaagagctggaaaaaccgggccgcgatccgcgtccggagtttaagaccgcgaagttcgccgatggtgtggagaccatgaatgacctgctgccgggaatgattctggaaggtgccgtcaccaacgtcaccaacttcggcgcgtttgttgatatcggcgttcatcaggacggactggtacacatttcgtcgctttctgaccggtttgttgaggatccgcacaccgtggtgaaagcgggcgacatcgtcaaggtcaaagtgatggaagtcgatctgccgcgtaagcgtatcgccctgaccatgcgtctcgacgagcagccgggcgacagcaacgcccgccgcggcggtggtcaggagcgcccgcaggtaaatcgcccggccgcgaaagccgccaaaccccgcggtcgcgaggcgcagcctgccggcaacagcgcgatgatggatgccctcgccgcagcgatgggtaaaaaacgctaa

SEQ ID NO: 135075 - DNA, 603 bp, Enterobacter cloacae
ttgttacaaagcatatttaacagcaggttaagtatacatttaatcataagacacagtatttatcctgtcggtattattacgcgctacaaattgtgcgcaacgacagacagtcagaaggttgaactcacgatgaaaacgccgctgatcacccgcgagggatatgaaaaactgaagcaggagatggactacctgtggcgccaggagcgtccggaagtgaccaaaaaggtgacctgggccgccagcctcggcgaccgcagcgagaacgcggactaccagtacaacaaaaagcgcctgcgggagatcgatcgccgggtccgctatctgaccaaatgtctggaacagttgaaaatcgtcgattactcgccgcaacaggaaggtaaagtcttcttcggcgcctgggtagagattgaaaacgatgaaggcgatatcaagcgctttcgcatcgtcggttacgatgaaatttttggccgcaaagactatatctccatcgactcgccgatggcgcgcgcactgttaaaaaaagaggttggcgatctggccatcgtcaacacgccggcgggcgaagccagctggtatgtcaacgagatcgaatacgttaaatag

SEQ ID NO: 135076 - DNA, 720 bp, Enterobacter cloacae
atgcaagagaattataagattctggttgtggatgacgacatgcgcctgcgtgcgctgctcgagcgttatctgaccgagcagggcttccaggttcgtagcgtggcgaacgccgaacagatggatcgtctgttaacccgtgaatccttccacctgatggtgctggatctgatgctgccgggcgaagatggtctctctatctgccgtcgtctgcgcagccagagtaacccgatgccgatcattatggtgacggcgaaaggcgaagaggtcgatcggatcgtgggcctggagatcggtgctgacgactatattccgaagccgtttaacccgcgcgaactgctggcccgcatccgggcggtgctgcgtcgccaggcgaacgagctgccgggcgcgccgtcgcaggaagaggcggttatcgcctttggtaaattcaaactgaacctgggcacccgcgagatgttccgtgaagacgagccgatgccgttgaccagcggcgaattcgcggtcctgaaggcgctggtgagccatccccgtgagccgctgtcgcgcgataagctgatgaacctcgcccgcggacgcgaatactctgcgatggagcgctccatcgacgtacagatctcccgcctgcgccgcatggtggaagaggacccggcgcatccgcgctacatccagaccgtctggggtctgggctacgtcttcgtcccggacggttctaaggcatga

SEQ ID NO: 135077 - DNA, 1491 bp, Enterobacter cloacae
atgtttcgtcagtggttagcgttagtaattatcgtgctggtgtatatcccggtggcgattgacgcgacggtgctgcacgtggcggcgccaacattgagcatgacgctgggggccagcggcaacgaattgctgtggattattgatatttactcgctggtgatggcggggatggtgctgccgatgggcgcgctgggcgatcgcataggttttaagcgcctgctgatgatcggcagcgtgctgtttggcctgtcatcgttagcggcggcatttgcgccgtccgcgggctggctgattaccgcccgcgcgtcgctggcgattggcgcggcgatgattattccggctacgcttgcagggatccgcaccctgtttattgatgcgcggcatcgtaatatcgccctcggcgtctgggctgccgttgggtcgggcggcgcggcgtttggcccgctgattggcggcatgttgctggagcacttttactgggggtcggtgttcctgattaacgtgccgatcgtgctgatcgtggtttcgcttgctgcgcgctttgtgcctgctcagcaggggcggcccgagcagccgctcaatatcagccatgccattatgctgattgtagcgattttactgctggtctatagcgccaaaaccgccctgaaaggggtgctgtcgccgtggatggtggcctgtacgctgcttaccggggcggtgatgctgtttatcttcgtccgtatccagctgcgcgcgcgcgtgccgatgatcgacatgcgcctgttttgccatcgcattattttaagcggcgtggtcatggcgatgaccgccatgattgcgctggtgggctttgaactgctgatggcgcaggagttgcagttcgtgcatggttttacgccgtttgaagcagggatattcatgctgccggtgatggtggcgagcggatttagcgggccgatcgcgggcgtgctggtcgggcgtctggggctacgcattgtcgcggccggaggcatggggcttagcgcggtcagttttatcggcctgtcgacgctcgatttcagcacccaacagtggcaggcgtggagcctgatggtgctgttgggcttcagtgccgccagcgcactgctggcctcgacgtcagcgatcatggctgccgcgccgaaagagaaagcggccgccgcaggcgcgatcgaaaccatgtcctacgagctgggtgctggtctggggatcgccattttcggtctgctgttaacccgcagcttttcggcgtcaattgtactgccgcaggggctgagcgcgtcgctgaccgataaagcctcgtcgtccatcggtgaagcgatgaaggtggcgcaggagctgacgccgtcactggctgagccggtgatgacggcggcgaaaaccgcgttcatcacctcgcacagcgtggccctgggcagtgcgggaggcatgctgctgattctggcggtggggatctggtttagtctggcgaaggttggagggcagcagtaa

SEQ ID NO: 135078 - DNA, 1521 bp, Enterobacter cloacae
gtgcagcgggttgaggttgagctgcggcgcggaagggagccagcccatgcgctcggcgcggacgttgaaatcaatcaggtgaccggtaaatttcgatgcgtctgcaaggggagaaagcagttcctgtgcggtgagcttctcatagcgccactggctggcgtggttgtagaagtacgatgtgctgttcatctggcgcggcggacggttccagtccagcgcgaaggccagcggcagccagccggtttgcggacgcagcttctcctggcccacgtagtgcgaccagccgccgccgctctgcccgacgcagccgcagaagaccagcatgttgatcatcccgcggtagttcatgtccatgtggtaccagtggttcacaccggccccgaggatgatcatcgaccgaccgtgagttttgtgcgctgtgtcggcaaattcacgggcgattttttctatcaggtaagcggggacgccggtaatttgttcgccccaggccggggtgtaggcttttatctcggcgtagtttgtcgccgcgttattgtcttccagaccgcgatcgaggccgtagtttgcgagcaccagatcatacacgctcaccacgcgtctctggctgccgtcggccagggtcagggttttactcggtacgcggcgcgtcagcactggctcctgcttcacgctgcggaaatgcgggttctcgttgccgccgaagtacgggaaggccacgtctgccacgctgtcgtgggtgatgagcagggaaagcgtcagctcggtttcctgtcccgcggccagcgactccaggttccatttgcctttttcaccccagcggaagccgatggaaccattcggcgccaccagatttccggtcacgtcaaaggcgatggttttccactccgggttgttggtttcccccagcccgtcggccagatccgacgcgcgcagcatgcggcccggcaccacgcgaccgtcagcctgttcatccagcagaaccagcatcggcatgtcggtgtagcggcggcaatagttgaggaagtactcgctcgggttatcgaggtggaactctttgaggatcacatgccccatcgccatggcaagggcgctgtcggtaccctgtttgggggccagccactggtcgctgagcttcgctacctccgagaaatccggcgtaatggcgacggtcttggtgcccttgtaacgcacttcggtaaagaagtgggcgtccggggtgcgcgtctgcggcacgttcgacccccaggcaatgatatagctggagttgtaccagtccgccgattccggcacgtcggtctgttcgccccaggtcatcggcgacgccggaggcagatcgcagtaccagtcatagaagctcaggcaggtgccgccgagcagggagagatagcgcgtaccggcggcataagagaccatcgacatggccgggatgggggaaaaaccggctacccgatccgggccatagttcttgatggtccagacgttagcggcagcaatcagctggttaagctctttccagtttga

SEQ ID NO: 135079 - DNA, 861 bp, Enterobacter cloacae
atggcgcaaaccctcacgcttgcgcgtccggcgcgaaacctacggccttacctgtggctggcgttgccgctgctggtgctggcgacgctgtttttctatccgctactgctgatcgccgaacaggcgctgcgcgacgccagcggcaacctgagcctcgagaccttctggcaggtgattgactcaaaacgctttattggcgcgctgctcaataccttacagattgcggtgttcgctacccttggctgcctggtactcggcagcgtgctggcgctgattctggtgtttattccgttccccggcagccaactggtgagccgggtcattgatacttttattgcgctgccgacctttcttatcactctcgcattcacctttatttacggctcggcggggctgctcaacggcaccctgatggcgctgtttgcttttgaactgccgccggtagacttcctctattcgattaacggcgtgattctggcggagattaccgtctttacgccgctggtgatgcgcccgctgatggcgggactgcggcagatagataagagccagctggaagcggcgagtattctcggcgctcatccgttacgggtgattacccaggttatcttcccggcggcgctcccggcgctgatggcgggcggcagcctgtgcctgctattgaccactaacgagttcgggatcgtgctgtttattggcgccaaaggggtcaataccctaccgatgatggtctacagcaaggcgattctggagtcggattacagcgtggcctgcatgattgcgctgattaatattctgctgtcgctggggctgtttatgctctatcggctggcggcggcgcgcactggcgtaaggagttaa

SEQ ID NO: 135080 - DNA, 1113 bp, Enterobacter cloacae
atgttgatgaaaaccaccgtcacttcttccccgtcgctggcggggacgtccgggatcaccctggactcgctgcgcgtttcataccacggcaacgtggtcttaaaaccgctgtcattgaccattgagcccggtgaggtgctggcgctgattggcccttccggttccgggaaaaccacggtgctgcgggcgattgccggttttgtgcaaccggctggcgggcggatcctgatcggcgatacggacgtcacccagctgccgccgtacaaacgcgggctggcgatggtggtgcagaactacgcgctgtttccgcatatgaaggtggaagataacgtcgccttcggcctgcgggcgcaaaagcagcccagggggcttatcgccgagcgggtgaccgaagccttaaaaatcgtcggtatggcggattacgccacccgctacccgcatcagctttccggcggccagcagcagcgcgtggcgatagcccgcgcgattgccgtgcgtcctcgggtactgttgcttgatgaaccgctgtcggcgctggatgcgcaaattcgtcataacatggtggaagagattgcccgtctgcatcgcgaactgccggaactgaccattctctacgtcacccacgatcagaccgaagcgctgaccctggcggacaaaatcggcattatgaaagacgggtcgctgatcgcccacggtgaaacgcacgagctgtaccactatccgccgaaccgctttagcgccgaattcctcggccgcgccaatatcctgcaggcgacggcgctgaaagacagccccgagccggggctggttagcgtaagctgcggcggcggcctgattaacgccttcagccggggcggcctgcatggcaacaaaaagctgttatgcattcgcccgcagcacatgagcctggcgccgcgatcggcaaccagtaatcgtctcaatgctaccctgacgtcggtgcactggcagggcgatctgacgcatctgctgtgcgacgtcgcgggcgaagcggtgcggatcgtcatgactcaggtcaacccactgccgcgcgcgggggacaagctggcgctctacttcgaacctggcgatgcggttctgatcgaggtgcaatga

SEQ ID NO: 135081 - DNA, 1014 bp, Enterobacter cloacae
atgaaactctcccgacttgctctgctgtccctgttcgcgctgaccagctctccggtttgggcggacggcgtcgtcacggtttactccgccgacggcctgcatgacggcgataacagctggtatcagagccagttcgctgccttcaccaaagcgacgggcatcaaagtgcagtatgtggaaggcggctccggcgcgatcgtcgaacgtctggccaaggagcgcaccaatccacaggctgacgtgctggtcacggtgccgccgtttatccagcgcgccgcgaaagagcaattactggcaacctttaccccgcaaggtagcgcgcagatccccggcgccaacgaccgctattcgccgctggtgaacaactatctgaccttcatctataacggccagttgctgaaaaccgcgccggccagctggcaggatctgctggatagccgctttaagaacaagttgcagtactccacgccgggtcaggcgggcgacggtaccgcggtgatgctgcaggcgttccacagcctcggcggtaaagacgccggcttcgagtatctgggcaagctgcaggccaataacgttggcccatcggcctcgaccggtaagctgacggcgctggtcaacaaaggcgagctgtacgtcgccaacggcgatctgcagatgaacctgtcgcagatggcgcgtaacccgaacgttaaaattttctggccggcggatgataaaggcgagcgcagcgcgctggcgctgccctacaccatcgggctggtacagaacggaccgaacagcgaaaacggcaaaaagctgatcaatttcctgctggataaaccggcgcaatccagcgtcagcgcgcgctcctggggcctgccggtacgcaacgatgtagcgccggaagatgctaactttaaggcggcgaaagcggcgctcgacggcgtgaagagctgggagccgaactgggatgatgtcgcggtatcgctgtcggctgacattgcccgctggcataaagtgaccgatagcgagtaa

SEQ ID NO: 135082 - DNA, 720 bp, Enterobacter cloacae
atgaaatcaccctctggcgagatgccgcaatacctgatgattaaggcgcagctgcaggcgcgtattcaaaacggcgccctcaaaagcggcgacaagctgccttccgagcgcgagctgtgcgcgctgttcaacacgacccgtattacggtgcgtgagagcctggcgcagctggaggccagcggcgtgatttaccgcgccgaccgccgcggctggtttgtgacgccggagcgtctgtggctggatccgacgcaaaataccaacttccacaagctgtgtctcgaacaggggcgcgaaccgaaaacggtgctgcttgatggccgcctggctgccgtgccgctggatgtaatggcgcctctggcgctgcagcccttcgatcaggtctatttgctgacccggctgcgctatgccgacggccggccggtgtgctactgcgaaaaccactgtctgcccgcgcgggtgcctgagctgctgcgccacgatctcaacggcagtctgaccgagatttatcaaactcactacgacctgatctataccagtatgcatctgtcgttttatcccacctcaatgccgccgcaggccgccgaggcgctgggggtgatggaggggcgcccggcgctgctgttgcgcaggctgaattacgatcagcacgggcgtattctcgattacgatattgaatactggcggcatgatagcctgcggatcgaagtcgatacccattga

SEQ ID NO: 135083 - DNA, 1116 bp, Enterobacter cloacae
atggtgagacaaatgacttcacgaaattacctgctgctgacccccggcccgttaaccacctcccgtacggtgaaagaggcgatgttgttcgatagctgcacctgggatgatgattacaatctcggcgtggtacagaccattcgccagcagctggtgcagttggctaccccggccgacggttataccgcagtgctgctgcagggtagcggcagctacgcggtcgaagcggtgctcggcagcgtcatcggcgaacaaggcaaagtgctaatcgtcagcaatggcgcctatggcgcgcgtatgattgagatggcgcaactgatgggcatcgcctgccacccttacgactgtggcgaagtctcccgtccggacgcggccgcgatcgaacagatcctgcagaacgacccggcgatcacccatatcgcgatggtacacagcgaaaccaccaccggtatgctgaatccgatcgaagaggtggccgaactggcgaaacggtacgataaacgctatatcgtcgatgcgatgagcagcttcggcggcattccactggatatcgccgcgctgaatattgattacctgataagctccgccaataaatgcattcagggcgtgccgggctttgccttcgtgattgcccgcgaagcgcagctggccgcctgcaaaggccgttcgcgctcgctgtcgctggatctgtacgcccagtggcgctgcatggaggacaaccacggcaagtggcgcttcacctcgccgacccataccgtgctggccttcgcccaggcgctgaaagagctggcgcaggagggtggcgtcagcgctcgccatcagcgctaccgcaacaatcagcgccggctggtcgccgggatgcgcgcgctcggcttccggccgctgctcgacgatagcctgcactcgccgatcattaccgccttttattcaccggatgcgccgcagtatcgctttcacaccttctaccagaagctgaaagatcagggcttcgttatctatccgggcaaagtatcgcaaagcgactgcttccgcatcggcaacattggcgaagtctacgacgccgatatcaccgccctgctggcggctatcgacaacgccatgtactggaaacaataa

SEQ ID NO: 135084 - DNA, 810 bp, Enterobacter cloacae
atgaaccgtattagcgcactgatccttgactgggcaggcaccaccgtagacttcggctctttcgccccgacgcaaatcttcgtcgaggccttccgccaggccttcgatattgagatcacccttgaagaggcccgcgtgccgatggggcttggcaagtggcagcacattgaggcgctgggcaaactccctgctgtcgatagccgctggcaggccaaattcggccgcgcgatgacggccgccgatatcgatgcgatctacgccgcgtttatgccgctgcaaatcgctaaggttgtcgatttttccgcaccgattgccggcgtggtcgacaccatcgctacgctgcgcgccgagggcctgaagatcggctcctgctcgggttatccgcgcccggtgatggaaaagctggtaccggccgctgccgcccagggctacgccccggaccactgggtcgccaccgatgaccttgccgccggcggtcgtccgggcccgtggatggcgctgcagaacgtgattaccctgggcatagacgatgtggcccactgcgtgaaggtcgacgacgccgcgccgggcatcagcgaagggttacatgccgggatgtggagcgtcgggctggcggtgtccggtaacgaattcggcgctacctgggaggagtaccaggcgatgtcgaaagaggaaatcgccacccgccgcgagcgggcggcagacaaactgtatgccgccggggcgcattatgtggttgataccctggcggacctgccggaagtgattgccgacatcaatgcccggctggcaaaaggcgagcggccttaa

SEQ ID NO: 135085 - DNA, 1194 bp, Enterobacter cloacae
atgagtcattcaaatgaagccaaaccccatgcacgcgatctcgcgcggccaaactggtcggcggtcttcgcggttgctttctgcgtcgcctgcctgattaccgtcgagtttttgccggtcagcctgctgacgccgatggcgctggatttaggcatctccgaagggatggccgggcagtcggtgacgacgacggcattcgtcgcgatgttttccagcctctttatcaccacggtgataggtaaaaccgatcgccgctacgtggttatcctgttttcactgctgctgaccctttcctgcctgctggtatctttcgctgatagcttcaccctgctactactggggcgcgcctgtctgggcctggcgctcggcggtttctgggcgatgtccgcatcgctgaccatgcggctggtgccgatgcgcgtggtgccgaaagcgctatcgattatcttcggcgcggtatcaatcgcgctggtaattgctgccccgttgggcagtttccttggcgggcttatcggctggcgcaacgtctttaacggcgcggcggtgatgggcgtgctgtgtacgctctgggtgctgaaagcgctgccgtcgctgccgggtgaatcggcggctcagcagcaaaatatgtttggtctgctgaagcgtccgggggtgatggccgggatgtgcgccattttcatggcctttgccggacagttcgccttctttacctatattcgcccggtttacatgaccctcgccgggtttgatgtcgacggcctgacgctggtgctgctgagctttggtatcgccagctttatcggtacctcgctctcctcggtgctgctcaagcgttcggtaaaagcggcgctggcgatcgcgccgctggtgctgaccgcctgcgcggtggcgctggtgctgtggggagagagcaaaatcatcgcctcgacggtggcgattatctggggcttcgcgtttgcgctgatcccggtggggtggtcaacgtggatcacccgttccctctccgatcaggcggaaaaagccgggtcgattcaggtggcggtgatccagctggccaacacctgcggcgccgcggtcggcggcattgcgcttgaccacttagggctgctgtcgccgctggtgttgtcagggatattgatgctgtttaccggcctgctggtggcggccaaagtgaaggtgaattcacccgcttaa

SEQ ID NO: 135086 - DNA, 360 bp, Enterobacter cloacae
atgcgtatctttaaaaccaaatggttcgccagagaggctagctctcatggcatttccgacgacgagctctatcaggcaattcaatctgcgcttcagggcaaagtggttgatttaggaggaggggtttataaaaagcgactcaacaagaatcgcgatcgcgcaatcatacttaccaaaagcgcagagtattggttttatacctttctatatgccaaacaggatatggccaatatcaaccatcgcgagttaatgggttttcgtgagttagcaaaacactatgccaatctctctgaagagaaaacgacggtcttagttaaaagtaaagaactggtggagatttgcgatgacagcaaaaaataa

SEQ ID NO: 135087 - DNA, 324 bp, Enterobacter cloacae
atgacagcaaaaaataaatacaaaagcccggctttcgaagcgatccatagcgctgcgtcggggctattcagcgttggcgcaatcccacaggaaacaatgcgccattttgatgaatcatgtctcggtagcgtagccgcacttcaacccattgaaattaaagcgctacgtgaacaactcaatgttagccaacccgtgttcgctcgttatctgaataccagcgtgtctaccgtgcaaaaatgggagactggcgctaagcgaccgagcggaatgtcattaaaattgcttagcgtcgtacaaaaacacggcctgaaaatcctactgtag

SEQ ID NO: 135088 - DNA, 453 bp, Enterobacter cloacae
atgatctggataggactggccaccctggtagtggtgtttgttgtgggatttcgggtgcttacctctgattcacgccgcgcgatccgccgcctgagcgaacgcctcggcatcacgcctgtcccgctggaatcgatgatcgatcagctgggaaaaaccgccggtaatgagtatttgcgttacctggagcggccgaatgaagcgcatctgcagaacgccgcccaggtgctgctgatctggcaggttgcaattgtcgacgccagcgaaaaaaacctgcattactggtatcgcctgatgcaaaaagcgcgtttagcggcgccgatcaccgaggcgcagatccgcctggcgcaagggtttctgcgcgagctggatccggatatgagcgatttgcataaccttcagcagcgctataacgacctgtttctcccggaagacggcgtgcactggctgcactga

SEQ ID NO: 135089 - DNA, 1392 bp, Enterobacter cloacae
atgctggcctttctgaatcaggtgcgcaagccgaccttggatctgccgctcgatgtgcggcgcaaaatgtggttcaaacctttcatgcagtcctatctggtggttttcatcggctacctgaccatgtacctgatccgcaagaactttaacatcgcgcagaacgacatgatctccacctacgggctgagcatgacccagctggggatgattggcctgggcttctccatcacctacggcgtgggcaagacgctggtctcttattatgccgacggtaaaaataccaagcagttcctgccgtttatgctgatcctctccgccatctgtatgctgggctttagcgccagcatgggggcgggttctaccagcctgttcctgatgatcgccttctatgcgctgagcggtttcttccagagcaccggcggctcgtgcagctattccaccatcaccaagtggacgcccagacgcaaacgcggcactttcctcggcttctggaatatctcccacaacctcggcggcgcgggcgcggcgggcgtggcgctgtttggcgccaactatctgttcgacggccatgtgatcggcatgtttatcttcccgtcgattattgcgctgatcgttggctttatcggcctgcgctacggtagcgactctccggaatcctacggcctcggcacggcggaagagctgtttggcgaagcgatcagcgaagaggacaaagagaccgaagaaaatgcgatgaccaagtggcagatctttgttgagtacgtgctgaaaaacaaagtgatctggctgctgtgcttctccaacatcttcctctacgtggtgcgtatcggtatcgatcagtggtccaccgtgtacgccttccaggagctgaagctgtcgaaagaggtggcgattcagggctttaccctgtttgaggtcggcgcgctggtcggcacgctgctgtggggctggctgtcggatctggccaacggccgccgcgcgctggtggcctgcatcgcgctggcgctgattatcgccaccctcggggtttaccaacacgccagcaaccagtacgtctatctggcctcgttatttgcgctgggcttcctggtgtttggtccgcagctgttgatcggcgtcgccgccgtcggtttcgtaccgaaaaaagcgatcggcgccgccgatgggatcaagggcaccttcgcctatctgatcggcgatagcttcgccaaactgggtctcgggatgatcgccgacggcaccccggtcttcggcctgaccggctgggccggcacctttgcggcgctggacgccgccgccgtcggctgtatctgcctgatggccatcgtggctatctttgaagagcgtaaaattcgccgcgagaaaaagaaccgtattttgcagaccgcctga

SEQ ID NO: 135090 - DNA, 1329 bp, Enterobacter cloacae
atgttcgcctttttaaaagccccgccggacgctgcgccgattagcgataaacgcgagcttgatgcgcgttatcgctactggcgtcgccatatcctgttgaccatctggctgggctacgcgctgttctatttcacccgcaaaagctttaacgccgcggtcccggaaattctcgccagcaacgtcctgacccgcagcgatattggcctgctggccacgctgttctatatcacctacggactgtcgaaatttttctccggtatcgtcagcgaccgctccgacgcccgctattttatggggctggggcttatcgccaccggggtggtgaatattctgttcggtttttcttcctcactatgggctttcgcgctgctgtgggcgctgaatgccttcttccagggctggggctcgccggtctgcgcccgactgctgacggcctggtattcgcggaccgagcgcggcggctggtgggcgctatggaatacggcgcataacgtcggcggcgcgctgatcccgatggtggtgggcgcggcggcgttgcactacggctggcgtgccgggatgaccattgccggctgtctggcgatcctcgccggactgtatctgtgctggcggctgcgcgatcgcccgcaggcggtggggttacccgccgtgggcgactggcgtcacgatgcgctggaaatcgcccagcagcaggaaggcgctgggatgtctcgtaaagcgatcctgacccgctacgtgctggccaatccctacatctggctgctgtcgttgtgctatgtgctggtgtacgtggtgcgggcggcgattaacgactggggcaatctgtatatgtcggagacgctcggcgtcgatctggtgaccgctaactcggcggtgaccatgtttgagctgggcggttttatcggcgcgctggtggcggggtggggctcggataagctgtttaacggcaaccgtgggccgatgaacctgattttcgccgccggaattttgctgtcggttggcggcctgtggctgatgccgttcgccagctatgtcatgcaggcggcctgcttcttcactaccggtttcttcgttttcggcccgcagatgctgatcggcatggcggcggcggaatgttcgcataaagaagccgccggggcggcaaccgggtttgtcggcctgttcgcttatcttggcgcctcgctttccggctggccgctggcgcaggtgatggatatctggcactggaccggattcttcgtggtgattgcgattgccgccggcatttccgcgctgctgctgctgccgtttttaaacgcgcaggcgccgcgtaccgccagcgaagcgtga

SEQ ID NO: 135091 - DNA, 1503 bp, Enterobacter cloacae
atgaaggccgtcgtctcacgattgctgtcggtcatcggctgcgcctttatcttcgcggccgcctggttctgcctgtggagcatcagtctgcatctggtggaacgcgcggatttagcggtgctgctgtttccctttggcctgcggctggggttaatgctgcaatgcccccgcggctactggccagtgctgctgggaaccgagtggctgcttatctcatggctggcgcaggaggtggcgctggcgcacccgataattttgatgaccggaagcctgctgactctgctgccggtggcgttgatctcgcgctaccggcagcagcgcgactggctgacgctgctgcgtcagggcggggcgttaatggccgccgcgctgctgcaatcgctgccgtggctggcggagggggacgaggggcttaacgccctgctgttgacgctgaccggcggcctgacgctggcgccgacctgcctggttttctggcactatcttaccagcaccgtctggcggccgctggggccggcgctggtggcgcagccggttaactggcgcgggcggcatctgatctggtatctgctgttattcaccattagcctgtggctgcagcttggcctgcccgccgagctctcccgctttaccccgttttgtctggcgctgccgattatcgccctcgcctggcactacggctggcagggagcgctgatcgccaccctgatgaacgctatcgccttgattgccagccagacctggcacgatcacccggtcgatttattgctttccctgctggcacagagcctcaccgggctgctgttgggggcggggatccagcggctacgcgagctgaatcagtcattacaaagcgagctggcgcgtaatcgtcggctggcggaacgcctgctggagaccgaagagagcgtgcggcgagacgtcgcccgcgagctccatgatgatatcggccagaccatcaccgcgatccgcacccaggccgggatcgtacagcggctggcgccggacaacgccagcgtgcgccagagcggtcagctgatagaacagctgtcgctgggagtttacgactcggtgcgtagactgctaggccgtctgcgtccgcgtcagctcgacgacctgccgctggagcaggcggtacgttcgttgatgcgcgagatggagctggaggaccgcggcattgtcagccatctcgactggcggattaacgaggcgggactgagcgagaaccagcgcgtgacgctgtttcgcgtttgccaggaggggctgaataatatcgtcaagcacgccagcgccagcgctgtcactctgcagggctggcagcaggatgagcgactaatgctggtgctggaagatgacggttgcggcctgccgccggggtcgaatctgcaggggttcggcctgaccggcatgcgcgagcgcgtgaccgccctgggcggcacactgacgatctcctgcacccacggtacccgggtgtgcgtcaatctaccgctgcgttacgcctga

SEQ ID NO: 135092 - DNA, 594 bp, Enterobacter cloacae
atgaccaccatcgcccttattgacgatcatttgattgtccgctccggctttgctcagctgctggggctggaagctgattttcaggttgtcgccgaatttggtagcggccgcgaggcgctgacggggctaccggggcgcggcgtgcaggtctgtatctgcgatatctccatgccggatatttccgggctggagctgctcagccagttgccgaaggggatggcgaccatcatgctgtcggtacacgatagcccggcgctgatcgagcaggcgttgaacgccggcgcgcgcggcttcctgtcgaaacgctgcagccccgatgaacttatcgccgcggtacgcacggtggcggcgggcggttgctatctcacgccggatatcgccatgaagctggccgccgggcgccaggatccgctcaccaaacgcgagcgtcaggtggcggaaaagctggcgcagggcatggcggtgaaagagattgccgccgagctcggtctgtcgccgaaaaccgtccacgtacaccgcgccaacctgctggaaaagctgggcatcagcaacgacgttgagctggcgcgccgcatgttcgatagctggcaatga

SEQ ID NO: 135093 - DNA, 288 bp, Enterobacter cloacae
atgcaaaaacaatgtgataacgtcattctggaactcaccgtccgcaaccatcccggcgtcatgacccacgtgtgcgggctttttgcccgtcgcgcgtttaacgtcgaaggcattctctgtctgccaattcagggcagcgaacacagccgcatctggctgctggtaaatgatgaccagcgactggggcagatgattagccagattgaaaagctggaagatgtcaccaaagtggcgcgtaaccagtccgatcccaccatgtttaacaaaattgcggtgttcttcgaatag

SEQ ID NO: 135094 - DNA, 1689 bp, Enterobacter cloacae
atggcaagttcgggcaccacatcaaacacaatgcgctttaccggcgcgcagctggttgttcatttactggagcgccagggtatcactatggtcagcggcattccgggcggctccatcctgcctatctacgatgccttaagccagagcacgcagatccgccacatcctggcgcgccacgagcagggcgcgggctttatcgcccaggggatggcgcgtaccgaaggcaagccggcggtctgtatggcctgcagcggcccgggggcgacgaacctggtgacggcgatcgccgatgcccgcctggattcgattccgctggtctgcatcaccggccaggtaccggcctcgatgatcggtaccgacgccttccaggaagtggacacctacggcatctctatccccatcaccaaacataactatctggtgcgcgacattgccgagctgccgcaggtgatcagcgacgccttccgtattgcccagtccgggcgtcccgggccggtgtggatagacattcctaaggacgtgcagtcggcgaccattgagctggaagcgctgcctgagcctggcgagcgcgccccggcaccggcattcgcgcctgaaagcgtgcgtgaagcggcggcaatgatcaacgcggcgaaacgcccggtactgtatctgggcggcggggtgattaacgcgccgcaggcgatccgtgagctggcggaaaaagccaacctgccgaccaccatgaccttaatggcgctgggcatgctgccgaaggcgcacccgctgtcgctggggatgctggggatgcacggcgcgcgcagcaccaacttcattctgcaggaggcggatttactgattgttttaggcgcccgttttgatgaccgggcgattggcaagaccgagcagttctgcccgaacgcgaagattatccacgtcgatatcgaccgcgccgaactgggcaaaattaagcaaccgcacgtggcgattcagggcgatgtggcggaagtcttagcccagctgaacccgcagattgaggcgcagccgcgcgaggaatggcgccagctggtggccgacttgcagcgcgaattcccctgcgccatcccgcaggaaagcgacccgctctcccattacggcctgattaacgccgtggccgcctgcgtggatgatgaagcgatcatcactaccgacgttggccagcaccagatgtggacggcgcaggcctacccgctcaatcgtccgcgccagtggctgacctccggcggcctcggcaccatgggcttcggcctgccggcggccatcggcgcggcgctggcgaatccgcagcgcaaggttatctgcttctccggtgacggcagcctgatgatgaatattcaggagatggccaccgccgccgaaaatcagctggatgtcaaaattattctgctgaacaacgaagcgctggggctggtgcatcagcagcagagtctgttctatcagcagggcgtttttgccgccacctatccggggatgattaactttatgcagattgccgccggttttggcctgcaaacctgtgatttaaataatgaagtcgatccgcaggcggcgctgcaggcgattatcgaccgtccggggccggcgctgatccacgtgcgcatcgacgcacagcagaaagtgtatccgatggtaccgccgggtgcggccaatactgaaatggtgggggaataa

SEQ ID NO: 135095 - DNA, 447 bp, Enterobacter cloacae
atgccacccctgttaattgccgccacgacgccggatgccccggggttcgcggcgctacgaattgaaagccttgaacagcatttcaatatgctgcgccgcctggcggaaaactggcagagcggcaaaaaccgctttaacgcgccgggcgaaacgctgctgggcgccttcgtcaaccaccagctggtaggggtatgcggcatcaatagcgatcccttcagtccgcagccgcgggccgggcgcattcgccacctctacatcagcgaacgctatcgtcgccggggcatcggccagcagctgctggtctcggttatcacccactccagcgcctggttcgactttctcaacacccatgccccggcgcaggcctggcccttttatgaaaggcttggttttcgcccggtgtacgatgaaccgcgggtgacgcatcgcctgttttgttcgctttaa

SEQ ID NO: 135096 - DNA, 834 bp, Enterobacter cloacae
atgaccctcaccgtattctgcattttgctgttcgccgccctgctgcacgccagctggaacgctatcgtcaaagccagcggcgataaaatgtacgcggcgatcggcgtcagcggctcggccgcgctgatcgccctggtgatgctcccctttgccccgcagcccgcgctggtcagcgccccctatctgctggcgtcgtgcgcgttacaggtggtgtatacggtgctggtggcgaagacctaccaggtatcggatatgagccagacctatccgctgatgcgcggcactgcgccgctgctggtggcggcgataagcgtgctgttcctcggcgatcgtctgtcgccgctggcctggctgggtatcggcgtcatctgcctggcgattctggcgatggcctttaacggccgcgccagctcgcgcaaaggcatcgtgctggcgctgatcaacgcctgctttatcgccggttatacgctggtggacggcaccggcgtccggctggcgggctcggcgctgggctacaccctgtggaccttttttatgaacggcttctgcctgctgtgctgggcgatggtggcgcgacggcgtgaggccagtcgttatttacgtcagcactggaaaaaaggcatcctcggcgggatcggcaccatgggctcctacggcctggcgctatgggcgatgacccaggccccgctggcggtggtcgccgcgctgcgtgaaacctccattctcttcggcgcgctgatcgcctttatcgtcctgaaagagcaactgatgccgctgcgcatcgtggccgcctgcgggattgccgccggggcgatcctcctgcgcctggcgtag

SEQ ID NO: 135097 - DNA, 1185 bp, Enterobacter cloacae
atgaaacggcataagaacttcaatttgttgttgatgctggtactgctggtggccgtcggccagatggcgcagaccatttatattccggccatcgccgacatggcggtcgcgctgaacgtccgcgaaggggcggtacaaagcgtgatggcggcctatctgctgacctacggtatttcacagctattctacggcccgctctctgaccgcgtcggtcgccgaccggtgatcctcgtcgggatgtcgatttttatgctggcgacgctggtagctattaccacccatagcctgccggtgctgatcgccgccagcgccatgcaggggatgggcaccggggtcggcggcgtgatggcgcgtaccctgccccgcgacctgtacgaaggcgctcagctgcgtcatgccaatagcctgttaaatatgggtattctggtcagcccgctgattgccccgctgctcggcggcatcctcgacaccctgtggagctggcgcgcctgctacgctttcctgctggtcctgtgcgccggggtgaccttcagcatggcgaagtggatgccggaaacgcgcccggaaggggcgccgcgcaccaaacttctggccagctacaaaacgctgttcggcaccggcgcctttaactgctatctgctgatgctgatcggcggcctggcggggattgcggtattcgaagcctgctccggggtgctgatgggcgcggtgctcggcctgagcagcatggcggtgagtattctgtttattctgccgatcccggcggcgttcttcggggcgtggtttgccggccgccccaacaagcgtttcccgaccctgatgtggcagtcggtgatctgctgcctgctggcgggtctgatgatgtggatcccagggctgctgggcatcatgaccgtctggaccctgctggtgcctgcggcgctgttcttcttcggcgccgggatgttgttcccgctggccaccagcggcgcgatggagccgttcccgttcctcgccggaaccgccggggcgctggtgggcggcttgcagaatatcggctccggcgtgctggcctggctgtcggcgatgatgccgcaaaccggtcagggcagcctcggcctgctgatgatgctgatgggcctgttgattctgctgtgctggctgccgctggcctcgcgctttacccaccatcagcagccggtataa

SEQ ID NO: 135098 - DNA, 924 bp, Enterobacter cloacae
atggatgtgctaaaaaccttaggtacccggttgctgaacggctggcaactctccaggctgtcgacgtttgaggtggcggcgcggcacgagtcgttcgcccttgccgccgacgagctggcgctcaccccaagcgccgtcagtcaccggattaatcagctggaagaggagctggggatccagctctttgtccgctcgcaccgcaaagtggagctgacgcgtgaagggaagcgcgtttactgggcgctgaagtcgtcgctggatggtctcaatcaggagattctggacatcaaaaaccaggagctctccggcagtctgacggtctactcgcggccctctatcgcccagtgctggctggtgccggcgctgggggatttcagtcgccgctacccggccatctcgctgaccgtgctgaccggcaacgataacgtcaacctgcagcgggcgggtatcgatctggcaatctattttgatgacgcgccgtcgtcgcagctaagccaccattttctgatggatgaggcgatcgtgccggtatgtacgccgtattacgcccgccagctgcagttaacgtcaaatcctgccagtctgcgccactgtacgctgcttcacgatcgccaggcatggagcaatgattccggcaccgatgaatggttcagttgggcacagcaatttgggattgaactgccgcaatcgtcgggcattggcttcgatcgttctgatttagcggtgattgcggcgatgaatcatgtgggggtagcgatggggcgtaaacggctggtgcagaagcggttagagagcggcgagcttatcgcgccgttcggcgatatgacgctgaaatgccatcagcattattacgtgaccaccctgccgggccgccagtggccgaaaatcgacgcctttatcgagtggctgcatagcctgacctga

SEQ ID NO: 135099 - DNA, 1347 bp, Enterobacter cloacae
  misc_feature (242)..(251): n is a, c, g, or t
atgaaacacgctgacctgaccaccttaaccgcgaccttcccgcttgtgcaggatctgatcgccctgaaagaaaccacctggtttaacccggcaaccaccaccctggcggaggggttgccttacgtcggtctgaccgccgacgatgtgcaagacgcccatgcccgccttcagcgcttcgcgccctatctggcggcagccttcccggaaaccgccgcgagcggcgggattatcgaatcagaagnnnnnnnnnnatcagaagtggttgccattccggcaatgaaacgcagccttgagcaaaaattcggccagccaattagcggcgaactgctgctgaaaaaagacagccatctgccgatctccggatcaatcaaagcgcgcggtgggatttatgaagtgctgacccatgcggaaaagctggcgctggaagccgggctgctgacgaccgcagacgattatcgcaaattgctgacgccggagtttaaacagttctttagccagttcagcatcgccgtcggctccaccggcaaccttgggatgtcgatcggcatcatgagcgcgcgcattggttttcaagtcacggtgcatatgtccgccgatgccagggcgtggaaaaaagccaaactgcgcagccacggcgtaacggtggttgagtatgaagaggactatggcgtggcggtcgaacaggggcgcaaggcagcggaatccgacccgaactgcttttttatcgatgatgaaaactcgcgcacgctgttcctcggctatgccgtagccggcgagcgcctgaaagcgcagttcgcgcaagcaggacgcgtggtcgatgccgatcatccgctgttcgtctatctgccgtgcggcgtcggcggcggccccggcggcgtggcatttggcctgaagctggccttcggcgaacacgttcactgcctgttcgccgaaccgacccattcgccatgtatgctgctcggcgtctataccgggctccacgaccagatagcggtgcaggatttaggtattgataacctgaccgcggccgacggtctggcggtcggcagggcgtccgggttcgttggccgggcaatggagcgcctgctcgacgggttctatacccttgacgaccagacgatgtatgacatgctgggctggctggcggcagcggaaaatatccgccttgaaccctccgcgctggccgggatggccggagcgcagcgggtctgcgccagcaaagcgtaccatcagctgcaggggctgagtgagcaacagctgcagcaggccacccacctggtgtgggccaccggcggcggcatggtgccggaagaggaaatggcgcagtacctggcgaaggggcgctaa

SEQ ID NO: 135100 - DNA, 402 bp, Enterobacter cloacae
  misc_feature (288)..(297): n is a, c, g, or t
atgacaggatgtccggcgaatttgcctctcactcatgcccccggccagcaacatgacactccctttcaggctgtcgtggtggaggcgcatcattgccatcaaccgcaggcgttctatgcacagcttcgtcaacaggggctcaccgctatccattttattccgcagctggcggccggcgacgccgcgctttggggagagtttctctgcgcagtctttcaccgctgggtgcgggaagatattgggcgcatcaatattttactgtttagcgagacgctgagcgcctggtgnnnnnnnnnnggttaccggcagttctacgattttagcgggccctatatgcgagtgatgcgggacctgcgacgacagcagcggccaccagaggcgctgatgccgctgctgcgctaa

SEQ ID NO: 135101 - DNA, 363 bp, Enterobacter cloacae
atggcggataaacgccgggcgcggcgggaaagcgatcccggtcttcagccagagcgcacctcgctggcctggtttcgcaccctgttgggctacggcgcgctgatggcgctggcgattaagcacagctggcaccgcgccggcctgctgttctggctgtcgatcggcgtactggcgattgtggcggtgatcctctggggctatacccgccgtcgtcatctgatggacgtcgacgatagcgattttttacagccgcgggcggttcgtgacaaatttttgatcgcactcgcagtactttctctggcattcctgtttgctgttactcaccttcaaccgatcgttttattcattagggatatgtcatga

SEQ ID NO: 135102 - DNA, 348 bp, Enterobacter cloacae
atgaaaatctcccgcctcggcgaagcgccggattaccgcttttcgctggctaacgaacgcacctttctggcatggatccgcacggcgctcggttttctcgccgccggcgtcggccttgaccagttagcgccggactttgccacgccgctgatccgtgaaattctcgccctgctgctgtgtctctttgccggcggcatggccatctatggctatctgcgctggctgaataacgagaaggcgatgcgcctcaagcaggaccttccctatacccgcacgctgctggtgattagcattctgctgctggcggtggtggccgcggtgatgctgctggtggtgtatggcggataa

SEQ ID NO: 135103 - DNA, 1323 bp, Enterobacter cloacae
atgaaaaaattctcagttgttatcgcaggcggcggcagcaccttcaccccgggcattgtcctgatgctgctggcaaaccaggatcgttttccgctgcggtcgctgaaattttatgacaacgacggcgcgcgccaggagaccatcgccgaggcgtgcaaagtgatcctcaaagagcaggcgccggagattgagttcagctataccaccgatccgcaggcggcgtttaccgatgttgattttgtcatggcgcatatccgcgtcgggaaatatccgatgcgtgaacaagatgagaaaatcccgctacgccacggcgtgctgggccaggagacctgcggaccgggcgggatcgcctacggtatgcgctctatcggcggcgtgctggagctggtggattatatggaaaaatattcgccgaacgcctggatgcttaactactccaacccggcggcgattgtggcggaagccacacgtcgtctgcggccgaacgccaaaatcctcaacatctgcgatatgccgatcggcattgaagggcggatggcgcagattgtcggcctcaaagaccgtaaacagatgcgcgtgcgctactacggcctcaaccacttcggctggtggacgtcgattgaggacctcgacggcaatgatttgatgccgaaactgcgcgaatatgtggcgaaatacggctatgtgccgccctcgaacgatccgcacaccgaggccagctggaacgacacctttgccaaagcgaaagatgtgcaggcgctggatccgcagaccatgccgaatacctacctgaaatattatctgttcccggactatgtggtagcccactccaacccggaacgcacccgcgccaatgaggtgatggatcatcgggagaaaaacgtcttcagcgcctgccgggcgatcatcgccgccgggaaatccaccgccggcgatctggagattgacgagcatgcctcctatatcgtcgatctggcgacggctatcgcctttaacacgcaggaaaggatgctgctgattgtgccgaacaatggcgcgatccataactttgacgccgacgcgatggtggagatcccttgtctggtaggccacaacggaccggagccgctgacggtcggcgacatcccgcatttccagaaagggctgatgagccagcaggtggcagtggaaaaactggtggtcgatgcctgggaacagcgctcgtaccacaagctgtggcaggcgattaccctgtcgaaaaccgtgccgagcgcctcggtggcgaaagcgatcctcgacgacctcattgccgccaacaaagattactggcctgagctgcattaa

SEQ ID NO: 135104 - DNA, 1623 bp, Enterobacter cloacae
atgctcagtcaaatacaacgctttggcggcgccatgtttaccccggttttattgttcccttttgccgggattgtggttggtatcgccatcatgctgcgcaacccgatgttcgtcggcgaagcgctgaccgcacccgacagcctgtttgcccagatcgttcacatcattgaggagggcggctggaccgtctttcgtaatatgccgctgattttcgccgtcggtctgccgatcggcctggcgaaacaggcccagggccgggcctgtctggcggtgctggtgagctttctcacctggaactactttatcaacgccatggggatgacctggggccacttcttcggcgtcgatttttccgctgaacccacggccggcagcggcctgacgatgattgccgggattaaaaccctcgacaccagcattatcggcgccatcgtcatctccggtctggtgacggccctgcacaatcgctatttcgataaacccctgccggtattcctcggcatctttcagggttcatcgtttgtggtcattgtcgccttcctcgcgatgatcccttgcgcctggctgaccctgctcggctggccaaaggtccagctgggtattgaatcgctgcaggcctttctgcgctcagccggggcgcttggggtgtgggtttacatcttccttgagcgcatcctgatccccaccggcctgcaccacttcgtctatggcccgttcatctttggcccggcggtggtggagggcggactgcaggtctactgggcagagcatctgcaggcgttcagtcagagtacggaaccgctgaagacgctgttcccggagggcggctttgccctgcacggtaactcgaaagtgtttggttcggtggggattgcgctggcgctctacttcactgccgcgccggaaaaccgcgtcaaggtcgccggcctgctgatccccgccaccctgaccgcgatgctggtcgggatcactgagccgctggagttcaccttcctcttcatctcgccgctgctgttcgccgttcacgcggtgctggcggcgaccatggcgacggtgatgtacatctgcggcgtggtgggcaacttcggcggcggcctgctcgatcaattcttgccgcaaaactggatcccaatgttccatcaccacgcttcgatgatgttcattcagataggcatcggcctctgtttcaccgccctctacttcgtagtcttccgcaccctgatcctgcgtctgaacctgaagacgcctggccgggaagagagcgaaatcaagctctacagcaaggccgattaccaggcggcacgaggtaaaaccacggccgccgccgcgccagagacccggctgggtcaggccgctggcttcctgcaggccctcggcggcgccgacaacattgaaagcatcaacaactgcgccacccgactgcgcatcgcgctggtcgatatggcgaaaacgcaaagtgacgacgtctttaaagcgctgggcgcccacggggtagtacgccgcggcaacgggattcaggtcatcgtcggcctgcacgttccccaggtgcgcgaccagctggaaaacctgatgaaagattctctttcgaccgaacataccaccatgacggaggcagtatcatga

SEQ ID NO: 135105 - DNA, 723 bp, Enterobacter cloacae
gtgatctacaaatccattgctgaccgcctgcggctgcggctgaattccgccgacttcgccatcggcagcccgctaccaggagagaaaaaactggccgaggagttcggagtggcgcgcatgactattcgcaaagccatcgatctgctggtggactggggattggttgtgcgtcgccacggctcgggaacttacgtggcgcgtaaagacgtccatcatgaaaccagcaatctgaccggcctggcggaagtgctgcgcaagcagggtaaagaggtggtgagtcaggtgctggccttcgaggtgatgcccgccccgccggccatcgccagtctgctgcggattaaaattgatgaacggatctacttctcacggcgggtgcgctacgtcgacggcaagccgctgatgctggaggatagctatatgccggtgaagctgttccgcaacctgtcgctgagtcatctggaagggtcgaaatttgattatattgagaaagagtgcgggatcatcatcagcgggaactatgaaacgctgacgccggtgctggcggacaagcagttggcgcgctcaatgaacgtcccggagcagacgccgctgctgcgtattacctccctttcctacagcgacagcggcgagtttcttaactattcggtcatgttccgcaacgccagcgagtatcaggtggactatcacctgcgccgcgtccaggcgcaaagcccgctagcttag

SEQ ID NO: 135106 - DNA, 1662 bp, Enterobacter cloacae
atgagtgagatagcattgacggtcagcgtgctggcgctggtggcggtggttgggttgtggatcggcaatgtcaaaatccgcggcgttggctttggtattggcggcgtgttatttggcggcattatcgtcggccactttgtcgatcaggcgggcgtcgccctcagcagcccgatgctgcattttattcaggaattcggcttgatcctgttcgtctacaccatcggtattcaggtggggccgggctttttcgcctcgctgcgggtctcaggcctgcggctcaatctgttcgctatccttatcgttatcctcggcggcctggtgaccgcggtgctgcataagctgttcaatattcctctcccggtggtgctcggtatcttctccggtgcggtgaccaacacgccggcgctgggggccgggcagcaaattctgcgcgatctcggcgtaccgttcgaggtggtcgatcaaatggggatgagctacgcgatggcgtatccgttcggcatctgcggcattctgctgaccatgtggctggtgcgtctgttctttcgcatcaatatcgagaaagaggcccagcggtttgaggagagcagcggcaacggccacgctcatttgcacaccattaacgtgcgggtggagaaccccaacctcaaccagatggcgattcaggatgtgccgatgctcaatagcgacaacatcgtctgttcgcggctgaagcgtggcgagctgttgatggtgcctgcgccgggcacccttatccaggctggcgacctgctgcacctggtggggcgacctgaggatttgcacaatgcgcagctggtgataggccaggaggtggcgacctcgctgtcgacgcgcggcaccgatctgaaagtggagcgggtggtggtcactaacgaaaaagtgctggggaagaaaatacgcgatctgcacgtcaaacagcgctatgacgtagtgatctccaggcttaaccgggcaggcgtcgagctggtagccagcagcagcgccagcctgcagtttggtgacatcctcaacctggtcggccgtccggaggcaattgacgccgtggccgccgaactgggtaacgctcagcagaagctgcagcaggtccagatgctgccggtgtttatcggcatcggactcggggtactgctgggatctatcccgttgtttattcccggcttccctgccgcattgaagctgggactggccggtgggccgctgattatggcgctgatccttgggcgtatcggcagtatcggcaagctgtactggtttatgccgccgagcgccaacctggcgctgcgcgagctggggatagtgctgtttctggcggtggtcgggctaaaatcggggggtgactttgtcgccaccctgacccagggcgatggtctgagctggatcgcttacggcattttcatcaccgccatcccgctgctgacggtgggcatcctcgcgcgcatgctggcgaaaatgaactatctgacgctgtgcggcatgctggccggctccatgactgacccgccggcgctggccttcgccaacaacctgcacgccaccagcggcgcagcggcgctctcttacgccaccgtctatccgctggtgatgttcctgcgcattatcaccccgcagctactcgccgtgctgttctgggggctaagctag

SEQ ID NO: 135107 - DNA, 237 bp, Enterobacter cloacae
atgggatcgactgagctcgcggccaacctgtttcgtgctacccaaacggaagaaaaactacgtcgggacgcggttgattcgaagcaactcgccaacaaaatgcattatgacgtagggcaaaaagtacgccagactattaaagacctgggtggcactatgcctgaagcacttccttccccggagaaaagtattcagcaactcactatcgcagcgaaaaataagaacgcgcctgaatag

SEQ ID NO: 135108 - DNA, 171 bp, Enterobacter cloacae
atggattgctttttggtcaagaccaccatagagacctttataaccatggttttgaaagacagcaaaatcaagagtcgtctcaacaccagcacgttgggccgtttcaaccagatgtttattatgctctttgagctcattgtgcaggaacagtcacttttcatcctctcgtag

SEQ ID NO: 135109 - DNA, 396 bp, Enterobacter cloacae
atgaacgaacagcagccatttgaagcgattagaaagagcgatgaggcggggcgggagtattggtctgcccgcaaccttggtcccctgcttgactataaagagtggcggaatttttataaggtcattgcaaaagcgataatttcatgtgaggcgagtggtcatccctcggcagaccattttgttgaaaccaacaaaatggtcgaattaggttctggcgccagcaggaatcttgaagatttccacctctcacgctacgcctgctatctggtagtgcaaaatggcgatccgtcgaaaccggtgattgctgcggggcaaacgtactttgccttgcaaacccggcgccaggaattgcaagatgatcaaatatttaagtctctacgagaggatgaaaagtga

SEQ ID NO: 135110 - DNA, 429 bp, Enterobacter cloacae
atgcgtaactacgatttatcccccctgctgcgtcaatggatcggttttgacaaactggccagcgccctgcaaaccgccggtgaaagccaaagcttcccgccctataacatcgaaaaaagcgacgataaccactaccgcattacccttgcgctggccggtttccgtcaggaagatctggatattcaactggaaggcacccgtctggtggtgaaaggcacgccgcagcagccggaaaaagagaccacatggctgcaccaggggttggtgagccaggccttcagcctgagcttcaccctcgccgacaacatggaggtctctggcgcgaccttcaccaatggcctgctgcatatcgatctgacccgcaatgagcctgagcagatcgccccgcagcgtatcgccatcagcgaacgaccggcattaaatagttaa

SEQ ID NO: 135111 - DNA, 414 bp, Enterobacter cloacae
atgcgtaacttcgatctttccccgctatatcgttcagccattggtttcgaccgcctgttcaacctgctggaaaacaatcaaagccagagcaacggcggctaccctccgtataacgtcgagctggtagacgaaaaccactatcgcatcgctatcgcggtggctggctttgctgaaagcgagctggagatcactgcccaggacaatctgctgatcgtcaaaggcgcccacgccgccgagcagaaagagcggacctacctgtatcaggggatcgccgagcgcaacttcgagcgcaaattccagctggcggaaaacattcacgtccgcggcgccaatctggtgaacggcctgctgtatatcgatctggaacgggtgatcccggaagcgaacaagccgcgccgcatcgaaatcaactaa

SEQ ID NO: 135112 - DNA, 333 bp, Enterobacter cloacae
atgaaaagcagacgactgttaaagctggtcctgttcagcgggataataagcctgagcggttgctccagcgtaatgtcacataccggtggcaaagagggaacctatccgggcacgcgatccagtgcgcaaacgctgggggacagcgataccaactggggtgtgaaatcgctggtggcgctggacatgccgttcaccgccgtcatggataccctgctgctgccgtgggatatgttccgcaccgacagctcaatcaaatctcgggtcgaaaagagcgagaaggctacgctggcgaccaactcggtgatcccgccagcgccgatgcctgcccagtaa

SEQ ID NO: 135113 - DNA, 1227 bp, Enterobacter cloacae
atgaaacaagtcacttttgctccccgtcatcaccagcttaccaatattaatacctggactcccgacagccagtggctggtattcgacgttcgtccgtccggcgcatcgtttaccggcgaaaccattgagcgagtgaacgtaaacagcggtactgtggagaccatttatcgtgccacgcagggcgcgcacgtgggcgtggtaaccgtgcatccaacccaggagcgctatgtgtttattcatggccccgagcggccggatgcgcagtggcagtatgattttcatcatcgccgcggggtggtggcctttcagggggctgtcgagaatctggacgccatggacattacccccccctacacgcccggcgcgctgcgcggcggcagccacgtccatatctatagccccaacggtcagtttgtcagttttacctacaacgatcacgtgctgcacgagcgcgatccggcgctggatctgcgcaacgtcggcgtggcggcgccctatggaccggtgacgccgcagggacagcatccgcgcgaatatggcggcagccactggtgcgtgctggtaagccgcacgacgccggcacccgcgccgggcagcgatgagattaatcgcgcctatgaggagggctgggtcgggaaccatactctggcgtttattggcgatacgctggcggaaaatggcgataaagtgcctgagctgtttattgtcgatctgccgcaggatgaaaccggctggaagcagcctggcggggcgccgctggccggtaccgcaaccacaatgccggcgccgccggcgggcgtcagccagcgtcgtttgaccttcacccaccatcgccgctacccgggactggtgaacgtcccgcgccactgggtgcgcgccaatccccaggcgacggcgatagcctttctgatgcgcgacgacgccggcgtagtgcagctgtggcttatttccccgcaggggggcgagccgcggcagttgacgcatcacgcgtcgggtatccagtcggcgtttaactggcatccgtcgggagagtggctgggtgttgcgctggaggatcggattgcctgctgccatgccggtacgggagatatcacctttttaaccgatacgcatgcgcatgcgccctcggcggacgcgatcgtcttttcgccagacggtaaacagattgcctggatggaggaggtggacggttatcgtcagctgtgggttacgcagaccggacgataa

SEQ ID NO: 135114 - DNA, 1293 bp, Enterobacter cloacae
atggatatttcagttaccgctgtaaaaaccgggcgtcgccgttatctgacgctcatcatgatctttattaccgtggttatttgttatgttgaccgtgccaacctcgccgtcgcctcggcgcatattcaggaggagtttggtattagcaaagcggaaatgggctacgtattttccgcctttgcctggctgtataccctctgccagatccctggcggttggttccttgaccgcgtgggatccaggcttacctactttatcgctatatttggctggtcggtggcgacgttgctacaaggcttcgccaccggtttaatgtcgctcattggcctgcgcgctatcaccgggatcttcgaagcgccagccttcccgaccaacaaccgcatggtgaccagctggttcccggagcacgagcgcgcttccgccgtcgggttttatacctcggggcaatttgttggcctggccttcctcacgccgctgctgatttggatccaggagctattgagctggcactgggtgtttatcgttaccggcggtatcggcattatctggtcgctgatctggttcaaggtttatcaaccgccgcgcctgactaaaagcatcagtaaagccgaactcgactatatccgcgacggcggcggcctggtggatggcgatgcgccgctgaagaaagaggcgcggcaaccgttatcgaaagcggactggaagctggtttttcaccgcaagctggttggcgtttaccttggacagttcgcggtaacctcgacgctgtggttcttcctgacctggtttccgaactacttaacccaggaaaaaggcatcaccgcgctgaaggccggctttatgaccacggtgcccttcctcgccgcgttttttggcgtcctgctgtctggttggctggcggataagctggtgaaaaaaggctactcgctgggcgtggcgcgcaaaacgccgatcatctgtggactgttgatctccacctgcatcatgggggcaaactacaccaacgaccccatctggatcatggcgctgatggcgctggcgttcttcggtaacggttttgcgtctatcacctggtcgctggtctcctccctggcgccgatgcgcctgatcggcctgaccggcggggtgtttaactttgttggcggcctgggcggcatcaccgtcccgctggtgattggctatctggcgcaggattacggctttggcccggcgctggtttatatctccgtggtggcgttaataggcgcgctgtcttatatcctgctggtcggcgatgtgaaacgtgtaggctaa

SEQ ID NO: 135115 - DNA, 441 bp, Enterobacter cloacae
atgttttcgcgctttgaatttaaacgggttttggaagcgggcggggtggctattttacaacccgatctgtcgcacgcaggcggtattaccgaatgctataaaattgccggcatggcggaagcctatgacgttgggctggcgccgcactgtccgctggggccgatcgcgctggcagcctgtctgcacgttgatttcgtttcgcataacgcggtcttccaggagcagagcatggggatccattacaacaaaggcgccgaactgcttgattttgtgaaaaacaaagaagatttcaatatggaaggcggcttctttaaaccattgatgaagccggggctgggcgtggaaattgatgaggcccgcgtgattgagttaagtaaaaacgcgccggactggcgaaatccgttgtggcggtatgaggatggatctgtcgccgaatggtaa

SEQ ID NO: 135116 - DNA, 735 bp, Enterobacter cloacae
  misc_feature (634)..(643): n is a, c, g, or t
atgaaaataaccaatatcaccacgtaccgtttacctccgcgttggatgttcctgaagattgaaaccgatgaaggcatcgtcggctggggcgaaccggtgattgaagggcgcgcccgtacggtggaggcagccgttcatgaatttggcgattacctgattggtcaggatccggcgcggattaatgacctgtggcaggtaatgtaccgcggcggcttttatcgcggcggcccgattatgatgagcgccatcgccggtattgatcaggcgctatgggatattaaaggtaaggtcctgaatgccccggtgtggcaactgatgggcgggctggtgcgcgacaaaattaaagcctacagctgggtgggcggcgaccgccccgccgaagtaattgacgggattaagaagctgcgcggcattggtttcgacacctttaaattaaacggctgcgaagagatggggctcatcgataattcccgcgcggttgacgcggcggtgaataccgtggcgcaaatccgcgaagcgtttggcaatgaaattgagtttggtctcgattttcatggccgcgttagcgcgccgatggctaaggtattaattaaagagctggagccatatcgcccattatttattgaggagccgnnnnnnnnnngtattagccgagcaggcggaatattatccgcggctggcggcgcaaacccatattcccattgccgccggcgaacgtatgttttcgcgctttga

SEQ ID NO: 135117 - DNA, 618 bp, Enterobacter cloacae
atgcagtggcaaactaaccttccacttatcgctatcctgcgcggtattacgccagacgaggcgctggctcacgttggcgccgttatcgacgccggtttcgacgcggtcgaaatcccgctgaactcgccgcagtgggagaaaagtattccgcaggtcgtcgacgcttacggcgagcaggcgcttatcggcgcgggcaccgtgctgcaaccggagcaggtcgacaggctggcggccatgggctgtcggctgattgtgacgccaaacattcaaccggaagtgatccggcgagcggtgggttacggcatgaccgtgtgtccaggctgcgccaccgccagcgaagcctttagcgccttggatgccggtgcgcaggctctgaaaatcttcccgtcatcggcttttggcccggattacatcaaagcgttgaaagccgtgctgccgcccgaggttccggtctttgccgttggcggcgtgacgccggaaaacctggcgcagtggattaatgccggctgtgttggggcaggattgggtagcgatctctatcgtgccggccagccggttgaacgtaccgcgcagcaggcagccgcattcgtaaaagcgtatcgagaggcagtgaaatga

SEQ ID NO: 135118 - DNA, 879 bp, Enterobacter cloacae
atgacggctcgctacatcgcaatagattggggatcgacgaatttacgcgcctggctttatcagggcgaagaatgcctggaaagcaggcaatctgaagcaggcgtaacgcgcctgaatggtcgctctcccgctgcggtgttagcggaaatcacacagcactggcgcgatggcgctacaccggtggtgatggcagggatggtcggcagcaacgtgggctggaaaatcgccccctatttgccgcttcctgccgctttctcggatattggccagcagttaactgccgttggcgacaatatctggataattcccggcctttgcgtttcccgtgacgataaccataacgtcatgcgtggggaagaaacgcagctgctgggcgctcgcgccttagccccttcgtctgtctacgtgatgccgggaacccactgcaagtgggtactggccgatcgccggcaaattcacgattttcgtaccgttttgaccggggaattgcatcatttgttgcttcagcactcgctggtgggcgccggcttaccgccgcaggaaacgtccgctgccgcattcgcggcaggtctgcagcgcggtatcaacaaccccgccgtcctgccgcagctgtttgaagttcgcgcttcgcacgtgctgggcgcgctgcctcgcgagcaggttagcgaatttctttccggcctgctgattggcgccgaagttgccaccctcagcgacacattcgccggacagcaggcgatcagtctcgtcgctgggtcatcgttaacatcccgctatcagcaggcattcgccgccattggccgcgaagtcagcgcggttgcgggcgatacggcatttcagacaggaataaggagcatcgcttatgcagtggcaaactaa

SEQ ID NO: 135119 - DNA, 690 bp, Enterobacter cloacae
atgactctcaataagaccgatcgcattgtgatctcgctgggcaaacagatcgtcagcggtaaatacgtcccgggttcggcgcttccggccgaagcggaactctgtgaggagtttgaaacctcgcgcaacatcatccgcgaagtgtttcgttccctgatggcgaagcggctgattgaaatgaagcgctatcgcggcgcgtttgtcgctcccagaaaccagtggaactacctcgacaccgaggtgctgcagtgggtactggaaaatgactatgacccgcgtcttatcagcgcgatgagtgaagtgcgcaacctggttgaacccgccatcgcgcgttgggcggcggaacgcgccacctcaagcgatctggcggaaatcgagtcggcgctcaatgacatgatcgccaacaaccaaaaccgggatgcctttaacgaagcggatatacgctaccacgaggcggtgctgcagtcagtacataacccggttttgcagcagcttagcgtggcgatcagttcgctgcagcgggcggtatttgaacggacctggatgggcgatgaaggcaacatgccgaaaaccctccaggaacataaagcgctatttgacgccattcggcatcaggatagcgacgcggcggagcaggcggcgttgacgatgatcgccagctcgacacgaaggcttaaggaaatcacatga

SEQ ID NO: 135120 - DNA, 1134 bp, Enterobacter cloacae
ttgagccgactgtttatcacttttctgctgctgatggcctgcccgacaggcagccaggccgaggcgctcagccgcgagaaaatcgacggctggctgcagcatctcggcgccagcgataagttcgacgccagcaaaggcatcgactggggcgtgatgcccggtccgttctatacgccggaactagggttgggcattggcaccgctgtcgtcggcctgtatcgtcccgacccgcaggataccaccagccagaactcgaccctgacgctcagcggctacgccagctctaccggcgcctttggcctcagcgtgaaaaactacacctttttcgatcgtgatctgtggcgcgtttttgtcgacgggtcgatagccaatacgcccacttattattgggggcagggttttcatgccggggataaagacaatgaaaaagagaagtataccgcccaggtactgaccctgcgacccaccctttatcggcagcttatcgatcatgtttatctcggggcgggatggtcgctggcggcgcagaatgccgatgagatggaccatgacgatcggccgaagatagaaaacactccgcaggggccgtcggtattcagctccggcgccagcatcgatattaactgggacgatcgcgactttgtccctaacccgcgccggggtcagtatgccaacctccgctatacccactatgcgcccggattaggtagcgatacccgctttgaggaatttcagctgcactatagccattatcatgccctgagcgagaaaagcgtgctcgcctgggaggccgatggcgccttcacccagggcgaggtaccgtggagcatgatgccgctgctcggcagcgatgaacggatgcgcggctactaccaggggcgctaccgggataaaaacgtcgtcagcggccagctggaataccgccggcagctcacctggcggcacgggattgtcgcctgggccggggcgggaaccatggggccctcactgtcgtcgctgaataatggccgctggctgccttcggcgggcgttggctaccgctttgaattcaaacctcgcgttaatgttcgcctcgactacggtatcggcaaaggcagcagcggcttttacttccaggtcggcgaagcgttttaa

SEQ ID NO: 135121 - DNA, 519 bp, Enterobacter cloacae
gtggtgcccctgccggggatgcaggatctcgactttcgtctcgattttaaaggtactacctacgggatgggcaccaccctggtgggcggcgtcggcaattggtttaccgtgctggacgccaactacacgcaaacgcgctttgatatcctcgacggcagcatcgatgcgcttaccttttcgccgcgcgttggctatcgtttcagtacgccatcggtcgatgcgctgcatctccccgccggaaagctaaatctgtgggttggcagcatgtatcaggatgtccagcaggagtttaaaggcagcctcagcgatctctcgatgccgtcgccgatgctgcagaatatggttaatctggccaaccaggacaataacggtcgcttcgatgtgaagcagcatctgcagtcgccatggaatgttctggtgggcacgcaatacgagctgacgcagaattttaatattactaccgagtttggctttgccgaacgtaacagtttctttattgccggcgagtatcgcttttga

SEQ ID NO: 135122 - DNA, 558 bp, Enterobacter cloacae
  misc_feature (492)..(501): n is a, c, g, or t
atgttggttacgctgccattcgcctctgttcagatttgcgcggccgcggaaccaacggcgccgctcgaaccggcgtatgcctatcacggcgcagagcccgcggatctgccggcgccagaaagtcgccagcctgcggccgcagcatcgtcctcgctactccctttgctaggcgatgaggccagaaagcgcggctacgtcctgccgctgccgtttggcgtcagcattaactatatggatatgcggcagaatattaatgtcgacagcataaacttcaccgggctgtcgctggatggccgcaatatcgattgcggtaaggatcctgtctgcaagcacgccgtgaataacattttcgctaatgggccggtctcgctggataacgctttccagattggtgttggtcatacgcgggaaagcagcaaaaccgagacgctcaagctggatgcctggctgctgccgtttatgaacgtttatggcctggtggggcacaccgannnnnnnnnncaccgaagggcattcaatttcgcagatagctgtcggcctgaagggaccgaacggtaa

SEQ ID NO: 135123 - DNA, 813 bp, Enterobacter cloacae
atggctattaaactgattgcaatcgatatggacggcacgctgctgctgcccgaccataccatctctccagcggtgaaagccgccatcgccgcggcgcgcgagcgcggtgttaacgtggtgctgaccaccggtcgcccttacgctggcgtccacagctatttgaaagagctgcatatggagcagccgggtgattactgcattacctacaatggcgcgctggtgcagaaggctggtgacggaagcaccgtcgcgcaaaccgcgctgagctatgacgactatcgcttccttgagcagctctcccgcgaggtcggctcccacttccatgcgctggatcgcaatacgctgtataccgcgaaccgcgatatcagctactacaccgtccacgaatcctatgtggcaaccattccgctggtgttctgcgaagcggagaaaatggatcctgagatccagctgctgaaagtgatgatgattgatgagccggcaatcctcgaccaggccatcgcccgtattccagcggaagtgaaagagaagtacaccgtgctgaaaagtgcgccttacttcctcgaaatactggataaacgcgtcaataaaggcactggcgtgaagtcgctggccgatgctctgggcatcaagccggaagagattatggcgattggcgatcaggaaaatgatatcgcgatgattgaatttgccggcgtcggcgtggcaatggataacgccattcctgcggtcaaagaagcggcgaacttcatcaccaaatcgaaccttgaagatggcgttgccttcgccattgaaaaatacgttttagcgtaa

SEQ ID NO: 135124 - DNA, 1443 bp, Enterobacter cloacae
gtgaaggtgccggatccgaaattctcctcgcagaccaaagacaagctggtctcctccgaggtgaaatcggcggtggagcagcagatgaacgaactgctgagcgaatacctgctggaaaacccatccgatgcgaaaatcgtggtcggcaaaattattgacgccgcgcgcgcccgtgaggccgcacgtcgcgcccgtgagatgactcgtcgtaaaggcgcgctggatctggcaggcctgccgggcaaactggcggattgccaggagcgcgacccggcgctgtccgaactgtacctggtggaaggggactccgcgggcggctctgctaaacagggtcgtaaccgcaagaaccaggcgatcctaccgctgaagggtaaaatccttaacgttgagaaagcccgcttcgataaaatgctctcttcccaggaagtggcgacgctgatcaccgcgctgggctgcggtatcggtcgcgatgagtacaatccggataaactgcgctaccacagcatcatcatcatgaccgatgcggacgtcgacggctcgcacattcgtaccctgctgttgaccttcttctatcgtcagatgccggagatcgttgagcgcggccacgtctacattgcccagccgccgctgtacaaagtgaagaaaggcaagcaggaacagtacattaaagacgacgaagcgatggatcagtatcagatctccatcgcgctcgacggtgcgaccctgcacaccaacgccaatgcgccggcgctggcgggcgaaccgctggaaaaactggttgccgagttcaatgccacccagaaaatgattggccgcatggagcgccgcttcccgaaagcgctgctgaaagagcttatctatcagccgaccctgaccgaggccgacctggcggacgagcagaaggtgacccgctgggtgaacaccctggtctccgagctgaacgagaaagaacagcacggcagccagtggaaattcgatctccacgagaacaaagaactgcagcattttgagccggttattcgcgtacgtacccacggcgtggataccgactatccgctggataacgagttcattatggggccggaatatcgtcgtatctgtgccctgggcgagaaactgcgcggcctgatggaagaagatgcttacatcgagcgcggcgaacgtcgtcagccggtagccagcttcgagcaggccctggactggctggtgaaagagtcccgtcgcggtctctccatccagcgctataaaggtctgggcgagatgaacccggatcagctgtgggaaaccaccatggatccggacagccgtcgcatgctgcgcgtgaccgtcaaggatgccatcgctgccgatcagctgttcaccaccctgatgggtgatgccgttgagccgcgtcgcgcgtttatcgaagagaatgccctgaaagcggcgaatatcgatatttaa

SEQ ID NO: 135125 - DNA, 699 bp, Enterobacter cloacae
atgatgacgctggagctggccgacgggcgtattccggttatcgctggaacgggagccaatgcaaccgcagaagctatcagtctgacccaacgttttaatgacagcggcattgtcggctgcctgacggtcactccttattataaccgtccgacccaggaaggcctgttccagcactttaaagctatcgccgaacatactgacctgccgcaaattctgtataatgtgccgtcccgtaccggttgcgatatgctgccggaaaccgttggccgtctggcggaaattaaaaatattgtcggtattaaggaagcaacagggaacttaagtcgcgttcaccagatcaaagagctggtttcagacgactttattctgctgagcggtgacgatgcgaccggtatggacttcatgcagctcggcggcgtaggcgtgatttctgttacggccaacgtggcggcgcgcgaaatggccgacatgtgccgtctggcgctggcgggtcaatttgccgaagctcgtgcgattaaccagcgtctgatgccactgcatacaaaattatttgtcgaacccaatcctatcccggtgaaatggggatgcaaggcgttgggtcttgtggcgaccgatacgctgcgcttgccgatgacgcctatcaccgatcatggtcgtgaagccgtcactgccgcgctgaagcatgccggtttgctgtaa

SEQ ID NO: 135126 - DNA, 1035 bp, Enterobacter cloacae
atggcttactcagtacagaagtcgcgcctggcgaaggttgcgggtgtttcgctggttctactcctcgcggcctgtagttctgactcgcgctataagcgtcaggtgagcggtgatgaggcctatttacaggcatcaccgttgagcgaacttcacgcgccggcggggatgatcctgccgattcaggtgggtgattacaatattccggtggctaacagcaccggcgcggtcggtaaagcgctggacattcgtccgccggcgcagccgctggcgctggtgagcggtgcgcggacccagtttaacggcgataccgcgacgctgatggtcgagaacggccgcagcggttcgttgtgggcacaggtcaccagtattcttcagtcgaagaactacgttatcgccaagcgcgatgatgcgagccagacgctgaacaccgactgggttgagtggaaccgtcttgatgaagatcagcagtatcgcggtcgttatcaaatctccgtcaaaccgcagggttatcagcaagcggtggtcgttaagctggtgaatctggagcaggcgggtaaaccggttgctgatccggcgtctctgcagcgctacagcaccgctatgctgaacgtcatttcggaaggccttgacatgaatgccaccagcgcccagaacgccgcacagcgcagcgcgggggccaccttcgacgtgcagagcgccgccgacgataccggcctgccgatgctcgttgttcgcgcgccgtttaacctggtgtggcagcgtctgccgggcgccctcgagaaagtggggatgaaagtgaccgacagcacgcgctctcagggcagcatggcgctgacctataagccgctgtctgacagcagctggcaggagctgggcgcacgtgacccgcagctggtctccggcgactacaaactgcaggtcggcgacctcgataaccgcagtagcctgcagtttatcgacccgaaaggccacaccctgacgcagtcgcaaaatgacgccctggtagccgtattccaggccgcatttaacaagtaa

SEQ ID NO: 135127 - DNA, 714 bp, Enterobacter cloacae
atgaaaaagcaagctgagttgtatcgtggtaaggcgaagacagtatacagcaccgataatccggacctgctggtactggaattccgtaacgatacgtcagcaggtgatggcgcgcgcatcgagcagttcgatcgtaaaggcatggtgaacaacaaattcaaccatttcattatgagtaaactggcagaagcgggcatccctacccagatggaagcgctgctctccgataccgaatgtctggtgaaaaaactggatatggtgccggtagagtgcgtggtgcgtaaccgtgcggcaggctcgctggtaaaacgtttaggcattgaagaaggtatcgagctgaatccgccgctgttcgacctgttcctgaaaaacgatgctatgcacgatccgatggtcaacgactcctactgcgaaaccttcggctgggtgagtaaagagaatctggcgcggatgcgcgagctgacctacaaagccaacgacgtgctgaaaaaactgttcgatgacgccggtctgattctggtggactttaagctggagtttggtctgttcaaaggcgaagtggtgctgggcgacgagttttcgccggacggcagccgcctgtgggataaaaacaccctcgataaaatggacaaagaccgcttccgccagagccttggcggcctgatcgaagcctacgaagaagtggctcaccgcctgggcgttaagctcgactaa

SEQ ID NO: 135128 - DNA, 876 bp, Enterobacter cloacae
atgcgctggcaagggcgtcgcgaaagcgacaatgttgaagatcgacgtggacaatcaggctcgccgtttggcggcggcgggggcggcggcttccgtctgccgagcgggaagggcggcattgtattgctgattattgtgctggtggcgggctactacggcgtggatttgaccggcatgttgaccggcgaaccgatgccgcagcagcagacctccacgcagcgctccatcagtccgaaagacgatgaagcggcgaagtttacttccgtcattctggctaccaccgaagatacctgggggccgatctttgaaaagatgggccgccagtacccgcagccaaagctggtgctctaccgcggcgcgacccgtaccggctgcggcaccggtcagtcggtgatgggccccttctattgtcctgccgacagtacggtctatatcgacctgtcattctacgatgagatgaaaaataaactgggcgccgacggcgactttgcccaggggtacgtcattgctcatgaagtgggtcatcacgtacaaaaactgctgggcattgagccgaaggtccgccagcaacagcagcatgccacgcaggccgaagccaaccgcctgtcggttaagatggagctgcaggcagactgcttcgccggcgtctggggtcataatatgcagcagcaggatattctggaaactggcgatctgcaggaggcgctgaacgccgccgaggccatcggcgacgatcgtctacagcagcagagccagggacgcgtagtgccggatagttttacccacggcacctcgaagcagcgctacacctggttcaaacgcggtttcgatagcggcgatccggcgcagtgcaataccttcggcagcgcgctgtaa

SEQ ID NO: 135129 - DNA, 2004 bp, Enterobacter cloacae
atgatggacacgctgcttgacctcaccgcgcagatggcgcgggaggggatccgtcgcctgctggtgctcagcggcgatgagagctggacgctgcagcaggcgcaggcgctacgggagaggctcggcggcgatggcctgtgggttggccccgagccgggttctgcgccctgcgtggcgcccggcgcgctgaaaacgctgctggggcgggaagtgatgcacgcctttttcgatgcccggcgcgggtttgatgtggccgccatggcggccctgagcggcacgctgcgggcgggaagctggctggtgctgctgacgccccccttcgccgactggccgacccgggcggatgaggactctctgcgctggagcgatacgcctgaccctatcgttacccctaactttgttcaccgctgctgtcggcagtttatcgccgatccggaggtgttgctctggcggcagtcggaccggccacgtttcccgctggccgccccgcgtccagactggcatcccgccgatggccgcccgcaggccgagcaggcggcaatccttgagcaactgatacgcctgccgcccggtatcgcggcggtgacggcggagcgtggacgggggaagtccgcgctggcgggcatgcttctgcgccagcttgggggcgaggccatcgtcaccgccccaacgcgtagcgctgtcgtggtgctggccagctttgccggggagacgttgcgctttatggcgcccgatgcgctgctggcgtcgaaagaaaaggcggcgtggctgatagtcgatgaggccgcggctatcccggctccgcttctccggcagctggtgagccgttttccccgcacgctactcaccacgacggtgcaagggtacgagggcaccggtcgcgggttcctgctgaaattttgcgccagtctgccccatctgcaatcgttcaccctgagcgccccgatccgctgggcggcgggctgtccgctggagtcagccatcagtcagttgcttatctttaacgatgaggcatttcgcgacgcgccgatgggggagatagccctggaggcggtcaatcagtcctgctggcaaacgcagccagcgctaccggaggcgatgtaccagctattgtccggggcgcattaccgaacttccccgctcgatctgaggcgcatgatggatgctccgggccaggctttccgctgcgctcgcgccggcggcgcggtagcgggcgccctgtggctggtggccgaggggggactttctcgcgaactgagccgggcggtatgggcgggttttcgccggccgcgcgggaatctggtcgcccagtcgctggcggcgcacggcggcagtcccctggcggcgacgctgcgcgggctgcgggtcagtcggatcgctgtccatcccacccgccagcgggaaggacttgggcggaagatgatcgccgatatcgccgccgatgccgctggctatgactatctctccgtcagcttcggctataccgctgagctgtggcgcttctggcaacgctgcgggtttaccctcgtacggctgggtacccatcgcgaggccagcagcggctgctatacggcgatggccctctatccgttgaccgcggcagggcgccagctggcgcagcgggaggcgcagcggctgcagcgcgatgaatactggcttcgcccgtggcgagaggaatccgcgccgctgccggccgtcgcagacgctatgcttagtgatgaggactggctggaagcggcgagctttgccttcgcccaccgcccgctggccgcggcgctgggttgcctcaaccgcctactgatgcaggccgacatgccgttgccggccctgcggggacgactgcagggcaaagaggaggccgcactctgcgccgtgctgcagctgacggggcgtaaagccttgcaggcgagatggcgtcgggaggccgctgacgccttgcgcttccttgatgcagcgcgcgctgatgcgctgcgtcagcaggtggcgcatctgcaatttttttaa

SEQ ID NO: 135130 - DNA, 696 bp, Enterobacter cloacae
atgaaacacgatcattttattgttcaaagtcctgcgacgcctgcgcaacagctgttgctgctgtttcatggcgtaggggataacccggtctccatggggcaaatcggcagctggttcgcaccgcagtttcctgatgcgctgatcgtcagcattggcggggtggaaccttgcggtcccaacggtcggcagtggttttcgctgcagggggtgacggaagagaatcgtcagcagcgcatcgacgccattatgccgacctttattgaaattgtacgctactggcaggaaaagagcggcgtcagtccactggccaccgcgctgatcggtttctctcagggggcgattatgtcgctggagagtatcaaagcggcgccggatctggcttcgcgggtcatcgcctttaatggccgctatgcgacgctgccggagacggcaacgacggccaccaccattcacctgatccacggtggtgaagatcgggttatcgacctggcgtgggcggtgtcggccgaggaggcgttacagcaggcgggcggcgacgtgaccttagatattgtcgacgatctcgggcatgccattgacgatcgcagcatgcagttggcgatcgagcgtctgcgttataccgtgccgaagcactattttgatgaggcgctgagcggcagtacgccaaaaggggacgatatcatcgaaatgctgtaa

SEQ ID NO: 135131 - DNA, 204 bp, Enterobacter cloacae
atggaatggcttattaaacactggtggattctggtgctggtctttttggtgggggtaattatcaacgtgattaaagatctgaatcgcgttgaccacaaaaaattcctcaacaacaaacccgatctgccgccgcaccgtgattttaacgataaatgggacgacgacgacgactggccgaagcacgaccagtcgaagaaaccgtaa

SEQ ID NO: 135132 - DNA, 1143 bp, Enterobacter cloacae
  misc_feature (1100)..(1109): n is a, c, g, or t
atgtcttgcccggtcattgagctggctcagcagcttattcgccgcccttcccttagccccgatgatgcgggatgccaggcgttaatgattgaacgcctgcgtgcgatcggctttaccgttgaaccgatggatttcggcgatacgcagaatttctgggcctggcgcggccacggcgagacgctggccttcgccggccacaccgacgtagtcccggcaggcgacgccgaccgctggatcaatcccccgttcgaaccgaccatccgcgacgggatgctgtttggccgcggagcggcggatatgaaaggctcgctggcggcgatggtggttgccgcagagcgttttgtcgcgcagtacccgaaccacaggggccgactggcgtttttgatcacctctgatgaagaggccagcgccaaaaacggcaccgtcaaagtggtggagacgctgatggcgcgtaacgagcgtctggactattgtctggtcggcgaaccttccagtaccgaagtggtcggcgatgtggtgaaaaacggccgccgcggctcgctgacctgcaacctgactattcacggcgtgcaggggcatgtcgcctatccgcaccttgccgataaccctgtccaccgcgcggcgccgatgctggcggaactggtcaatatcgagtgggataaaggcaatgagttcttcccgccgaccagcatgcagatcgccaacgtgcagtccggcaccggcagcaataacgtgatccccggcgatatgttcgtccagttcaacttccgcttcagtacggagctgacggacgagatgatcaaatcccgggtgatcgccctgctggaaaaataccagctgcgttacagcgtggagtggtggctctccggccagccgttcctcaccggacggggcaagctggtggatgcggtcgtcaacgcgattgagcactataatgagatcaaaccgcagctgttaaccaacggcggcacctcagacggacggtttatcgcgcgcatgggggcgcaggtggttgagctgggccccgtaaacgcaacgattcacaaaattaatgaatgtgtgaacgccgccgacctgcagctgctggcgcggatgtatcnnnnnnnnnngtatcaacgcgtcatggaacagctggtcgcctga

SEQ ID NO: 135133 - DNA, 354 bp, Enterobacter cloacae
atgctcaccatgtacggaattaaaaactgcgataccattaaaaaagcccgccgctggctggaagcgcatcagattgagtatcgcttccatgattaccgcgccgatggccttgagcgtgcgcaactggatacctttattgccgagctgggctggcaggcgctgctgaacacccgtggcaccacctggcgcaaactcgacgagtcgctgcgcaatagcatcgataatgccgacgccgctgccgcattgatgctggaaatgccggcaattatcaaacgcccattgctctgcgcgcccggtcgtcctatgctgctgggttttagtgaagcaagttatcagcagtttaacgaggtatag

SEQ ID NO: 135134 - DNA, 3114 bp, Enterobacter cloacae
atggcgaatttctttatcgatcgccccatttttgcatgggtgctggcaatactgttatgcctgacgggcacccttgccattttgtcgctgccggttgaacagtatcccgacctcgccccgccgaatgtgcggatcaccgccaactatcccggcgcttccgcgcaaaccctggagaataccgtcactcaggttatcgaacagaatatgaccggcctcgataacctgatgtatatgtcctcccagagcagcgccaccggccaggcgacgatcaccctcagctttaccgccggtaccgacccggatgaagccgtgcagcaggttcagaaccagctacagtcggcgatgcgtaagctgccgcaggcggtgcaaaaccagggggtgacggtgcgcaagaccggtgataccaatatcctgacgctcgccttcgtctccactgacggcagtatggataaacaagatatcgccgactacgtcgccagtaacatccaggacccgctcagccgcgtcaacggcgtgggggatatcgacgcctacggttcgcaatactcaatgcgcatctggctcgacccggcgaagctcaacagctaccagatgaccaccaaggatgttaccgacgccatcagttcgcagaacgcccagattgccgtcggccagcttggcgggacgccttcggtcgataagcaagcgctgaacgccaccatcaactcgcaatctctgctgcaaaccccggagcagttccgcaatatcactctgcgcgtcaatcaggatggttcagaggtgacgctgggcgatgtcgccaccgtcgagatgggggcggagaagtacgactatcttagccgctacaaccgccagccggcctcaggcctcgggatcaagctggcttccggcgccaacgaaatggccaccgcggagcgcgtgatcaatcgcctcaatgagctggcgcagtttttcccccacggtctggaatataaggtcgcctacgagaccacctccttcgtgaaggcttccatcaccgacgtggtgaaaaccctgctggaggcgatcctgctggtcttcctcgtgatgtatctgttcctgcagaacttccgcgccaccctgatcccgaccatcgccgtgccggtggtgctgatgggcactttcgcggtgctgtatgcctgtggctacagcatcaacaccctgacgatgttcgcgatggtgttggcgatcggcctgctggtggatgacgccatcgtggtggtggagaacgtcgagcgcatcatgagcgaggagggcctgtcgccacgcgaggcgacccgcaaatcgatgggacaaattcagggcgcgctggtggggatcgcgatggtgctgtcggcggtatttgtgccgatggccttcttcggcggcaccaccggcgccatctatcgccagttctcaatcactatcgtcgcggcgatggtcctctcggtgctggtggccatgatcctcacccctgccctttgcgccacgctgcttaagccggttaagccaggtgaatcccatgaaagaaaaggcttcttcggctggttcaaccgcaccttcaaccgcagcgccagccgctacgaaaccttcgtcggcaaaatactgcaccgctcgctgcgctggatgctgatctacgtcgtcctgctcggcgggatggtgttcctgtttctgcatttgcccacctcgttcctgccgctggaggatcgcgggatgttcaccacctcggtccagttgccgagcggcagcacccagcagcagacgctgaaggtggtgcagaaggcggaagattacttcctcaataacgagaagcagaacgtcgagtcggtgttcgctaccgttggctccggccccggcggcaatgggcagaacgtggcccgtatgttcgttcgtctcaaagactgggaccagcgcgacccgcaaaccggcacctcctttgccattattgaacgcgccaccaaagcgtttaatcagattaacgaagcgcgggttatcgccagcagcccgccggcgatcagcggcctcggcagttcggcaggcttcgatatggagctggaggatcatgccggaaaggggcacgatgtgctgatggcggcgcgcgatacgctacttgagctggccgggaaaaatccgctgttgacccgcgtccggcataacgggctcgatgacagtccgcagctgcaggtcgatatcgatcagcgtaaagcgcaggcgctgggcgtctccattgacgacatcaacgatacgctgcaaaccgcgtgggggtcgagctacgtcaacgactttatggatcgcggccgggtaaagaaagtctacgtccaggcggcggcgaaataccggatgctgcctgacgatatcaatctttggtacgtgcgcaacagcagcggcacgatggtgccattctcggccttcgccacctcgcgctgggagaccggctcgccgcggctggagcgctacaatggctactcagcggtggagatcgtcggtgaggcggcgccgggtatcagtaccggtaccgcgatggacatgatggagaagctggccgcgcagttacccaccggctttggcctcgaatggaccgccatgtcctaccaggaacgcctctctggcgctcaggcgccggccctgtacgcgatttctctgctggtggtgttcctgtgcctggcggcgctgtacgagagctggtcggtgccgttctcggtgatgctggtggtgccgctgggggtgattggcgccctgctggcgacctggatgcgcgggctggagaatgacgtgtacttccaggtgggtctgttgacggtgatcggcctgtcggcgaaaaacgccattctgatcgtcgagttcgccaatgagctcaacgagaagggccaggatctgctcagcgccacgctgtcggcttgccgtcagcgcctgcgccccatcctgatgacctcgctggcgttcatcttcggcgtgctgccgatggcgaccagcaccggcgctggttccggcagccagcatgcggtcggcaccggagtgatgggcgggatgatctccgccaccgtgctggcgatctttttcgtgccgctgttctttgtgctggtgcgtcgccgttttccgctaaaggagcgtccgcaataa

SEQ ID NO: 135135 - DNA, 1722 bp, Enterobacter cloacae
  misc_feature (1699)..(1708): n is a, c, g, or t
atgaaccactttattttgagcgatagccgaaagtgcatcggctgccaggcctgcgaagtggcctgcgtgatggcgcataacgaggagcaacacgtgctgaccccgcagcgctttttgccacgtatcaccgtgatcaaagcggagggccagcgtaacgccatcacctgccgccactgcgaggacgccccctgcgtccgcagttgtcccaacgacgccatcgcccagtccggcgacagcgttcaggtccgtcaggagaaatgcattggctgtaaatcctgcatggtggcctgcccgttcggggtgatgcaggtggtggtgacgccgcaggccgcaggcctggtgaaagccagcgcgcacaagtgcgatctatgccagggccgcgaggcggggccggcctgtgtggaaaactgtcccgcgcaggcgctgaccctcgccgacgatgagacgttgatcaccctggcgaagcagcggcgactgcgctcggcatgccaggaggtacagccgtggcagcgcgctacgccgctctgcagccagcccaatgctggcgcgaaggtcaggcaaatggcgatgacgcccccgcgcggggagccggataagctggcggcggaggtgcgtaagagccactttgaggagatctatcagccgttcaccccgcagcaggcgcagcagcaggccgcccgctgtctcacgtgtggggagcacagtatttgcgaatggacctgcccgctgcataaccatatcccgcagtggatcgagctggttaaagcggggaatatcgccgccgcggtcgcgctttcccatcagaccaactgcctgccggagatcaccggccgcgtctgtccccaggaccggctgtgtgaaggcgcctgcaccctgcgcgatgaaagcggggcagtcaccatcggcaatattgagcgctatatttccgaccaggcgctggccagcggctggcgtccggacctttcgcaggttaagccgagcggcaagcgggtggcgattatcggcgccgggccggccgggctggcctgcgccgatatgctggtgcgccacggcgtccagccggtggtcttcgaccgtcatccggagattggcggtctgctgaccttcggcattccggcgttcaagctggataaatcgctattggcccggcggcgggcgatcttcagcgagatgggtatccgctttgagctcaattgcgaggtggggaaagatatctccatggcgacactactggccgattatgacgcagtgttcgtcggcgccggaacctatcgctccatgaaggcggggctgccgaacgaagaggcccccggggtctacgatgcgctgccgttcctcatcgccaacaccaaacaggtgatggggctggcggcatcggcgcaagagccttatgtcaacaccgccgggctgaacgtggtggtgctgggcggcggcgatacggcgatggactgcgtgcgcaccgcgctgcgccacggtgcccgccaggtgacctgcgcctatcggcgagatgaagccaacatgccgggctcgaaaaaagaggtcaaaaacgtccgcgaagagggggcgctctttgagtttaacgtccagccggtgacgcttgagctggacgagaacgggcgggttaacggggtacgctttttgcgcaccgagctgggcgctccggacgccgggggaagacgccgtccgacgccgatccccnnnnnnnnnngccaaaggccatga

SEQ ID NO: 135136 - DNA, 270 bp, Enterobacter cloacae
atgccggcagatgcggtgatcatggcctttggcttccacccgcaccgcatgccctggctggaagcggcgggggtggcgctggacagtcaggggcgtattaaagccggagtggagagccgttaccgttatcagaccagtcaggagaagatctttgccggcggcgatgccgtgcgcggcgcagaccttgtagtgacggcgatggcggaaggccgtcacgcggcgcaggggatcctggactatctggcgcggaaaacgacgccgcttcactga

SEQ ID NO: 135137 - DNA, 597 bp, Enterobacter cloacae
atgtcactcaatattcacgtcattaaagataaaatcctctctgagaactggttcgtactacgcaacatgacctatgagctgacgcgggcggacggcagcgtcgtgcgccacaagcgcgaggtctacgatcgcggcaatggcgccaccgtgctgctgtataaccgccataagcagacggtggtcctggtgcgtcagttccgtgtcgccacctgggtcaatggcaatcatgacggcatgctgattgaaacctgcgccgggctgctggacaacgacgagccggaagcctgcattcgtaaagaggcggtggaagagaccggctacgaagtgggcgaggtgagaaagctgtttgagctgtttatgtcgccagggggcgtcaccgaggtagtgcatttctttatcgccgagtacagcgacgcgcagcgaaccaccagcggcggcggggtggatgatgaagccatcgaggtgctggagctgccttttagccaggcgctgcagatggtcgctgacggggagatccgcgacggtaaggcggtcattctgctgcaatatctgcaaacctccggcctgatgtcggggaactctgacaaatccgattga

SEQ ID NO: 135138 - DNA, 1047 bp, Enterobacter cloacae
atgctttttcgcgtcatctttttcctttttctggcggtgctgccttgctcgcaggcatggtcggcaccgacgcagcagcgcttcaacgactggctggtcacctgtaacaaccaaaatttctgcatcacccgtaacgtggggctgcatcatggcctggtgatgaccctcagccgcagcgctggggcagtcactgacgccagtctgcgtatcgagctgggcggcaccggcaatccagtggcgacgctcgcgccgatagcgccgcgcctgctgctggatggtaaaccgctgtccctgaccgacaagcgctggcacattgaagataagctcattaaaaccgccgacagcgtgacgatcgatgcgtttctccagcaggttcaggagggtaaagcgctctcgctggccaatggcctgcagaccatctccctgcaggggttgaaagcggctctgttttttatcgacgatcggcaaaagcgggtaggtagcgaaacggcctgggtcggcaaaggggaagagccgccgctcagcgtaccgccggcgccggcgctgcgcgcggtggcgagcgcggaaacggcgcagtcgccgctggggcgtgaggagctcaacgatctgatggactacggtaatgagcggatgaccaacagccactgttccctcgatcccttccgccgtgaaattcgcgttactgcgctgacggatgacaaagtgctgctgatgaccagctgcgaatccggcgcctacaacaccgtctggctggcctggctggtctcccgccagcgcccctatgtcgcccgtcaggtgcggctaacgttgccatttcagccgccgggcgaggcgccgcgtgagattgagctgatcaacgccagctatgatgaccgccgccatgagctggtgaccctggacaaaggccgcggggccggcgattgcgggatccaaacccgctggcgttttgacggccagcggttcagcctctcccgctacgcgcagcagccgacgtgcgacaactggcaggggccagatgcttggcccacgctgtggatcacccgttaa

SEQ ID NO: 135139 - DNA, 1995 bp, Enterobacter cloacae
atgtcccgaagagagcttgccaacgccatccgcgccctgagtatggacgccgtgcagaaagccaactccggccatcccggtgcgccgatggggatggctgatattgccgaagtgctgtggaacgattttctcaagcacaatccgcagaaccctgactgggtggaccgcgaccgtttcatcttgtccaacggccacgcgtcgatgctgctctacagcctgctgcacctgaccggctacgatctgccgctgtctgaactgaagcagttccgtcagctgcattctaaaacgcccggccacccggagcatggctatacccctggggtggaaaccaccaccggcccgctgggccaggggctggcgaacgccgttgggatggccatcgccgaacggacgctggcggcgcaatttaatcgccccggccatgagatcattgaccatcacacctgggtgttcatgggcgatggctgtttgatggaggggatctcccatgaggcctgttcgctggccggcacgctcggactgggcaagctgatcggtttttacgatcacaacggcatctccatcgacggcaaaaccgaaggctggttttccgatgatacggcggaacgcttccgcgcctatcactggcacgtcataggcgatatcgacggccacgatccgcaggctatcaaacaggcgataacggaagcgcaggcggtgaaagataaaccgtcactgattatctgccggaccatcatcggcttcggttcgcccaacaaagccggctcagaggagtctcacggggcggcgcttggcgaaaaagaggtagcgctggcccgccagcagcttggctggaaatatcctccgttcgagatcccgaaagagatctacgcgggctgggatgcgcgtccgcgcggggaaaaagcggagcacgcctggaacgagaaattcgccgcctaccagcagcagttcccggagctggccgctgagctgacccgacgtatgaatggcgccctgccggaagactttgccgcgatcgcccgcgactacgtggcgaaactgcaggccgagccggcgaaaatcgccagccgcaaggcttcgcaaaacgcgctgaacgcctacggcccgcacctcccggaactgctgggcggttctgcggatcttgcgccgagtaacctgaccatctggtctggatcgacatcgattaaagaagatcctgcgggcaattatatccactacggggtgcgcgagtttggcatgaccgcggtggccaacggcatcgccctgcacgggggcttcattccgtatacctcgaccttcctgatgtttgtggaatacgcccgcaacgccgcgcgcatggcggccctgatgaaggcccggcagatcatggtctatacccatgactcgatcggtcttggggaagacgggccgacgcaccaggcggtggaacagctggccagtctgcggctgacgcccaacttcagcacctggcgcccctgcgaccaggtggagaccgccgtcgcctggcaagcggctatcgcgcgtcagggcgggccgacggcgctgatcctgtcgcgacaaaacctggcgcagatgccgcgtaccccggaacaggtgcaggatatcgcccggggtggctacgtgcttaaggatgccggcggcaagcccgacctgatcctcatcgccaccggctcggaagtggagatcaccgtcctggccgcggaaaaactgttggccaaaggggtaaatgtgcgggtcgtctcgctcccttccactgatgtgtttgacgcccaggatgaggcctggcgcgaatcggtgctgccgtcggacgtcagcgcccgggtggcggtcgaagccgggatagcggactactggtataaatatgtcggcttaaaaggcaagatcgtcggcatgaccagctatggcgaatccgccccggcagagcagttgttcccgttctttggctttacggtcgaccatatcgtcgccaccgccgaacaggtgcttaacgggtga

SEQ ID NO: 135140 - DNA, 957 bp, Enterobacter cloacae
atgaatcagttagacagcatcaagcagttcaccacggtggtcgccgacagcggagacatcgaatccatccgccactaccatccggaagacgccaccaccaacccctctctgctgctgaaggccgccggcctggcgtcctatagcggcctcatcgacgacgctatcgcctgggccaaaaaacagggtggcggccgcgaagcgcaggtggctcacgcctgcgataagctggcggtcaattttggcgcggagatcctcaaaagcattccgggacgggtctccaccgaggtggacgcccggctctccttcaaccgcgagaaaagtatcgagaaggctcgccacctggtggcgctgtatcaggagatgggcattgataagtcgcggatcctgatcaagctggcatccacctgggaggggatccgcgccgcggaggtgctggagaaagaggggatccactgcaacctgacgctgctgttttccttcgcccaagcccgggcctgcgccgaggccggggtttatctcatctccccgttcgttgggcgtatttatgactggtatcaggcgcgcaaaccgctggagccttacgtggtggaggaagatccgggggtgaaatcggtgcgcaatatctatgactatttcaaacagcataaatacaacaccatcgtgatgggcgccagcttccgccgcaccgagcagatcctggcgctggtcggttgcgaccggttgaccatcgccccgcctttattaaaagagctgcaggccagcgataccccggtggtgcgcaaattgatccctgccagccagatcctgccgcgtccggtgccgctcagtgaagcggagttccgctgggaacataatcaggatccgatggcggtcgaaaagctagcggaggggatccgcctgttcgccgtcgatcagcgcaaactggaagatctgcttgccgccaaactgtcactttag

SEQ ID NO: 135141 - DNA, 2280 bp, Enterobacter cloacae
atggatgagcagttaaaacagagcgccctcgacttccacgaatttccggttcccggaaaaatccaggtctcgccgaccaaacctctcgccacccagcgcgatctggcgctggcctactcgccgggcgtcgcagccccctgcctggaaatcgaaaaagatccgctggccgcctacaaatacactgcccgtggcaacctggtggcggtcgtctccaacggcaccgcggtgctggggctcggcaacatcggcgcgctggccggtaagccggtaatggagggcaaaggcgtcctgtttaagaaatttgccggtatcgatgtgtttgatatcgaagtcgatgagctggatccggacaaattcattaacgtcgtcgccgccctcgaaccaaccttcggcggtatcaacctggaagatattaaagcgccggagtgtttctacatcgagcagcagctgcgcgagcggatgaatatcccggtcttccatgacgatcagcacggcacggcgatcatcagcaccgcggcgatcctcaacggtctgcgcgtcgtcgagaagaatctgtccgacgtgcggatggtggtctccggcgcgggcgcggcggcgatcgcctgtatgaatctgctggtggcgctggggatgcaaaagcacaacatcgtggtctgcgattcgaaaggcgttatctataaagaccgtgagccgaacatggcggaaaccaaagccgcctatgcggtggaagacgatggcaaacgcaccctcgatgacgtgatcgacggcgccgacattttcctcggctgctctggcccgaaagtgctgactcaggagatggtgaagaagatggcgcgggcgccgctgatcctcgccctggccaacccggagccggaaattctgccgccgctggcgaagcaggtccgcgatgacgccatcatctgtaccggccgctccgactaccctaaccaggtcaacaacgtactttgcttcccgttcatcttccgcggcgcgctggacgttggcgcgacggcgatcaacgaagagatgaagctggcggcggtgcatgcaattgccgagctggcccatgccgagcagagcgaagtggtggcctccgcctacggcgatcaggatttaagctttggtccggactacatcattccgaaaccattcgacccgcggctgatcgtcaaaatcgcccccgcggtggcgaaggcggcgatggattccggtgtggcgacgcgcccgatcgccgattttgacgcctatatcgagaagctgagcgagttcgtctataaaaccaacttgtttatgaagcctatcttctctcaggcgcgcaaagagccgaagcgcgtggtgctggcggaaggggaggagactcgggtgctgcacgccacccaggagctggtgtctctgggactggccaaaccgattctggtggggcgcccgagcgtgattgaaatgcgcatccagaagctgggcctgcagatcaaggccggcgttgactttgagatcgtcaataatgaatccgacccgcggtttaaagagtactggagcgagtactaccagctgatgaagcgccgcggcattacccaggagcaggcgcagcgggcggtgattagcaacaccacggtgattggcgccatcatggtgcatcgcggtgaagcggatgcgatgatctgcgggactattggcgagtaccacgatcactaccgcgtggtgcagccgctgtttggctatcgcgacggcgtcagcaccgccggggcgatgaatgcgctgctgctgccgagcggcaacacctttatcgccgatacctatgtcaatcacgatccgtcgccggaagagctggcggagatcaccctgatggcggcggaaagcgtgcgacgctttggtattgaaccgcgcgtggcgttgctgtcgcactccaactttggctctgccgactgtccgtcagccagtaaaatgcgtaaaaccctggagctggtgaaggcccgcgccccggagctgatgatcgatggcgaaatgcatggcgacgccgcgctggtggaaagcatccgcaacgatcgcatgccggacagcccgctgaagggggcggccaatattctggtgatgccgaatatggaagccgcccggatcagctataacctgctgcgcgtctccagttcggaaggggtgaccgtcgggccagtgctgatgggggtggcgaagccggtgcatattctgacgccgatcgcctccgtacgccggatcgttaatatggtggcgctggcggttgttgaagcgcaaaccgaaccgctgtaa

SEQ ID NO: 135142 - DNA, 336 bp, Enterobacter cloacae
atggataaagaacgcattattcaggaattcgtaccaggcaaacaggtcacgctggcgcatctgattgcccacccgggagcggagctggcaaaaaagatcggcgtacccgaatccggcgcgatcggcattatgacgctgacgccgggagaaacggcgatgatcgccggcgatctggcgatgaaggccgccgacgtgcacatcggttttctcgaccggtttagcggagcgctggtgatctacggctcggtcggcgcggtggaagaggcgcttctgcagaccatcggcggattaggccgcttattaaattataccttgtgcgaattaacgaaaagttaa

SEQ ID NO: 135143 - DNA, 480 bp, Enterobacter cloacae
atgaagcgtattgcgattgtcggcgccgtcggtgcaggaaaaaccacgttatttaatgccctgcaggggaattattccctcgccagaaaaacgcaggcgctggaatttaacgatcgtggcgacatcgatacacccggggaatatttcagccatccgcgctggtatcacgccttaattaccaccttgcaggatgtggacaccctgatttatgtccatgcggccaatgataccgaaagtcgcctgccacccgggttgctggatattggcagccgaaagcaccttatcgtggcgatcagcaaaacggatctgccggatgccaatgtcgccgcggtgcggcagctgctggacgggatggggtttcaggcgccggttttcgccctcaacggttgcgatccgcaaagcgtcgcgccgctggaaaattacttgagtgagctcagccaaaaggaggaagggccaggtgaagaaactcattaccgctaa

SEQ ID NO: 135144 - DNA, 690 bp, Enterobacter cloacae
gtgaagaaactcattaccgctaacgatattcgtgccgcccacgcgcgcggcgaacaggcgatgtcagtagttctgcgcgccagcattatcaccccggaagcgcgcgaagtcgccgagctgctgggattcactatcaccgaagacgatggcgccgcgccggcggcgacagcggcggacagcgacaaaacggaaagccagcggatccgggaaaccatcctggcgcagctaccggaaggccagtttaccgaaagcctggtggcgcagctgatggaaaaggtgatgaaggagaagcagtccctggagcaggaggcgatgcagccgggatttgactccgtgaccggcaaaggcggcatcaaagtgatcgacggcagcagcgtgaagtttggccgcttcgacggcgcccagccgcactgcgttggcttaacggacctggtgactgaccaggatggcagcagcatggcggccggatttatgcagtgggagaacgccttcttcccgtggacgctgaactacgacgaaatcgatatggtgctggagggcgagctgcatgtgcgccatcagggggaaacgctggtcgccaaagcgggggacgtcatgtttatcccgaaaggctccagcatcgaattcggtaccccgtcgacggtgcgcttcctgtacgtcgcctggccggcaaactggcaatcgctatga

SEQ ID NO: 135145 - DNA, 783 bp, Enterobacter cloacae
  misc_feature (660)..(669): n is a, c, g, or t
atgaacgatttcattaccgaagcgtggctcagagcgaatcatacgctcagcgaaggcggtgaaatccatcttcctgccgatgcccgcctgacgccctcggcgagggaactgctggaaagtcggcatctgcgggtcaaatttctcgaccgccaggggcgcctgtttgtcgaggatgacgaacagacgccgcagccggtgcatgtcctgaccagcagcgaccatccgccccaggcctgctgcgagctttgtcaccagccggtgggcaaaaagccggacaccttaactcatctgacggccgataccctggtggcgaaaaacgatccgcggctggccttccgcgcggtgctggacagcaccatcgccctgacggtgtggctgcaaattgaactggcggagccctggcagccgtggctgacggatatccgttcgcggctgggcaacatcatgcgcgccgatgcgctggaggaaccgctggcggcgcagtcgatagccggattcagcgaggcgcagctgcatcgtctgtcccatcagccgctgcgttacctgggtcacgatcacctggtgccggaggcccgccatgggcgcgatgtcgcgctgcttaatttgctgcgcggcaaagtgcgcgaggcggaggtgaccgcggcgcaggtgtttattacnnnnnnnnnncgccgatattatgcaagcgctcaaccgtctctccagcgcggtctacgtgatgatgatcctgggcgtgacggacgcgccgccggcgctcagccaactgcagcagctgggaggtga

SEQ ID NO: 135146 - DNA, 1017 bp, Enterobacter cloacae
atgatcattgaccagtgtcgcaaactggcgctgcgcgcccccgccagggtggtgttcccggatgcgctggacgtccgcgtgttgaaggcggcgcattatctgcagcagcagggcctggcgcatccgatcctcgtcgccagccccttcgcgctgcggcagttcgcccttggcgaacgtctgccgctgaccggggtgcaggtcatcgatccgcacagcaacctggcgatgcgcgaggcgtttgccgccgcctggcaggcgcgcgccggcgataaagcgcccgctgacgcggtcgacaagctggccgacccgctgatgttcgccgcggcgatggtcagcgccgggcaggccgaggtgtgtatcgccggaaatctctcgtcaaccgccagcgtgctgcgcgctggtctgcgccttatcggcctgcagccgggatgtaaaacgctctcttcgctgtttctgatgctgccgcagtatgccggacagccgctggggtttgccgactgcagcgtggtgccgcagccgaccgcggcgcagctggcggatatcgcgattgccagcgccgagacctggcaagcgatcgctggcgaagcgccgcgggtggcaatgctgtccttctcgacacacggcagcgcccggcatccctgtgtggctaacgtccagcaggccacggagatcgtgcgtcagcgggcgccgcagctgatggtcgatggcgagctgcagtttgacgccgcctttgtaccggacgtcgctgcgcacaaagcgcccggcagcccgctgcagggccgggccaatgtgctggtcttcccgtcgctggaggcgggcaacatcggctacaaaatcgcccagcggctgggcggatatcgcgccatcgggccgctgatccagggcctggccgccccgcttcacgacctctcgcgaggctgtagcgtagaggaaattatcgaactggcgctggtggcgtcggtaccgcgccagacggacgcaagccggatccccgactcgtccacgctggttgaatga

SEQ ID NO: 135147 - DNA, 291 bp, Enterobacter cloacae
atggaagcattaggaatgattgaaacccggggcctggttgcactgattgaggcctccgacgccatggtcaaagcggcccgcgtcaagctggtgggagtgaaacagatcggcgggggcctggtgaccgccatggtgcgcggcgatgtcgcggcgtgcaaagccgcgacggatgccggggcggcggcggctcagcgtatcggtgagctggtctctgtacatgtcatcccgcgcccgcatggcgatctggaagaggtcttcccgattagcttcaagggcgacagcaacatctaa

SEQ ID NO: 135148 - DNA, 288 bp, Enterobacter cloacae
atgaagctggctgtggtaaccggatatgtggtctgcaccgtacgccatgaaggtctggcccacgacaaactgctgatggtggagatgctcaatgcccgcggcgagcccgacgggcaatgtgcggtcgccatcgacagcatcggcgcgggatgcggagagtgggtactgctggtcagcggcagctcggcgcgacaggcgcacgcacacggcgcctctccggtcgatctgtgcgtgattggtatcgtggatgaggctgcggccgatggtcaggtgctcttccataagtag

SEQ ID NO: 135149 - DNA, 1404 bp, Enterobacter cloacae
atgaatcaacaggacattgaacaggtagtgaaagcggtactgctgaaaatgaaagacagcagccagcctgccggcaccgttcatgatatgggcgtttttgcctcactggatgacgctgtcgcggcggcaacggtggcccagcagggattaaagcgggtggcgatgcgtcagcaggtgattcaggccattcgtgaggcgggtgaaaagtatgcccgtgaactggcggagcttgcggtgacggagaccggcatgggacgcgttgaagataagtttgccaaaaacgtggcgcaggcgcgcggcacgccgggcgtggagtgtctgactccgcaggtgctcaccggcgataatggcctgacgctgattgaaaatgcgccctggggcgtggtggcctcggtgacgccgtccaccaatccggcggcgacggtgatcaacaacgccattagcctgatagccgccggcaacagcgtggtcttcgccccccatccggcggcgaaaaaggtctcgcaaagggcaattaccctgcttaaccaggcggtagtggccgccggcggtccggccaacctgctggtgaccgtggcgaacccggatatcgacaccgcccagcggctgtttaagtaccctggcatcggcctgctggtggtgaccggcggcgaagcggtggtcgaggcggcgcgcaaacataccaacaaacgcctgatcgccgccggggctggcaacccgccggtggtggtggatgagactgccgatctaccgcgcgccgcgcaggcgatcgtcaaaggcgcctcgtttgataacaacattatctgcgccgacgagaaggtgctgatcgtggtcgatagcgtcgccgacgaactgatgcgcctgatggaaggccagcaggcggtgaaactcacggcggcgcaggccgaacagctccagccgctgctgctgaaaaatatcgacgagcgcggcaaaggcacggtcagccgcgactgggtcggccgcgatgcgggcaaaatcgccgcggcgattggcctgcaggtgccggcgcaaacccgtctgctgttcgtggaaacccccgccagccatccgtttgcggtgactgaactgatgatgccggtgctgccggtggtgcgggtggcgaacgtcgaggaggccatcgccctggcggtgcaactggaaggcggctgccaccatacggcggcgatgcactcgcgcaatatcgacaacatgaaccagatggcgaatgccatcgacaccagcatcttcgtcaaaaacgggccgtgcatcgccgggcttgggctgggcggtgagggctggaccaccatgaccatcaccaccccaaccggggaaggggtaaccagcgcgcggaccttcgttcgtctgcgccgctgcgtgctggtggatgcgtttcgaatcgtataa

SEQ ID NO: 135150 - DNA, 840 bp, Enterobacter cloacae
atggcgcacgacgaacaacgctggctttcgccgagactgcaaaaagccgctgccctgtgtaaccaggcgcccgccgccagcgagtcgccgctgtggctgggcatcgatttgggcacctgcgacgtggtgtcgatggtggtcgaccgcgatggccagccggttgcggtatgtcttgactgggccgatgtggtgcgcgacggcatcgtctgggatttctttggcgccgtcaccctcgtgcgccgacatcttgcgactctcgagcagcagctgggctgccgcttcacccatgcggcgacctcgtttccgcccggcaccgatccgcgcatttcgatcaatgtcctggagtccgccgggctggagatcagtcatgtgctggatgagcctaccgcggtggccgatctgctgcagctcgataacgccggggtggtggatatcggcggcggcaccaccgggatcgccatcgttaaacagggcagggtgacgtattcggcggatgaagccaccggcggccaccatatctccctgactctggccgggaatcgcggcatcgggcttgaggaggcggagcagtacaagcgcagccacgccggggagatctggccggtggttaagccggtgtacgagaagatggccgaaattgtcgcccgacatattgccggacaagggattgtcgatttgtggctggcaggcggcgcctgtatgcagccgggcgtgcatgagctgtttcgtcagcgcttcccggcattaccggtgcatttgccgcagcacagcctgtttatgaccccgctggcaatcgccaacagcgggagggaaaaagcggaggggatgtatgcaagctga

SEQ ID NO: 135151 - DNA, 1188 bp, Enterobacter cloacae
atgcaagctgaactgcagacggcgctgttccatgcctttgatacgctgaatcttcagcaaatgaaaagcttcaacgttccgccggtgacgctgcacggcgtcggcgcgctggcggcctgcggtccgcaagcgcagtcccggggccttaggcatctgtttgtcatggttgacagttttctccatcaggcgggaatgaccgccgggctggagcgtagcctggcgatgaaagggattgctatgactctctggccctgtcccgccggcgaaccctgcgtcaccgatgtctgcgccgccgtcgcccagctgcgggacgcgcgctgcgacggcgtggtggcctttggtggtggatcggtactggatgcggcgaaggcggtggcgctgctggtcgccaatcctgagcagacgctggggaagatgacggagcacagcgagttgcgcccacgtctgccgctgatcgcggtgccgaccacctctggcaccgggtctgaaaccaccaatgtgacggtgattatcgatgcggtgagtggacgcaaacaggtgctggcgcatgcctcgctgatgccggatgtggcgatcctcgacgccgcgctgaccgagggcgtcccgccgcatatcacggcaatgaccgggattgatgcgctgacccacgccgtcgaggcctacagcgcccgccacgccacgccgtttaccgacagtctggcgatgggggcgatagccatgatcggcgaggcgctgccgaaagcggtgggctgcggtcaggatctggcggcgcgggaaaacatgctgctggcttcctgcatggcggggatggcgttttccagcgccgggctggggctatgccatgccatggcgcatcagccgggggcggcgctgcatattccgcacggtctggccaacgccatgctgctgccaacggtgatggagtttaaccgcatggtgcgccgggcgcgcttcagccagatcggccgggcgttaaccggcaagaaaaccgatgaccgcgaggctatcgccgccgtgcgcgagctgatcgccgaggtcggtctgacgatgcggctgacggaggctggcgcgacgtccgcgcactacgacgcctgggcgcaagctgcgcaggaggacatctgtttgcgcaccaatccacgcaccgccagccgggagcagattatcgagctgtacgcggcggcgcgataa

SEQ ID NO: 135152 - DNA, 1239 bp, Enterobacter cloacae
atgggaattaacgaaatcatcatgtacatcatgatgttctttatgctgattgccgccgtggacaggatcctgtcgcagttcggcggctcggcacgcttcctcggcaggctggggaaaagcattgaagggtcgggcagccagtttgaagaagggtttatggcgatgggggcgctgggtctggcaatggtcgggatgaccgccctggcgccggtgctggcccatctgctcggcccggtgattattccgctgtatgagatgctcggcgccaacccgtcaatgttcgccggcacgctgttggcgtgcgacatgggcggtttcttcctcgctaaagaactcgcgggcggcgacgtggcggcctggatgtactcaggcctgatcctcggggccatgatgggcccgaccattgtgttctccattccggtggcgctcggcattattgaaccaaccgatcgccgctggctggcgctcggcgtgctggcgggcattgtcaccattcccatcggctgtatcgccggcggtctggtggcgatgtattccggggtggagatcaacggccagccggtagcgtttaccttcgcgctgatcctgatgaatatgatcccggtgatcatcgtcgccgtactggtggcgctggggctgaagtttattccggaaaaaatgatcaacggcttccagatcttcgccaaattcctcgtggcgctgatcaccatcggcctggcggcggcggtgatcaagtttctgctcggctgggagctgatcccgggactcgacccgatctttatggcgcctggcgaccagcccggcgaggtgatgcgcgccatcgaagtcattggctccatctcctgcgtgctgctcggcgcttacccgatggtgctcctgctgacccgctggtttgaaaagccgctaatgcgcatcgggaacctgctgaaaatcaacaatatggctgctggcggtatggtcgccaccctggcgaataacatcccgatgttcggcatgatgaagcagatggatacccgcggcaaagtgatcaactgcgctttctcggtgtcggcggcattcgcgctgggcgaccatctcggttttgcggcagccaacatgcacgccatgatcttcccgatgattgtcggcaagctggtcggcggcgttaccgcgattggcgtggcgatgctgctggtgccgaaagagaaaacgatcccggcggcagcgaaaagcgacgccgaagtggaggcacactcgtga

SEQ ID NO: 135153 - DNA, 1320 bp, Enterobacter cloacae
gtgaacacgcgccagctgctcagcgtcggtattgatatcggcaccaccaccacgcaggtgatcttctcgcgcctcgagctggtgaaccgcgccgcggtctcccaggtgccacgctatgaattcatcaaacgcgagatcagctggcaaagcccggtgtgctttacaccggtcgataagcagggcgacctgcaagaagctgaactgaaggcgctgatcctcgcccagtaccaggccgcgggtatcgccccggaagcggtggactccgcggcgatcatcatcaccggcgaaagcgcgaaaacccgtaatgcccgcccgggcgccggggcgcaaaccttgtcccagcagcggatgtgccgggtgctcaatatcgatatcggcggtggcacgtcgaactatgccctgtttgcatccggtaaagcgatcggcaccgcctgccttaacgtcggcggccggctgctggagaccgacgctcatgggcgcgtggtccacgcgcacccgccggggcagcggattgtcgatgcgctgtttggctccggcactaacgccctggcgctgaccgccgggcagctggcgcaggtggcgcgccggatggcggcgctgatcgtcgaggtgatcgacggcaccctctcaccgctggcgcaggggctgatgcaaaccgaagtactgcctgcgggtattcagccggaggtgattaccctttccggcggagtgggggagtgctaccgccatcagcccgccgatcctttctgtttttccgatatcgggccgctgctggccacggccctgcatgagcatccgcgcctgcgtgagatgaacgtgcagtttccgacgcaaaccgtgcgcgccacggtgattggcgccggggcgcatacgctgtccctgtccgggagcaccatctggctggagggggttccattgccgctgcgcaatctgccggtggctatcccgcaggatgccgccgatctgccgaacgcctggctccaggcgctgacgcagctcgatctggctcccgaggcggacgcttacgtgctggcgcttcccgcttcacttccggtgcgctacgccaccttactgaccgtaattgacgccctgctggcgtttgtcgcccgctttcccaatccccgtccgctgctgctggtggccgagcaggattttggcaaagcgctgggcatgctgctgcggccacagcttccacaccttccgctggcggtcatcgatgaggtgagcatccgggcgggagactatatcgacattggtacgcctctttttggcggatcggttgtgccggtgacggtgaaatcactcgcatttccttcctga

SEQ ID NO: 135154 - DNA, 1362 bp, Enterobacter cloacae
atgaaactaaagaccacattgttcggcaatgtttatcagtttaaggatgtaaaagaggtgctggcgaaagccaacgaactgcgttcgggggatgtgctggcgggggtagcggcggagagttcgcagcagcgcgtggccgccaagcaggtgctctccgatatgacggtggccgatatccgtaataacccagtgatcccgtatgaggaggactgcgttacgcgtctgatccaggatgacgtgaacgaaaccgcctatcagcggattaaacactggaccatcagcgacctgcgggaatacgtgctcaacgacgaggtcaccagcgacgatatcgcttttgtccgcaaagggctgacctccgaggtggtggctgcggtggccaaaatctgctccaacgccgatctgatctacggcggtaaaaaaatgccggtgatcaaaaaagccaataccaccatcggtctgccggggacctttagctgccgcctgcagccgaacgatacccgcgacgatgtgcagagtattgccgcgcaaatctatgaagggctctccttcggcgcgggcgacgcggtgattggcgtcaacccggtcactgacgacgtggagaacctgagccgggtgctggatacggtgtacggggtgatcgacaagtttaacatcccgacccagggctgcgtgctggcgcacgtcaccacccagattgaagccatccgccgcggcgcgccgggggggcttatcttccagagcatctgcggcagtgaaaaagggcttaaagagttcggcgtcgagctggcgatgctcgatgaagcgcgggcggtgggggcggagtttaaccgcatcgccggggagaactgtctttactttgaaaccgggcagggctcggcgctttccgcgggcgctaacttcggcgccgatcaggtgaccatggaagcgcgtaactatggcctggcgcggcactacgatccgttcctcgtcaacaccgtggtgggctttatcgggccggagtatctctataacgaccggcaaatcattcgcgccggactggaagaccactttatgggcaagctgagcggcatctcaatgggctgcgactgctgctataccaaccatgccgatgccgaccagaacctcaacgaaaacctgatgatcctgctggcgaccgcaggctgcaactacatcatgggcatgccgctcggcgacgacatcatgctcaactaccagaccaccgccttccacgataccgcgaccgtgcgccagctgctgggcctgcggccgtcgccggagtttgaacgctggctggaaacgatgggcattatggcaaatggtcgcctgaccaaacgggcgggcgatccgtcactgttcttctga

SEQ ID NO: 135155 - DNA, 900 bp, Enterobacter cloacae
atggatcaaaaacagattgaagacattgtacgcagcgtaatggcgtcaatgggacaaccacagtcgcagccgcaggcccccgcagcgtcgacgccggcctgccatgccgcctgcgccagcgaagcggtggtggaaagctgcgcgctggacctgggctcagcggaagcgaaagcctggattggggtacaacatccgcaccgcgccgaagtactgaccgaactaaaacgcagtaccgcggcgcgcgtttgcaccggccgcgccggcccgcgtccgcgcactcaggcgctgctgcgcttcctggccgatcactcgcgctcgaaagacacggtgctcaaagaggtgccggaagcgtgggtgaaagcgcaggggctgctggaagtgcgttccgagattagcgataagaacctctacctcacgcgtccggatatgggccgtcgcctcagtccggaagcgattgatgcgctgaaggcgcagtgcgtgatggatccggatgtgcaggtggtggtctccgatggcctgtcgacggatgccatcaccgccaactacgaagagatcctgccgccgctgcttgccggactgaaacaggcgggtctgaaggtcgggacgccgttcttcgtgcgctatggccgcgtcaagattgaagatcagatcggcgagatcctcggcgcgaaggtggtgatcctgctggttggcgagcgcccggggctcggccagtcggagagcctctcctgctacgcggtgtactccccgcgggtggcgaccaccgtcgaggccgaccggacctgtatctccaatatccaccagggcggcaccccgccggtagaagccgccgcggtgatcgtggatttagccaaacgcatgctggagcagaaaacctccggcatcaacatgagccgttaa

SEQ ID NO: 135156 - DNA, 660 bp, Enterobacter cloacae
atgccagcattagatttgattcgaccctcggttaccgcgatgcgcgtgattgcctcggtgaatgacggtttcgcgcgcgagcttaaattaccgtcgcatatacgtagcctcggactcatcacggcagattctgacgatgtgacgtatattgccgccgacgaagcgacaaagcaggcgatggtggaggtggtctatggccgctccctctacgccggcgcggcccatggtccgtcgcctaccgccggcgaagtactgatcatgcttggcggcccgaacccggcggaagttcgcgccgggctggatgccatgatggcgcatattgaaggtggggcggcattccagtgggctaacgacgcgcaagataccgcctttctggcgcacgtggtgtcgcgtaccggctcttatctttcatcggccgctggcatcgcgttgggcgatccgatcgcttatctggtggcgccgccgctggaggcgacgtttggtatcgatgcggcgatgaagtcggccgacgttcagctggtgacctacgtcccgccgccatcggaaaccaactattcggccgcctttttgacgggaagccaggccgcctgtaaagccgcctgcaatgcctttaccgatgccgttctcgatattgcccgtcatcctgtacagcgtgcgtaa

SEQ ID NO: 135157 - DNA, 486 bp, Enterobacter cloacae
atgatcaatgcgctgggattgctcgaagtggagggcatggttgcggctgtagacgctgcggatgccatgcttaaggcggccaatgtgcgcctgctcagtcatgaagtgctcgacccgggcaggttaacgctggtggtggagggcgacctggcggcctgccgcgccgcgctggatgccggggccgccgctgcccggcggaccggctgcgtgatcagccgtcgggaaattggtcgcccggaagaggatacccagcggctgatcggcggttttcagccaccgccgccagcgcccatgccgcctgctgacccggcttcatcggaagccttactgacgctgctggcttcagttcgtcagggcatgacggccggcgaggtcgccgcgcattttgcctggccgctggataaggcccgccaggcgctggagcagctcttttccgcagggacgctacgaaaacgcagtagccgctatcgtctcaaaaatccataa

SEQ ID NO: 135158 - DNA, 1053 bp, Enterobacter cloacae
atgaaaaagcgtcgttctgcaaatttgcaccatctctgttgcgaggcgttgccggaagacaccaggctgacgcctcaggttgaaattgacaatattcatcaacgacacacaaccgatgtgtatgagcacgccctgaccattaccgcctggcaacagatctacgatcagctgcatccggggcagtttcgcggcgagtttaccgaaatcctgctcgatgagatccaggtcttccgcgaatataccgggctggcgctgcgccagtcctgcctggtctggccgaactccttctggtttggcattccggcgacccggggtgaacaggggtttatcggctcgcagtgtctgggccgggcagaaatcgtcacccgtcccggcggtacggagttcgagctcagcacgccggatgattacaccattctcggggtagtgatttcgcaggaggtgattgcgcgtcacgccagtttcctgcaccacccggaacgggtgctacatatgctacgcaaccagtcagcgctggcggtccgcgagccgcataaggccgcgctgtgggggtttgtccagcaggcgctggccacctttagcgagcatccggatacccttcatcagccggccgtgcgtaaagtcctgcgggataatctgttgctggcgatgggcacgatgctggaagaagcgcagccgatggtaagtgcagagagcgtcagtcaccagagctaccgccgcctgctggcgcaggcgcgcgaatatgtgctggaaaacagcgcggagccgttaaccgttctcgatctgtgccagcagctgtacgtcagccgtcgcaccttgcaaaacgccttccatgcgatactggggattggtcctaacgcctggctcaaacggatccgcctgaacgccgtgcgtcgggagctgataagcccctggtcagagcgcgagacggtcaaggaggcggccatgcagtggggattctggcatttggggcagttcgccaccgactatcagcagctgtttgctgagaaaccgtcgatgacgctgcaccatcgcctgcgccagtgggtgtga

SEQ ID NO: 135159 - DNA, 900 bp, Enterobacter cloacae
atgaaacccgatgccgcgcaggtaaaaacttttctgctccagctccaggacaacctctgtcagcagctgagcgccgtggatggcgcgccgtttattgaagatgcctggcagcgggaaggcggtggcggcggacgcagccgggtgctgcgcgaaggccgggtgttcgagcaggcgggggtcaacttttcccacgtccatggcgacgccatgcctgcctccgccaccgcgcaccgcccggagctggccggacgcagttttgaagccatgggcgtctcgctggtggttcatccgctaaacccctacgtgcccaccagccatgccaacgtgcggttctttattgccgaaaagcctggcgccgacccggtgtggtggttcggcggcggctttgatttaaccccttactacggctttgaagaggatgccgtccactggcatcgtaccgcccgcgatctgtgtctgccgttcggcgaggaagtctatccgcgctataaaaaatggtgcgatgattacttctatctcaagcaccgccaggagcagcgcggcatcggcggtctgttctttgacgacctgaacaccccggattttgaccactgcttcgcctttatgcaggcggtcgggaacggctatgctgacgcctatttacctatcgtcgaacgccggaaagccacgccgtacggcgaacgcgagcgccactttcaactctaccgtcgcggccgctatgtcgagttcaatctggtctgggaccgcggcaccctgttcggcctgcagaccggcgggcgtacggagtcgattctgatgtcgatgccgccgctggtgcgctgggaatatgattatcagcccgagcccggcagccccgaggcggcgctgagcgagtttattcaggtgcgcgactggctgtaa

SEQ ID NO: 135160 - DNA, 873 bp, Enterobacter cloacae
atgagcacttttaaacccttaaaaatacttgcttcgcgccgtcaggtgctgaaagccgggctggctgcgatgacgctgagcggcgtcgcctcacaggtcagcgcaaaagaacagccactgaaaacgtcaaatggacatagcaaacccgccgccaaaaaggccgggggtcgccggattgtaatgttagatccgggccacggcggcatcgataccggcgctatcggccataacggctcgaaagagaagcatgtggtgttggcgatcgctaagaacgtgcgcagcattttgcgcagcaacggcatcgatgcccgcctgacccgcaccggggatacctttatcccgctgtacgaccgcgtggagatcgcccatcagcacggcgccgatctgtttatgtcaatccacgccgatggttttaccaacccgagcgccgccggcgcctcggtgttcgccctgtcaaaccgcggcgccagtagcgccatggcgaaatacctctccgatcgcgaaaaccgcgccgatgaggtcgccggtaagaaagcgacggataaagaccatctgctgcagcaggtactgttcgatctggtgcagaccgacaccatcaaaaacagcctgacgctgggctcgcatatcctgaaaaagatcaagccggtacataagctacacagccgcaataccgagcaggcggcgttcgtggtgctgaagtcaccatccataccgtctgtgctggtggaaacctcgtttatcaccaacccgaacgaagagaaactgctcggcaccaccgccttccggcagaaaatcgccaccgcgattgccaacggcattatcagctatttccactggttcgataaccagaaagcccattcgaagagacgttaa

SEQ ID NO: 135161 - DNA, 426 bp, Enterobacter cloacae
atggagattcgcgtttttcgccagcaggatttcgaagaggttgtgacgctgtgggagcgctgcgatctgctgcgcccgtggaacgatccggagatggatattgagcgcaagctgaatcacgacgtcagcctgtttctggtggcggaagtgaatggcgaagtggtcggcacggtgatgggcggatatgacggtcatcgcggatcggcctattatctcggcgtccatccggaatatcgcggccggggtatcgcgaacgcgctgctcaaccgtctggagaaaaagctgattgcccgcggctgcccgaaaatcaacattatggtccgtgaagacaacgacgtggtgcagggaatgtacgagcggttgggctatgagtacgccgatgtcctgaccctgggcaagcgcctgatcgaagatgaagaatactga

SEQ ID NO: 135162 - DNA, 450 bp, Enterobacter cloacae
atgaagaatactgagtttatccccgccgattttgatgcccatggccgtctgcgcctgcctttgcttttctggtgcgtgctgttgttgcaggcccgcacgtgggtgctgtttttgatggccggcgcatcgcgccagcagggcgacgcgattcttaatctgttctatcccgatcacgagcgcttctggcttggtttactgccaggcgtgccggcggtgctggcctttctgcttagcggctatcgtcagcgcctgccgcgcctgtggcgggcgatgcgctggctgctggtgctatcgcaagtgctgctgttgctgtggcagccgatgctatggctgagcggcgaatctccctcctcgttgaccattgcgctgctggtcgcggatggctatgccctgtggtggctgttaaccagccgtcgcctgggcgcctgttttcaccagaccaccttttaa

SEQ ID NO: 135163 - DNA, 576 bp, Enterobacter cloacae
atgaaatcgctacgtgtaatgctctgtgcacttccgctggcgctgaccggctgctccacgatgagcgcagtcaactggtcggcggcctatccgtggaactggtttggcgcttccaccgaggtgaccgagcagggagtgggtaaactgacggcttccacgccgctcaatgaacaggcgattagcgatgcgctgggcagcgactaccgtttacgcagcggaatgaagaccgataagggcaatatcgtccactactttgaagcgctgaaaaacaacagcgtggcgctgaccatcaatggcgacaacggtgctatcagccggattgacgtgcgtgatgcggatatcaaaaccgccagcggcgtgaaaatcggcacaccgtttagcgacctgtacagcaaagccttcggcaactgccagaaaggcagccatgacaacggggcggtcgtcgagtgtcaggccgaggggagccagcatatcagctatgccttcactggccactggagcggtccggacgagctgatgccctccgacgatacgctgaaaaactggaaggtcagcaagattatctggcgtcgctaa

SEQ ID NO: 135164 - DNA, 900 bp, Enterobacter cloacae
atgtctcaggttcagagcggcattttgccggaacattgccgcgcggcgatttggattgaagccaatctcaaaggggacgttaacgccctgcgcgaagcgagcaaaatttttgtcgataacgtggccaccttccaggctaaattccccgacgccaaactcggtgcggtggtggcgttcggcaataacgtctggcgtcagctgagcggcggcgaaggggcggatgagttaaaagatttcccggtctatggcaaagggctggcgccgtccacccagtatgacctgctgattcatattttatccgcccgtcatgaagttaacttctcggtggcgcaggccgcgctggccgcctttggcgacgctatcgacgtgaaagaagagatccacggcttccgctgggtggaagagcgtgacctcagcggcttcgtcgatggcaccgaaaacccggcgggggaagaaacccgccgcgaagtggcggtcattaaagacggcgtggatgcgggcggcagctacgtgttcgtccagcgctgggagcataatctcaaacagctgaaccgcatgagcgtgccggatcaggagatgatgatcggccgtactaaagacgctaacgaagagatcgatggcgatgaacgtccggtcacgtcgcacctgagccgcgtggacttaaaagaagatggcaaagggctgaaaatcgtccgtcagagcctgccgtacggcaccgccagcggcacccatggcctctatttctgcgcctactgcgcgcgcctgtataacatcgagcagcagctgctgagcatgtttggcgataccgacggtaaacgcgacgcgatgctgcgcttcaccaaaccggtgaccggcgggtattacttcgcgccgtcgctggagcgtatccaggcgctgtaa

SEQ ID NO: 135165 - DNA, 1017 bp, Enterobacter cloacae
atggccgttaaatcactgaaaaaaggatatctggcgctggcggcttccatgctgctggtggcgcaggcgcaggcgacggagctgctgaacagctcctatgatgtctcccgcgagctgtttgccgcccttaacccgccttttgagcagcagtgggcgaaagacaatggcggggacaagctgaccatcaagcagtcgcatgccggttcatccaagcaggcgctggctattttgcagggcctgaaggcggacgtggtcacctacaaccaggtgacggacgtgcagatcctgcatgacaaaggcaacctgatcccggccgactggcaaagccgtctgccgaacaacagctcaccgttctattcgacgatgggtttcctggtgcgtaaaggcaatccgaaaaacattcatgactggaacgacctggttcgctctgacgttaagctgatcttcccgaatccgaaaacctcgggtaacgcccgatacacctacctggcggcatggggcgcggcggataaagctgatggcggcgataaagctaaaaccgaacagtttatgactcagtttctcaagaacgtcgaagtctttgacaccggcgggcgcggagcgaccaccaccttcgccgagcgcggcctcggcgatgtgctgattagcttcgaatcggaagtgaacaatattcgcaagcagtatgaggcgcagggatttgaagtggttatcccgaaaaccaacattctggcggagttcccggtggcctgggtcgataaaaacgtcaaagccaatggcacggaaaaggcggcgaaagcctacctgaactggctctatacgccacaggcgcaaactatcattaccgactactactatcgggtaaacaacccgaaagtgatggatgctctgaaggataaattcccgcagaccgagctgttccgcgtggaagataagtttggctcctggcctgaggtgatgaaaacccacttcgccagcggcggcgaactggacaaactgctggcggcggggcgtaagtaa

SEQ ID NO: 135166 - DNA, 1131 bp, Enterobacter cloacae
atggctgcgcgtcggcgcggcgaagatattatcgatttcagtatgggtaatcccgatggcgcgacgccgccgcatatcgtggaaaaactctgcaccgttgctcaacggcctgacacccatggttactctacctcgcgggggatcccgcgcctgcgtcgcgccatttcacgctggtatgaagaacgctataacgtcgatatcgatccggaatcggaagcgatcgtcaccattggttcgaaagaggggctggcgcacctgatgctggcgacgctggatcatggcgacaccgtactggtgccgaaccccagctatccgattcatatctatggtgcggtaatcgccggggcgcaggtgcgctcagtgccgctggtggaaggggtggatttcttcaacgagctggaacgcgccatccgcgagagctatccgaagccgaagatgatgatccttggctttccctcaaatccgaccgcgcagtgcgtcgaactggatttctttgaaaaggttgtcgctctggcgaagcagtatgacattctggtcgtccacgatctggcctatgccgatatcgtgtatgacggctggaaagcgccctccatcatgcaggtgcccggcgcgcgagatgtcgccgtcgagttctttaccctgtcgaaaagctataacatggccggctggcgcattggctttatggtgggtaataagactttggtgaatgccctcgctcgtatcaaaagctatcatgactacgggacttttactccgctgcaggtggcggcgatagctgcgctggagggcgatcagcagtgcgtgcgcgatattgccgaacagtataagcgccgtcgcgatgtgctggtcaaagggcttcatgaggccggttggatggtggagtgtccgaaagcgtctatgtacgtgtgggcgaaaataccggaaccttacgccgccatggggtcgctggagtttgcgaaaaagctgcttaatgaagcgaaggtttgcgtctcgccggggattggctttggcgactatggtgatacccacgtccgcttcgccctgatcgagaaccgggaccgtacgcgccaggcgatccgcggtatcaaggcgatgttccgcgcggatggtctgctggcctccgcgagctag

SEQ ID NO: 135167 - DNA, 1197 bp, Enterobacter cloacae
atgacaccagcgctgcgacagaacctgacgctggcagtcctggtactgactgggatcaatatgcggccgctgcttacctccattggtcctttgctgccggacatccgcgcagccagcggcatgagctataccctggccgcactcctgaccgcgctgccggtgatcgcgatgggggtgctggcgctggccgctggctgggtcgatcgctatatcggtcaaaagcgcagtattgcgctgagcctgctgattatcgcggcaggcgccctgctgcgggaaatcgccccgaatagtggcttactgctcaccagcgctctggccggaggaattggcatcggcattattcaggccgccattccggcggtaattaagcacctctttccccgacggacgccgctggtgatgggactatggtcagcggcgctgatgggcggcggcgggttaggcgccgcgttcaccccatggctggcgtcacatagcgcggcctggcatgatgcgctagcctggtgggcgctccctgcgctcctggctctgttcagctggctggcgatttgtcggcaattgcctcgcgcaccgcatcaggccagcgcttccccccgggtcgcgattattggccagcgccgcgcctggacgctgggactctatttcggactgatcaatgccggttacgccagcctgatcgcctggctgcctccttactacatccagctaggcgacagcgcccagtacagcggttcgctgctggcgctgctgaccgtcgggcaaaccgccggcgcgctgctgctcccggcgctggctcgccaggaggatcggcgccagcttcttctgctagcgctggcgctacagctgattggcttctgcggctttatctggctgccagagcatttctctgcgctctgggccattgcctgcggcgtgggattgggcggcgcgtttcctctgtgcctggtgctggcgctggatcacgccggacaaccggcggtggccggcaggctggtagcctttatgcaggggatcggatttatcatcgccggtctgtcgccctggctttcaggcctgctgcgtagcctgagcgggaactacacgcttgactggtcctggcatgcgatctgcgtcctgctactcatggcgctgacgctgcgctttatcccggcacactacccggccgagtggcgacagcgcgcctcagacctgccctga

SEQ ID NO: 135168 - DNA, 438 bp, Enterobacter cloacae
atgtccgctcacgatcgttatcttcagcgcgcattagtgctggcaaaacaaaacattgctgacggtgggcgccccttcggcgccgtgctggtgcggaatgatgagattgtcgctgaaagcgtcaatacctttcatctgagcggtgacccaacggcgcatgccgaactgaacgccgttcgcgatcttgccgccagactgggaagcgcggtgttgcgtgaatgcgtcatctatgccagcggacaaccttgccctatgtgcctgagcgcgctctatttaaccggcgtgcgggaagtgtttttcgccaatagcaatcaggacggggagccttttcagctctcgaccgccgcgatttatcagcagctgcagcagccgatccatcatcgcccgcagccggagggaactgaactttatcagcgctgggcggaacggcagtcatga

SEQ ID NO: 135169 - DNA, 909 bp, Enterobacter cloacae
atgcttctgcgccaactttcctactttatcgctgtggctgaacattgtggcttttcccgcgccgccgcggcgctgcatgtctcccagcctgcgctgtcacagcagatacgccagctggaagcgatgctggaggttcagcttttcgaccgctctggccgacgtattcgcctgaccgatgctggagagatctggctggagtatgcccgtcgcgcgttacgcgagcttgaggaaggtcggcgcgccttgcatgacgcagaagatctccagcacggtaaactccgcattgctatgacgccaactttcactacctatatgctgggcccgctgatggaagcgtactaccgacgctaccctggagtaaaagtgcttatccaggagatgaaccaggagcggatggaggcgatgctgctggaggatgaactggatgtggggattgcctttgacgattgccggtcacaggaaattgtggttcagccgctgctgacggaaacgcttgcgctggtggtgagccgtgcgcatccgctggcaggagagcgcgacttgcaactgcaggctctcgacgcccagccgctaattttactgagcagcgagtttgctacccgcgagcagattgatcgttattgccgccttcatcggctcgaaccagacgtgcggatggaggccaactccatcggggccgttctgtcggttattcgaagcacaacgttagcaacgctgctgccggcggcgatcgccgggcagtttgatgatgtggtggcgattgagctaagacctgcgctgctgcagcgcacggcctgtttattgcagcggcagggcgcctggcagagcgccgcagcgcgcgaattcatcaccctggcccgagagaacgcgataacgattgagcaggaaaaccgccagtcccttgcctga

SEQ ID NO: 135170 - DNA, 882 bp, Enterobacter cloacae
atgaatattacagaacggaatatctggaagctaaataatttaccgccaatggagtattgctctctggcgcgggcgcaaaaattattaaactgcgaactggaagacattcttcactggcatgatataggcgcaatcaatctatgtcttaagcttaacccaacgccgggaatattaaaaatcgccgtcctctcccatcaggaaaaagaggtaaccagcgcgtttaatccatttacctcagtcgaggcaggagaaacagtctggtcgcatcactcccatatccgcagcattctgcgacttgaaggcgatattccgacgatggaaaccctgcgcggaaatacggtaacccagttcaacgtaaaggtatttgcttcagggctctggcatccacgctgtcggaacctaatggcgctgctggaggcgccagatgatattcttttcgaaaaccgcctcagcatgatgctgccggataaaccatttgtttattgtcatttcattccagaggaagacgaacgcccctcgatatcattgaaccgcatctatatcaccagccaggccattgagaaaatatacgcccacagtattagcgcccggcctatggacgtgacgaaaaatccgctactggatcaaacccgttacatccagcaggaattaaccgtcctgccgcaaagtgaggtattgctggaatttatccattatcttgttcagtcccatactgtatttaatgagaagttgcagagtatggctgagccagacaagactcagctctttcatcacgtgctggaaaggcttaaggaagaaggcatgcttatagagaatgcccagcccgatgaaggcgatatcggcagcgaagccagccgtgagtcgcagttcgccggcgagtaa

SEQ ID NO: 135171 - DNA, 483 bp, Enterobacter cloacae
atgaaacagatcaccctcagcgatatgcagcagcagagcgaagcggcagccagtgctccgcgcctgcgtgcccatcgcaattttcatcccgaactaagcgacccgatacagcgtctggccatcgccatggaacccggcacctatatccgcccccaccggcacaggcatactttcgaacttttgctgccgctgaaaggccgttttgtggtgctgaattttgatgaccacggcgtggtcaccaaccgggtggtgctgggtgaaacctgtacggcgctggaaatggaggctggcacctggcatacggtgctctcgctcgacgcaggcggcatggtatttgaagtcaaacaaggcgcttatcaaccgcttgccgaaatggacactatggcctgggcgcctgctgaaggccagccaggcactgccgaaatgatggcctggtatgccatcgcgcaaccgggtgaccgcttcctgtctatgccgcaataa

SEQ ID NO: 135172 - DNA, 483 bp, Enterobacter cloacae
atggataataatatacgaaaaatagtgcatgcttttcgaaacgcattagttattgctgctgacacccgttcatatcaatgttttcatatgcacagatggtcagaattgaataattttccatatggatgttgtgacttggcaagtaactttcttggaaaatatttagaagaaaatggttacgctccggaaattatatttgtgaattgtcctgatgaagtaagtaaatttattggtgcgcatgtatttataaggttaggtgactattatattgatatcacaagaaatcaatttaatgattttaatggaagggttttaattgagggtgaatatggaacgctagcaggtttaatgaaaagaataaaacgaatagatccatcagatgttattgagcgtaaagttgatatcagtgatgcacgcatgccagcatatgaattatacaactttattaaaaatattgcagacgtactaatgaaagagagttaa

SEQ ID NO: 135173 - DNA, 666 bp, Enterobacter cloacae
atgaccaataaccagttaacagacgcgcaaatttcaaacgcgacactcattcgtttaattcgatgggctgatgagcataaaagccactacgttgcagctgcgttgcgagagctacagggccgccgcaaggcagacagcgagccggtggcgttcaccgagaagcacgaaatatcgaacatgcatgcgacagggctttatcttcgtgcgtggcccgctgaccgggcgcggaatgctgtcgaaggttacacaatcccgctctatcgccacgcgcctccaacgccggaacgtgaccaagtacgccgagagcacgccgagtggtcacaggctaccttcggcaatgtcggtccggttggcccgctgaagcacctcagcaaagaagcactggaagcagctgccgagcctggcgacctgtcggagtgggctgatatgcagttcctgctgtgggacgcccagcgccgagccggtattacagatgagcagattacccaagcgatgatcgaaaagctggcggtaaacaagcagcgctcatggccggagccaaaagacggggaaccaaggctacacatcaaagaacgacctcgtaaaaaagtagaccgctgtgatgtttgtactgaaggggctcgtggcgggtgcgggacatgtatttttaacggtaattttgaatga

SEQ ID NO: 135174 - DNA, 255 bp, Enterobacter cloacae
atgactgatgccctgacgaaagaaaaaatcattgatgctatgcgcagttctactgagggcttcgccttcttaatcgtcgattcgttggagtttgaacttaagcgccagcttaccgacgctgaacagcaggaagtttccacagttgttgaacagttggttctaacgtttcctgaaccatgtccgcgctgtggcgtaacatctacccgcccgaatggtgagcattattgccatgctaacagcgtgagggctgaataa

SEQ ID NO: 135175 - DNA, 225 bp, Enterobacter cloacae
atgaatgtcaaatgcttaaaagataccgaaggatactggacggaaggtgaaatgtatccggcccgtgtagtggctggcgggtttgtccaagtcggcgacgatgacgatcccaatggcgaaggctggagcgctgcaccagtggaatatcgggacgatggatcgatcgtttatcaggtcggcggtattgagggtgaagtgttattcgaggaggccagccatgactga

SEQ ID NO: 135176 - DNA, 813 bp, Enterobacter cloacae
atgtctcaaattgaaggctctgccgtacacgacatccgcgatctggttgctgcaacgctgaaaactaataccgacatcccgtccgtcgtcgtcccggatggcttcgatatcaaatcgctcgaaagcctccagattgccccgtctcgtattcgccagaatacaaacctgatttcccccggttcgctaatcgcatatatccagcgattccgtgatgcgcgttctgttgttttcgccgacaagaccaaaacccggatcgtcgcggtgctggacttccaccaggacgccgataacccccactggggaatgcacaaagcagtttatgactgtcctttctctgatgactggaaagcatgggtggggtctgatggtaacaagatgaatcagatcgacttcgctgagtttctggaaaacaacatccagaacatcgcgccgattagcgataactataaaggcccgtccggtaccgatctcctggaaatggtactcgccttccaggagacaaggaaagttgagttcaagtcggttaagcgcctgcaggacggaacctgtcagttccagtacagcgatgataaatccggctcaggcaataccaaaatcccggaaaaaatcagcctggcaatcgcgcctttccataatggcgcaccgtaccagattgatgcgcgaattcgctaccgcctgcgcgacggtcagctggtcctctggtatgagctgatcgagccgaaaaaaatcattgagcatgccttccaggagatcgtagccgatatggaaaaccagctcggcgatgaactgcctatctacgaaggctccatctaa

SEQ ID NO: 135177 - DNA, 360 bp, Enterobacter cloacae
atgtccgaaaccaaaaatactacgccgtttagccagcagctggcgtacatcaacaaaggcactctcgatgccgagctgaccgaagcgctggcagaagtcatcaaggctgtacgtgaaacgggtaaaaagggagctgtgacccttacccttaactgttcaatgctgaatacccgtgacgaaaacaccatgaaggtcacgccaaaagttacccgctctatcccggaactggaccgcgccgataccatcatgttctctaccgctgatggcgatctgctgcgtgatgacccggcgcaagtccagatggatttgaaagttatcgaacaagcaccgcaagctgcgcctattaagctggctcagtaa

SEQ ID NO: 135178 - DNA, 258 bp, Enterobacter cloacae
atgacaaatatcgaattcagtgcctgcgcctacgaagccgctgttcagttcagtgtccagcaacgttttgcagcgatgatgacgcacactcataactggaatgtgaatcgccgcggcgcagacatgattgctttcattttggatcgtaaggctgactacaaagcggcttacccggacatgcttacctccgataacactatcgttaaccagcagcactttaccgatttcattatgtctggagtctggcgcctgcaataa

SEQ ID NO: 135179 - DNA, 711 bp, Enterobacter cloacae
atggaacctaaaaagaatctgacgacagaacagcttgcagatgcagcacgtcttaaagctctgtatgagtcaaagaagaaagcgctaggcgtcacccaatactcaatcgctgatgagttgggcattacgcaaggagctgtagggcactatctaaacgggagaaatgctcttaacctcaccgttgccgctgcatttgcaaagattctgcaagtatctattgctgatttcagcccttccattgatgaggaagcgcagaaaatagtggcaaatgagacatccaatgtgaagctggtcggtccatataagcaaggaaaggagtatccattgatcagctgggtgcaagctggagcctgggcagaggcaattgaaccttactcagtcgatgagatcgatgaatggttcgagtccgatacaaaggtttttggtaaagccttttggttgcgtgtcgagggcgactcgatgacagcgcctactggccttagcattcctgaagggaccctagtcttaatagatacaggccgggaagctataaatggcagtctcgttatcgcaaaaatggtggatgcgaacgaagcaacattcaaaaagctcataatagatggcggccaaaagtaccttaaagggctcaatccggcgtggccactgaaagaaatcaacggtaactgcaaaatcattggtgtggctgtgcaaaccatgatgcgcttggtttaa

SEQ ID NO: 135180 - DNA, 195 bp, Enterobacter cloacae
atgagtcgtatgacattagctgattacgccaagattcacggtcaggaaaaaactgccagcgactttggcgttatccaatgcgcaataagtaaggctattcgtagcggacgaaatatttatgtgaccattcaacaagatggaagcgttaagggcgaggaaattagacctttcccaagccataaaaaatcgtcttaa

SEQ ID NO: 135181 - DNA, 516 bp, Enterobacter cloacae
gtgggtaatcaacctgattggaaagtcgagaaacagccagcctggctggtggccgcaatcaaaaagacgatcgcggaattacctggcgggtatgcagaagcagccgaatggcttgatgtgactgagaactccttgttcaaccgtctgcgtactgatggcgatcaggtattcccgtttgggtgggcaatggttctccagcgcgctggtggttcacaccatatcgcgaatgctattgcgaaagcctctggaggagttttcgtaccgcttaccgatgttgaagatgtcgataacggggatatcaaccaaagactgatggagtcggttgagtggataggaaaacactctcaataccttcggaaggcaaccgctgacggcgtaatagatcgcgatgaacgcgctcaaattgaagcgaacagttaccaggtcatggctaagtggcaggagcatttagcgctgcttttcatggtcttttgctcccctgacgacattccaaatggaccttcaaattcagggtaa

SEQ ID NO: 135182 - DNA, 618 bp, Enterobacter cloacae
gtgaagaaaccagcgcctgcaaaggtgaaaacgtacaaaccgaagaagtgcgccagctgtggtgaaaccttcactccggcccgcaacctgcaaaaggtttgtggcccgctctgtgctatagcccacaacagggcgctgaaacaaaaaaaagcggaggcggaacagaaggacaagctgaagatgcgcaaaaaggctctgcttacccgtggcgactacatcaaaaaagcccagtcagcctttaatgcctttatccgtgaacgcgacgaggggaaaccatgcccatcatgtggcacttatcacccacctatgatctttggcggccagtgggattgcggtcatttcatgggggtaggcgctcgtcctgaattgcgctttgaagagaagaatgcttaccggcagtgcaaagcctgtaatggtggatcgggtcggttcgctgcaaagaatgccactgtacatgcccgctacagggagacgctgatcgagtggtatggattgccgctggtggaatggctggaaggcccacacgaagcgaagcattactcaaaagaagacctggaaaacatagcggctaaataccgccgtaaaactcgcgaactgaaaaagcagagggccgcatga

SEQ ID NO: 135183 - DNA, 366 bp, Enterobacter cloacae
  misc_feature (326)..(335): n is a, c, g, or t
atgcagcgtgatattcaactggtactcgaacggtggggaacctgggctattagtgaaggctcacaggttgactggtcaccaattgcagcgggttttaaaggcctcctgttaaatacctcaaagtctcgcgagtcatgttgtgacaatgatggccttattgtagacgctgccgtaggaatgcttaaacgagctggccgggatgatgagttaaatctggtgatgttgcattacatgcataacgtttctaaatcgactattgcccgctgggaaaaatgttcagagggaaaaatacgtaacaggttaatgatagccgaaacgtttattgnnnnnnnnnnttatgagtggtgccagattagaaatggatga

SEQ ID NO: 135184 - DNA, 387 bp, Enterobacter cloacae
atgtccgaaccaataaccggcacaggcttagctggtggcgctttaactggggcgagtgtttacgggctattaaccggtacagactacggtgttgtgttcggggcatttgctggttccgtcttttatatagcgacagcggccgatttgagcgccccacgacggatggcatatttcgttgtgtcctatatcgctggagttctgtgctccgggctggtcggttctaagttatccgaccttaccgggtacaacgataagcctctggatgcaattggtgccgtaatcatttcggcattggccgtaaaaatactcaccttcctgaacaatcaggatattggctcgctggtggcgctaataacgcgccggggaggttccggtggtactaaatga

SEQ ID NO: 135185 - DNA, 282 bp, Enterobacter cloacae
gtggtactaaatgatcctactgcaaccatcaatgcgctgttatgtgctggtgtcgttgttacgttgatgttctatcgccgcagagactcacgtcatcgtaagtgggtgtcgcggctggcatggctgataacagtgatatacagctctgtgccgttggcgtatctgtgcggcatctatccctattcatcatggcccaccattgcggccaatatcatgatccttgttgtgctgctgagcgtaagaggcaatgtagcgcggctggttgatgcactgaggcactaa

SEQ ID NO: 135186 - DNA, 630 bp, Enterobacter cloacae
atgaatcaaacacaattccagaaggcggctggtatcagcgccgggttagctgcgcgctggtatccgcatattacagccgcgatgaaagagttcggcatcactgctccactcgatcaggcaatgttcattgctcaatgcggccatgaaagcctcggttttaacagggtggtggagaatttcaactacagcatcgccgggcttgctgattttgttcgttacggcaggttaacgcaggatcaggccaattccctcgggcgtagccagtcggaaacagtgttacctctggagcgccagcgggctatcgccaacattgtctatagcaagcggttgggtaacaacagggcaactgatggatgggcttatcgtgggcgcggacttattcaaataaccggattgtctaattaccgggactgcggtaacgggctgaaggttgatctagtggcacagccagaattactggagcagtcctcgtacgcggctcgtagtgcagcgtggttctatgtctcaaaaggttgcttgaaatatccgggtgagcttgtccgggttactcagattatcaacggcggacaaaacgggattaataaccggcgcgctcgcttcctgaaagcaaaatcggtactggtggtgtga

SEQ ID NO: 135187 - DNA, 276 bp, Enterobacter cloacae
atgggaatcgaagcaatcgcggggctggtggttgtcatcctgggtgctatcgctggcgcgttcggcatcggccatgctcgcgggaccagtaaggcagaagccaaagccgatcagcagcgtaccgaagagaacgccgccgccaccgtcgccgcggcagaacgtaaggcggaagttgtgaaagaggcaagcgatgtacagcaaaccgttagtcatatgcctgatgacgatgttgatcgcgagctgcgcgaaaagtttacccgccccggtagtcgttga

SEQ ID NO: 135188 - DNA, 198 bp, Enterobacter cloacae
atgacgatgttgatcgcgagctgcgcgaaaagtttacccgccccggtagtcgttgatacggcctgcagctgggtgagggtcatctaccttaccgaccacgatatcgacgtgctggataagcagaccaagcgcgacattctggcgcacaacatatcggtgcaggctaactgcccgaaccttaaccccactaagggataa

SEQ ID NO: 135189 - DNA, 246 bp, Enterobacter cloacae
atgtcagagatcaccgcatccgagcaaatccgcctggatatcatcaagaaagttaactacgacaccgcagcggccaagctggccattgactgggttggtgatagcaatctgaaagctgagctattcgctgactcttttgatcgtgtcttcactgaaagtgagattgtctcgaagacccgtaaagcgattcaggaagcgaccgaagcactggcgctgtttgataccatcgcagagcaggcgagctaa

SEQ ID NO: 135190 - DNA, 351 bp, Enterobacter cloacae
atgccctcattaattcctcgagcctgccgtaagcgtggatgcgcatgcacaaccaccgaccgctcaggctattgcgagaaacaccgcaatgaaggctggcaacaacatcagcagggcaagagcaggcatgagcgcggctatggtagccagtgggatattaagcgtgcccgcatccttaagcgtgataatcacttgtgtcagaactgtctgcgcaacggtcgtgcggtagcagctaagaccgtggaccatatcaaggctaaggctcatgggggtaccgatgatgattcgaatcttgaaagcctgtgctggccctgccatcgaacgaaaaccggtcgcgaacgcatcaaatga

SEQ ID NO: 135191 - DNA, 498 bp, Enterobacter cloacae
atgccaggaccaccgaaaaccccgacacatctggctttagtgaaggggaacccatccaagcgcccgatcaataagaacgagccaaaacccccatcaggggtccccccaataccgaaacatttcgataaacagggtaagtactggttcaagcgtattggtgaggaacttgatgccgtcggcgtgttgaccacgcttgatgctaaagcgctggagttgttgatagaagcctatgttgaataccggcatcactgcgacactcttgatcgtgaaggttacacctatgccgtctacagcgaagatgattcagatgaaggaggggagcgggaaatcagaatgataaaaccgcaccctgcagcagtcatgaaggctgatgcgtggaaacggatcagagcgatgctgagcgaattcggcatgacacctgccagccgatcaaaggttggtgcaaaaggcccggcagaagccgacccactggaagaatttcttaaaaagcgcaaatga

SEQ ID NO: 135192 - DNA, 1752 bp, Enterobacter cloacae
atggcaaccgttgcagatggattccgctacgccgagcgcgtggtatctggcgatatcgttgctggcgaactggtgcgtcttgcgtgccagcggttctttcatgatttagagcacggcccggagcgcggtgtttattttgatgaaggccgcgctcagcacgttctcgatttttataacttcgtcccccatgtgaaggggcacttgaccggcaagccgatcgagttgatggactggcacacgttcattctgattaacctttttggctttgtcgtcccgctgatagatgaaataacgttcgaaagcattcttgacgacgatggcgaacccatgtttgtacggcgatttcgtactgcttatgacgaagtagcccgtaagaatgcaaaatcaaccctttcatctggaatcggcctttatatggctggcgctgatggggagggaggcgctgaggtttattccgctgcaacaacccgggatcaggcccgcattgtatttgatgatgccaaacgcatgattaagctggcaccgaaaactctggggcggttatttggcagtaataagctgaatattcaccaggagcggacgggctctaagtttgaacctgtagccagtgatgcgaacaacctcgacggcctgaatattcactgcggaattgttgatgagctccatgcacataaaacccgagatgtctgggaagttctcgaaacagctactggtgcacgtctgcagtcccttattttcgcaatcacaactgctgggtttaataaagaaggtatctgttatgaacaacgtgaatatgcgattaaaattctgaagaatttcgataaccccgaccctctttcaattaaggatgacagctattttgcgctgatttataccctggatgagggggatgatcctttcgacgaggcaaactggccgaaagcaaatcccggcttgggaatatgtaagcgttgggacgatatgcgccgcctggcaaaaaaggcgaaagagcaggtagcggcgcgtgtcggtttttttaccaagcatctcaatatctgggtgcagggtgaaaaagcatggatggatatggcgcgctgggaaaaatgccgtgacgactgggacgactccacatcggccaactggtcaatgtggctcggcgttgacctttccaacaaaattgatatttcagctgcagttaaagtctggcttgctccaaatggcgatgtttatgtccgctccagattctggatacctgaaggtcggctggaagcctgttccaagcagcaggcggacctttacagaaaatggaatctcgctggattccttgagtttaccgatggcgatgtcgttgaccatgcagtaattaaagaggaaacgatcgaatgggcgcgaggtgactcgctgaacgagtttgcatacgacccgtggagtgccactcagtttgctttatcggtagcagctgaaggcgtaccgattgttgaagtccctcagaccgttaaaaacctgtctgaagcaatgaaggaagtcgaggcgaaaatttacgccgggcgttttcatcacgatggcaatccggtgatgacatggatgatgtcaaacgtcactgtcaaaccagacaaaaacgagaatattttccccaacaaggccacgcctgaaaacaaaattgacggtcctgtcgcgatgtttattgcgatgagtcgcttacttgttaacggtggtggtgaagttgacttcctgtccactatcgatcctgacgaagaccttttacttctatga

SEQ ID NO: 135193 - DNA, 162 bp, Enterobacter cloacae
atgaaaactctaatcactgatgttatcgggcttaccgggttcggttcgcttgctgcaggcgtgtatctccagttcggtctggcgatgtctctgatgatgtcgggaaccctgctactcatttatgcgctgttagcggcaatgagggggaataatgctgcttga

SEQ ID NO: 135194 - DNA, 600 bp, Enterobacter cloacae
atgaatgaccgtgaaacgcgctgttacagcggggaggtcagagccgagcaacgcaccgatgaacctacccgcattctgggctatggctcggtgttcaacagccgttctgaacccctgtggggattccgtgaaatcatcaagcccggagcatttgacgatgtgctgaatgatgatgttcgcgggctgtttaaccatgaccccaactttattctcggacggagcgctgccgggacgctatccctgtctgtcgatgagcgcggcctgcgttatgacattacagcgccggatacgcaaactatccgcgatctggtgctggcgccgatgatgcgcggtgacattaaccagtcatcttttgccttccgggtatcccatgacggtgaaaattggtaccaggacgatgaagggatcgttattcgtgaaatatcgaagttttcccggctgtttgatgtcagtccggtgacttatcccgcatatcaggaggccgactccggcgtccgatcgatgaaagcctggcaggaggcgcgcgacagcggtgcgctaaagaacgccattaatcaacgaatggcgcgtgagcgcctgctgacccttcttaacgcgtaa

SEQ ID NO: 135195 - DNA, 1239 bp, Enterobacter cloacae
atgaaactgcatgaaatgaagcaaaaacgtaacatcatcgccaaagatatgcgcgccctgcatgacaaaattggtgatacaccctggaccgatgagcagcgtactcagtggaacgctgcaaaatcggagcttgacgcccttgatgagcgaattgcacgcgaagaggaactgcgccgccaggatcaggattatatccacgaaaacgagccggaacagcgccagcagcagaatcgtgatccagcaaacccggaagcacaggctaacgaacgccgtgctgcggcgtttaatgcgtttttgcgccgtggtcttggcgagatgagcgctgaagaacgccaggctttaaaggagctgcgtgctcagggcacgacgccggatgaaaaagggggttacaccgtaccaacccagttccgcaataagatcgtcgaagcactgaaagattacggtggaattgccagtgtggcgcaaattctgaataccgccaacggccaggacattgactgggcaacctctgacggtaccactgaagaaggtgaactgctgggcgaaaacactgaaaccagtgaagaagacgtgtctttcggcggtgcaacgctgggggctaaaaaactgtcctctaaaatcattcgcgtatccaatgaactgctccaggacagcggcgtagatattgaggcgttcctggccgcgcgtatcgccactcgcatcggacgtggtgaagcgaagtatctggtattagggaccggcgccggcaccccgctgcagcctaaagggctggctgcgtcggtaactggcaccaaaaataccgcagcagcgaccacctttacctggaaagagctgaacgccctgaagcactcggtcgacccggcataccgtaacggtccaaaggtgcgctgggcctttaacgatgcaacgttgcagctggtggaggaaatggaggacggacagggccgcccgctctggttaccgaacattatcggtggcgcacctgctacagttctgcaggtgccgtatgttgttgaccaggctattcctgatatcgcggctggtgccaaatttgcctacttcggcgattttaatcgctttatcgttcgtcgcgtcacttacatgacgctgaaacggctggttgagcgttacgcagagtacgatcagactggcttcctggccttccaccgcttcgactgtgtactggaagataccggcgcaattaaggcgctggtgggtaaaccggcatctggcggctaa

SEQ ID NO: 135196 - DNA, 318 bp, Enterobacter cloacae
atgagcacaacgattgagatgttgcgggcgcagtgtcggatcgatatcgacgacaccacggaagatgaggtgcttacgctctattatggtgccgcgtgcagaaaggcggagaacttcatcaaccgccatctttatgaagaagaagtgccggaaactgatcctgacgggctggtgattgctgacgacatcctcctggcgctgatgctgcttgtcgggcactggtatgaaaacagagaagagtcgtcagacgcagcaaaaaccagcatcccatttggctttacatcgctgatagagccgtaccgctatattccgctctag

SEQ ID NO: 135197 - DNA, 339 bp, Enterobacter cloacae
atgcaggcaggacgattacggcatcgcgtcactattcagaacttcacaatatcaaaaacaccttccggccagccggtagaaagctgggctgatggaaaaactatctgggccgaggttaaagggatcagcggtagggagctgttagccgctggcgttgagcgtgctgatgccaccattcgcgtctgggtgcgttttcgtacagacatctcagcttcttcccgtttaaaagtactgaatggcccatacaaagatgcggtcctgaatgtcactgggcctccggttccggatatcaaaggtacccggctggaaattctctgcaaacagggggccgaaaaatga

SEQ ID NO: 135198 - DNA, 450 bp, Enterobacter cloacae
atgattgatgtgaatctggatttttccgggctgcaggatattgcccgcgatctgcaaacgctcagcaaggccgaaaataataaagttctccgggagtcgacccgtgctggtgctgaattgctacgcgaggaggttattgatcgcgctccggagaaaaccggcaaactgaagaaaaacgttgttgtcgtcacccagaaaagccgccgtcgcggtgaaatctcatcgggggtgcatattcgtggcgttaacccgcgaacggggaacagcgacaacaccatgaaggccagcaacaagcggaatgcgttttactggcgcttcgtggagctgggaacatctactgcaccagcacatccgtttgttcgccctgcctttgatacccgcatggaagaagctacgcaggtggcgatgcagcggatgaatcaggctatcgatgaggtgttatcaaaatga

SEQ ID NO: 135199 - DNA, 348 bp, Enterobacter cloacae
atgacagaggatgatctctatgacctgctgtcgtcgctggcagacgggcgggtttatccgtatgtggtgccgctaggcagcgacggacttcctgcagtttccactccctatgtcattttctcgataccgactgatgttgccggggatgttttctgcggccaggcagagtcgacactgcgcattcaggttgatgtatgggctgaaacgaatgacgaagccagagcgttacgcctggacgccctggctcgcctgcaggttctttcacctgtcgaggtgacaaaaattcctggctacgacacgacaacccatcttcatcgggcaaccctcgaaataacggtcattgcctga

SEQ ID NO: 135200 - DNA, 705 bp, Enterobacter cloacae
atgtcagcactatttgaacgtgcccaaaaaacggtagtaatgattacctctgtgccggtcaccgcggcagagctggataccgcaacctggttaaacctgagttgcactatcaaacaggcaagctttaccgctggtcagaaaaacgatattgacgtgacaacgctctgttcggatgaaacggaaaatatcaacggccttcctgctccgtctgaaatgtcactttccggtaacttctaccgcaacccggcgcaggatgcacttcgtgcagcatatgataacgacggggtttatgggtttaaggttattttcccgtctggtaatggattcctgatgcgcgctgaggtacgtcagcacacctgggattctcaaaccaatggcgtggttgctgcaacgttctcgctgcgtctgaaaggtaaacccaccaatattaacgccccaggagttctatcgtttgctactgaccttccggcgtcccaaacggtctcggcaggaagcgccctgaccatgggcgtggtcgtccagggcggtacggcaccttatacctacgcctggaaaaagggcacctcgacggtcagcggccagaccagcgcaacgtttacgaaagccagcgctgtatccggtgatgccggggtttattcctgcgtggttactgatgccgatggcactgtgatcacttcttctgattgcaccgtcaccatcaattaa

SEQ ID NO: 135201 - DNA, 366 bp, Enterobacter cloacae
atggcgggctttcgtaaaaaagaagtctccgttccggagtgggataacgccaaagtcatcattcgtgagccatcagcagaagcctggattcgctggcagggcattgccagcccggaaccacccaaactaccggaagggcaggagccccaggaggcaccagaactgaccccttcagaacgagccttccgcacgatgcgggccgacgtcacgcttttcatcgatattttgctggataccgacctgcagcccgtctttactgtcgatgacaccgaacaggttgaagcgatctatggccctgtgcattcccggctgttgaagcaggcacttgatctcattcgtgacgcggatgatgctaaagcaaagtaa

SEQ ID NO: 135202 - DNA, 306 bp, Enterobacter cloacae
atgcctggcatgcagttcctgatggcgctggcgctccggatgggccgcacgctgggcgaactgcgacaaaccatgacggttggcgaattcaggatgtgggctgagtacgaccgtatcagcccaatcggcgatattcgcggcgatatcctcaatgctcagctggtatctgcggtttacggagcgcagggcgttaaagtcaccattgaagatgctcagcttcagtggagcacagaagagattgaggtaaacgacggcggcgatccctttgcagggctggaagcggcgctgctggctgcgtcagcatag

SEQ ID NO: 135203 - DNA, 234 bp, Enterobacter cloacae
atgactactactggctggatattattatttgtttttgctcgccttattgatcttgttatctggtatttcctgaacagaggaagcgtaagagctaatgatcagatcgctatgcttaaagaaatctctgaaaagcaaagtgctcaaattgatcttctgattgcacttgctcataaaaaagaggaaccagaaaaagattatctggaagaagcaaggaaaaaagctggtttaatttaa

SEQ ID NO: 135204 - DNA, 3387 bp, Enterobacter cloacae
atggcaaccctgcgtgaacttatcattaaagtttctgctaactctcagtcattccagaccgagatagcccgcgcgtcacgtatgggggctgattattataagacaatgcagaatggcggcaggcaggctgcggcttcagttcgggaaactcgccgttctgttgctgagctaactgaccagatggagtcagcaaaggctaccgcactggggttaaccggggcatttgctggtgcttttgctacggggcatttaatagccctggctgatgaatggaattcagtaaacgcccgcctaaaacaggcatctcaatcaactgatgattttaccagctctcaaaaacagctgatggatatcagtcagaaaacgggtacatctttttctgacaacgctaatttattttcccgttcagcagcctcaatgcgggaatatggttacagctccagccaggtgctggatattactgaggctatttctactggtttaaaactttctggcgcgaatgctcaggagtccagttcggtcatcactcagtttagccaggctctggcacagggcgtgctgagaggcgaagaattcaatgccgtcaacgagagcggcgacagggttatacgggcgcttgcggcagggatgggggttgcgcgtaaagatcttaaatctatggcggatcaggggcagttaaccattgataaagtagtgcccgccctcatcagccagcttggtaagctacggaatgaatatggtgaattgccgcagactgtttcatcgtcggcaacaaaagttgaaaacgcttttatgcaatgggtcggtggagctaatgaagctagtggcgcgacaaataccctgaccggattacttgatggcgtagccaacaatattgatcaggtcgccactgctgccggagcgcttgttgccgttggtgcagcccgatatttgggaaatatggctcttggtgccagctctgcaacggctgggattattaacgccgcaaaaagcgaagtagctttagctgaagcccaggtcagagggacgcaggtttcgacagctcgcgcgcgtgctgcagtttatcgtgcccagcaggcactggcagcggctcggggtacagacgcgcaggccgccgcagaaaaacggctctcactggcgcaggagtcacttaaccgtaatattcaggccagagtatccgctcagactgcgctgaactcggttactgctgtaggttcccggctcatggggggagcattaagcctcgttggcggtattccagggctggttttgcttggtgccggtgcctggtacacgatgtaccagaatcaggagcaggccagattatccgctcaggaatatgcaaacaccattgatgcagtccgtgaaaagacaaaatcaatgtccctgcccgaagtttctgataatgagaccaaaacccgtcaggctttggaggagcaaaaccgtcttgttgatgcacaggcttcaaaagtaaaaagcctgaaggaagagatcgcgggctatcagtatgtcctgtctaaccccggaccaacaaccagtggcggtttcatgataaaccacctgacttcggtcgaagcggtcacccgtggtctggaagaagcgacttccgctcttgccgttgaacaggagaggttagctcagatgcaggctaagtctgagtcgatccagtcggtactggaggggatagagaacaggcgaatagcattaatccggcagcaggctgcagaacaaaattcagcttatcaatcgttattaatgatgaacggtgagcatacggaatttaaccgtttgctgggtctcggaaataatctcctcatggcccggcaggggctggtaaacgcaccagtacgcttaccacaggtagacctgacaacccagcaaacggctgcacttgaaaaaagccgccgtgacctggcgctttcaaaactcaaaggtgaggacaaagaacgcgcacgactgggttacgctgcggatgacctggggttaactaacgatcctcagtttcagaccggacggcaggagttgattaataacggcctgaatgaatggagaaacaaccaggaaaataaacccaagccaaaaggaaggcatgggaaaaccgaggcggagaaaaccgaagatacctatacccggctgattaaacagcaacgggagcaaattgctctttccagccaaaacactgaactggcaaagatgaaatatcaggttactcagggggaattatcttcgcttgaaaaatccaaaaaggaaacattgctgcacaatgctgcgcttattgatcagaaaaatatcgctgaacagttaaaaacattccgcgaaggtctggcagacagtaatgctgccgcccgggaaagggggaatatcgatttcctcggcgcgggacaaggggataaagcccgtgatcgaatgaaggaaatggcggatattcgcgctgattttctgaggcagcagcgtgatttacagcgtgatttcagtcgtgggcagatttccgaagacctgtataaaaagcaaacggaagcgcttaaaacagcgcttgccgaacgcctggatattcaggaggagtattacaaaaaaaccgatgaacagcagtcagactggcgggcagggatcagcgattccctgatgaactatgccaatcaggcttctgatctgagttcaatggctgccactgcaaccagcgagcttctggatgccaccactaactctatctccaacaacctgacaaacgtcctgactggcgccgcttcgtttaaagatggtatgtcgaatatcttcagctctctgggtgaaacggtgattaagacgctgatccagatggcaacacaggcgttaatcaccaaagcaattatggcgtcatttggcggcggagcgggagggttgttcggtagtctttttggcggtgccagcggtgcggcaagtagtggtaccgctattcaaagcgcgggagctaatttttcatttaacgctctcggaggcgtttacgattctccgtcactttctgcctacagcaatggtgtttacagcactccccaatattttgcgtttgcgaaaggggcaggtgtattcggcgaggccgggccggaagccatcatgccccttacccgtggcgctgatggttcgctgggggtcagagctgttgggcgggaatcaccggcggtacagaacgctgcgaagcagatccaggcacagccacgaattgctgtcagcgtagatgccagaagtacgttcaccggtaaaccggatgacataacgatgcaggcaattgagcgaaggaatgacgctctggaacaacggatagttaacaccttaaccgccgaagtaaataacccccagaagaaattcggtcgggctatttattcaaatctccaatctaaaaaaccaagatag

SEQ ID NO: 135205 - DNA, 474 bp, Enterobacter cloacae
atggcagatattttctacccggatgaatacctgcccatgccgcttatggacgggtacgggtttaagcccatatcacctttactgcgaacggagatgacgtccggtcgcgctcaacaacgaaggcgatatacctcaacacccacccaggcatcagttaaatggatctttaaaaccgatgctctggcgcaggtgtttgaggcgtttttcagggatgtgcttaaagatggccagtcctggttctatctgaaactccagactccagtcggggtaaagccctataaagccaggttcgtggatatttacgaagggccgacgctggtcgcgccaaaatactggcagtacagcgcaacgctggaattatgggagcgcccgttaccgccttctggctggggaaattacccggaatggctggcgggccagtcgttactggatattgcgctaaacagagagtggccgaagcatgacaattcttga

SEQ ID NO: 135206 - DNA, 477 bp, Enterobacter cloacae
atgacaattcttgagcggctatatgccagcagcggatcggaggttattcacgatacgctgcagatatctgcaggagatgataactactggctaaccagtggctgggatgacgtttcagtgacgctggaaaatggtcagccggtgacgtttgatgccagcgcgatagatatcgccttaccagccaggaacgccgacgggacacaggatttaaagtttgctatcagcaatattgacggacgggtttcagaggcgatcgataaaattctggatgaaatgaaatcagccacgctgacattccggcggtacatttcatctgatctgtctgctccggcatcatcaccgtatacgctcgatatcaaatccggctcctggaccccgacagcagttcaggtcacggcaggctatatgaatgtcctcaaaacagcctggccccgtaaacgttacaacctcgccgagcatccgggcttacgttactaa

SEQ ID NO: 135207 - DNA, 381 bp, Enterobacter cloacae
atgtttaaccctgataaataccgttcagtcacctggctgaagggcgggcgcgtatatccgcagctcgactgcttcggcattgtaaatgagatacgtcgcgacctggggctacctgaatggccggattttgcaggtgtgaccaaagaaggcgggggcctcgaccgggaagcgagaaagctgatgcttacgctgaaacgttgtgaaccctgtgaaggtgccggagtggcttgctattcgggttcaacggtttcccatgtcgggatcgttgtgatgctcgataaccagctgcaggtcgcggaatgcaatccaggctcgggggttacgtttctgccactgtcgcgatttatccgtcgctttaaccgcgtggagttctggcaatga

SEQ ID NO: 135208 - DNA, 3078 bp, Enterobacter cloacae
atgacgataaagttttacccgtcccggctaccgggtgaaccccttgaaacgcacgagcatggtgtgctgacgctgcatgagtggttgagcagaaatgtcccgagctattcacaggataaaactcatcctgtcgtgatcgagttgaacggccaggcagttcccccggcagaatggccgttatgtttgttgcggccagacagcgatgtgcggatatatcccattccgtatggcacgggtcttgaaattgccgcgtgggtttctgtggccgtatccattgcgtctacggcctatgcattattctttgccccaaaaccagagctgggcggtttttcatccagtaacgcttcatcgctggatctgaatccggctaaagccaatacagcgaagcttggcgatcccgttagggaggcttttgggcgaaaccggatttaccctgattacctggtgcagccggtaacgcgattcgaccctgctgatcccaccaggatgacggtcgaaatgtttgtctgccttggatatgggcgtttctcctataccggtggggattttcgggtaggagaaactccggcgctgaccttaggcgagggcttttcatataccagctatgggcccggcgataatgtggccggggatcgtcgcagtgagatatggttcaactcaacggaagttgggggaacgtcgagcggcagcggcctcgatatggctcagactgcccctgaagccagtgatatcgttgctgatgccatgaccgtcagcggtgcctctgtctcgttttctggcctcgatgtcgatgatgataatgatgaagacgaggatgagaacaaacttcctcctggctggatcgccggtgcaattgtcaccctgaaagcgccagtgaattatcaggtatccatcgagggcggttttaacgtgctgacaggcgacgtcgtgtcagagatcgcgccattcagcggaatgcctgtcaccctaacgtttaacggtactgactatgacctgcagatcgccacgtatacccctcaccaggacgccgttccgggaacagggggagcgactgcggtattacgcgccagtgcgtcgccgtcaacgtatgactttacgacaaccagccagacctttgctctgacctggcagggtatcacctataccatatctctggtcgccaactacggcactatgtctggcttgctcgcagcgattaacggtgggttgaatggttcggggctcattgctcaggatgatggcggcgtgatacgtatcgtggagatctccagcccctggcgtggcggttccattacgtcatcattcctgcctgcgtcagtatttggcgacagcccggtatttacagctggtacagcatccagcggcggaagccctgcggtaacagccagcgtgacgctggcatacgattctggcactgccttttccggattgccggaaggcacccagcggatttccctggcgcaccgtggcaacgaataccagatagcgtctactgatggcccctctgcgaccgtacagcgtgtggttaacggtgtcgttgacagcacctggtcaggctttatgaccagaaccgtcgtggattttgccgcgtctggtattaacgataatgaaacctggctcggcccctttctggcctgcccgcaaaatgaagttgtggatgccttcgaggtcaactttgctttcccaaacggaatttgcgggttccagaacaacgggaataagcgggtccgccatgtcgagtatgaaatccagtatcgcgtttatggttccggatcagggtggacgagtaagccaggggtttacgcgcttaaaaacattaatggcctcggttttacagagcgttttgatctgtcctctcctgggctggtggaggttcgatgccgccgccgtaacgagcaggggagcaacaacgcgagagacagcatgttctggcaggcgctcagaggtcgtttgctttcccgcccgacctcctacgcagggatatcaacaatagggatcacggttgaaactggcggccagctggcggcgcagtcagacaagcgtgtgagtgttgtcgccacacgaaattatgatggcggtggtgacaggacaatcagcggtgcgttcctgcatcttgcccgcagtctgggatatcgcgacgaccagatcgacattgcggcgctcagtacgctggaggctacctactggacgccaaggggagaatattttgatcaccaggcaagcagtgacagcacgtcagcaaaggatattttcgacaaaatagccgaggctggcatggggtattttctgctgtctgacgggttgctttctgtcgggagagagggcgtcaaaagctggacagggatcattactcctcaggataccgtggaggaaatgcagacgtcattcagggtcccgtcggaggatgattttgatggcgtggatgtgaaatatatcaaccctgtgacctgggcggaggaaaccgtacagtgccggacgccggaaaatccttttccgcgcaaaacggaggcatacaccattgatgttgccatgactgcagatcgcgcctggcgtatcgggatgcgtcggttaatgaaatatctccaccaacgccgaacgtatacggctacgacttcgatgctgggatggtgtcatgacttcggtgatcacatcattttgtccgacgacattccaaccgggaaaacccaaagttgcctgattgacgcgatgatttacgacttccaggaaatcacgctgcacgtcacggagccactggactggagctacgcgaatcctcgctgctggatacagtttcaggacggtcgaccatcatcgcgaatgctcacgccgcaacgggtagatgatttcacgctgacggtgccgtacaacgacgacctgcatccggatgactggataatggatgacccagatattgatccgccgaagttattgctctgcgacagtgaaaagggtgcgcggcatgggatagtccaggaggttgccccatcgggtgacagcaactgtcagattactgcacctgaatataaagaaattttctaccagtacgacgacgccacataccccggcgacgtcgcttaa

SEQ ID NO: 135209 - DNA, 2088 bp, Enterobacter cloacae
atggcctttgatccgccacttgggagcacttcgcccgcggtgctgctcgataacgccactcgcctggacgaactcgttaacgggccagcgggcaccgttaacgaccgtgccgggcaaccgctggacacctggcgccagatcgtgacgatgatgcttgctgctgtcactgatgcgcagaacagcattaccgctattgggctcccctttaatacgctctctgatgctcaggctgcagtagctgctggaaaaataccagatggctccgtgacatgggttagaactacggacagcgctgcccttgcggatgagtacaaaaatataaatggggttctgacggctaccggacgtcggatgccttctcaggatgccgtggacgcactttcgcgccagttgctggattcgattgttaccggagatgtaccagggttttggctggcactgaaagactctgcgggctggatttcatggggagtggatgatcaggggggatttggatcacgggctgcctacctcgggacagacaatattctggcgggaaatatcaaaatcctgtttaccgatgatgtcggattacggtttcaggaccccgagggattctatatcgatgtgctggataatttcggacgctatctgttgggagattccggcggcggttcttcacctgttgacgaagtcagcattctggatttgaaaaataaagcttacgcggcggaagtttcgcggcgcgtactgacacggctgaaatttccgactgaggcgtataaccattttttgatggagtgtcagagccttggtatggggtatatgagctggccggttgtcagcaaaacgcctaaatatgattcgctaatgctggggcagtctgttcgtccggcgagcacgacgaacaatgcgtttgttcccctgggcgtaaatgcgtggcaacctctgcgggcagttgtacagtcagtctctggcagcgccattctgtccgatgcggagcaactcgcgctggctcgaagcgcggttaatgaaggggagagtccgatcgttggcgcggtgaacggattcagacgacacttccttgaggcgcactgtctgagtgctgaccctggtcgactgtttgtcgcctccacggtcggcgtgtccggccagtcaattgccagcctgatggacgataccaaatattttaatcgtgtcgttgaatgcgtaacgaaggcaaaggccctggctgacagcgaagggaaaacctattcggttaccggggtcgatttcgttcagggacaacgcgactatgatgacggaacgcctaaagccacatataaatcgcaactggggcaactctacaacaaaatcaataatacaattcgtgggatcaccggccagaaagacaatccagcctggtttatttctcagacgggatacacctacagtcctaatccagccacgcagccggtgaacgctgtcgagctttgggtgggaatggcgcaatgggagttttgtcaggaaacaccaaactgtttcctcattgggccggactatcagttgccggataaaggcggccatctgatgacgaacggcagtcgctggctgggttgttattttgccaaagcaaaagatcgtgtactgaatcagcggcgtccattccagccactcgctcccacgggtattacctgtgcaggttcagattttctgttgagttactacgtcgatcatccacctttaaaatttaccagcccgttcaggaacggaaccagaacccccatcactaatagcggatttcgcgcctggcataggattgatgccgatccatctggtatagggacagaactgaatatcaccagcgttgctgttgcagccgacacggttattcgcctgacatgcgatacagagccgcaggggaaagtccgggtggcctatgcaacacgcccccagtatgggcagggtatggtaaccgattctgataattacgtaccggatgaagtgtacgaatatgacccgcagttcacccagtggccggaagagaatattccggagctgatcggcaaaccctatccgatggaaaactggtctattgccttttccatgaccttcaataaggatgaataa

SEQ ID NO: 135210 - DNA, 750 bp, Enterobacter cloacae
atgagcctggcaattcagaaagatgtcgatttttctgcggtggctaccggatatttacctccggtaactgcaggcgtggagtacttcaatttttttaacagcgaagactcgctgacacgcaacctgatccccaacaagccgactcctgcaaagaacgggagtccgctctttaacaccaacggacaaagcttcctgctgaccaacctgcttaatttcatcaataccgggataaaactgactgatgaaatgaccattattacggtggcagaaccaaccggcgcggatggttttttcccgacctggtccactacaggttcgccgattacaaatggagggagtttcacgtctcaatcctttatgcgtcagagcgccaccacgcgaaacccaacgctgtcgctgagttattccactgatggtttcatcacccgacagaacctgtcgtatggggtatcgtcgggtgttgataatatcaggctccgcgccatagcatcggctttcagtcagacagcaaaaacatccagcctttatgatctgacgaataataaaaatgcccaggcacctctgccagcaaatggcgtttatggaaaggcaggtaatatcctgttgggatcgcattacaacgccgcagagagctcacagggtaatctttacgctgccgcgatttacagccggatgctctcaacagctgagatcaatcaggtatatgctgcgttaaaagcttattactcaaagcgtggcatatctgcatga

SEQ ID NO: 135211 - DNA, 315 bp, Enterobacter cloacae
atggcctgtttactggagtacctgctggcgcacggcagagaacgtctggtcagcgatgaagagttaatgattaacgtttgggaaaaaaataatctccgcccttccgcgcagcgcctatggcaggttattcagagcttaaagtctcgcttacaccaggctggcgtggagagtgcgttaatcatccgcgttaagtgcgcggggtattatattaataacgtttacgtagccgaaatttattcatacaaaccgccggggatgatgaattatataaacacttcgcctgctgatatgaataagcttctggtacgcagctaa

SEQ ID NO: 135212 - DNA, 717 bp, Enterobacter cloacae
ttgaatattttaattcacagcaataatatttattttaatatcggtatcgcccagtgttttcgggatattcagaaaacagcgcccgaattaaaggttattcactccctgcccctcagccatcttccagaactgtccgggctggatgtgattattttgtcactggaaaactatcatgattacctggctgccgctgaaatcgctcagcactttcagggcctggtcattggctttacgtcagccggcaatgtaaggcgcggacgcccctttttcgcggataccctactgtgggtcagccagcgcgaagcggtacgtgaagtgagccgccttctgcgctgcctggccgagcgccgctggccactcgtgccgcgtcaccaacgtcagagcgtttctttccgtcaacgagccccgctcaaccgcctggagatgcggatgattgatgccaccatgaagggtcagtcggttcatcaaatggccgctacgctggggattaatcgcaagcgggtctataacggcctggaaaggattaaagtgaatttccgcctggtcactcatagccattttcatcatttcatgaccgacaggctctcttttagtcgcctgtctgccgacctccgatgcctgaccacagcagctaatgcaaccctgccgccgcgcgcagcctcgaggctggcggaaaatcattcatattatttgaaagagtttcgcaaattgttttga

SEQ ID NO: 135213 - DNA, 210 bp, Enterobacter cloacae
atgaaattcatcaaaactttcgtagctattgctgcgctgtctctgttctctgctgccagctttgctcagagcgtcagcgccactgcctccacgctggaccgcgcggaagctaaaattgccgcccaggccgcagaacagggtgcatcctataaaattaccagcgcccagtttaacaaccgtgttcatatgacggctgaactgagcaaataa

SEQ ID NO: 135214 - DNA, 636 bp, Enterobacter cloacae
atgcaacatatcattgagggcttcctcaacttccagaaagagatcttcccccagcgtaaagaactcttccgcagcctggcctccagccagaatcccaaagcgcttttcatctcctgttctgacagccgtctggtgccggaactggttacccagcaggagccgggacagctctttgtcattcgtaatgccgggaatatcgtgccgtctttcgggccggagccgggcggcgtttccgcgaccatcgaatatgccgtggttgcgctgggcgtgacggatatcgtgatctgcggccattccaactgcggcgcgatgaaagcgatcgccacctgtcagtgccttgagccgatgccggcggtgtctcactggctacgctatgccgatgccgcgaaagcggtggtggaaaagaaaacctgggctagcgaaaccgataaggtcaacggcatggtgcaggaaaacgtcatcgcccaactgaataacatcaagacccatccttcggtggcggttggtctgcgcgaccataccctgcgcctgcatggctggttctacgacatcgaaaccggcgatattcaggcgctggataaaaacacgaaatcctttgtttcgctgtcggaaaatccggacgtctttttcgaataa

SEQ ID NO: 135215 - DNA, 630 bp, Enterobacter cloacae
atgttcctatccagcctgatggccattgccgcggtgctgatcatgggcgtgatcagtcccggcccaagctttatttttgtcgcgcgcaatgccgtcgctcgctcgcgtctgcacggtatggtgaccgccctcggtaccggcgccggtgcggccattttctccattatggcgatgctgggcctgcagaaggtgctcaccgcggtgccggagctgtttattggtttgaaggtggcgggcgggctctatctgctgtggctgggctataaaatttttcgcgggtcggcgcagccgatggatttttccgccagcgggatggccggcaaccgctctttgctgaagaccttccgcgacgggctgtatactcagctcagcaatcccaaaacggcgctggtgttcgcctcaatttttaccgccctgctgccggcgcagatccccaccgccttctattacatcgtgccgctgatgagctttctgatcgacgtcagctggtattcgctggtggcgctggtgctgtctgccgaccgcccgcgccgcgtctacctgcggctgaagcggcggatcgacatcgccaccgcgacggtgctgggggcgctgggcctgcggcttatcgccacctccctcacccgctag

SEQ ID NO: 135216 - DNA, 771 bp, Enterobacter cloacae
atgctcgattatgctgctttccctcaacagcgacaagcgctgatttgccagatcctgcaggaaaacggcagagtggtgtgcgcggagctggcggcgcgtcttcaggtgtcggagcataccatccgccgcgatctgcatgagctcagccgcgagggattctgtaaaaaggtgtatggcggggcggtgctgagtctgccggaagcgggggattacagtgagcggaaagataaaaaccgcgcgataaagctcaggatcgcgcaacagtgtgcccggctggtgaagcccggcggcactattttcattgataccgggactaccaatctggcgatggccgaggcgctgcccgccgagctggcgctgacggtggtaacgaactccccggagatcgccgcggtgctggtgaaaaaaccgctgtatgacgtggtgatccttggcggccaggtacagcgcgcgagcggcggttgcgtcggcgccgcggcggtggctcaggtgcagggcatgttattcgaccaggggtttatcggcggctgcgcgatggcgccagagtcgggcctgaccggctttgactatgccgactgcgagttcaagaaagcggtcattaaacagtgcagcgaaattattgttggtctgacttcggataaaattccggcagcagcgcggtttgtggtggccgccagcagcgatatcgatgtgctggtggtggaagagaatatcagtcgcgaatatcgcgttgcctttcagcagcacgatattcgcatctataccgtgtaa

SEQ ID NO: 135217 - DNA, 384 bp, Enterobacter cloacae
atgaaaattgcccatttcgccctgtggacccaacagctcgacgtccaggcccgcttctgggtggacttctttgccgccagcatcaatgaaaaataccttagccagaccaaccccggctttgcctcctattttgttactatcgacgacgaggtggtgatcgagctgatgaccaagcctggcctgcagcaggccagcgcggataacaaccataccggctgggcgcatctggccctctcggtgggcggggcggaacaggtcgatgccatcgcccaacgcgccggggccgccggaatactgatttcgccgccgcgcaccaccggcgacggctattatgaggcggtgatcgccgatcccgatggcaacctgatcgaaatcgtcgcatag

SEQ ID NO: 135218 - DNA, 684 bp, Enterobacter cloacae
atggcacattaccggattatcgataccgcatcctggccccgccgggaccatttcactttttaccgccaattcgccaaccccagctttaatctctgcgtgccgatagcggcgcagcgcctgtacgaatgtgcgaaggaccgtcgggtctcgttttttcagctcgcgctctatgccctgctgcgcgcggccaacggggtaccgcagctacgccagcgagtgcggaacgatgaggtgattgaatatgacagtctggcagtaatgacgccggtgatgaccgtcggagagggattccgtcaggtgtggtgcgacaatgctcccgagttcaccgccttcagcgccgcggccacgccgaagattgtcgcggcaagagagacatccccggcgccgctcatcgtcgatggcgagcattttatctgcgccagctgtctgccatggctccacttcacctcgatgacccatgcggaatatgccgtcggcgcggcggtccccgcgctcacctggggaaaattgcagaatggcgttatcccggtggccgggcggtttaaccatgccttcgtcgatggtctccacgccagccgcttttatgcccttgtcgaagagggatttaatgaccccgagcggctctggttgccgctaaccgaaaccgcaccctccctgcttcccccagcggcgaaggagcgttaa

SEQ ID NO: 135219 - DNA, 1704 bp, Enterobacter cloacae
ttgtccagattacaacaaggattaaaaaccagacaaacccgcttcgccctggcgctaaaagtggccctgctcggcggcgtggtagcattttcttctgttgcccatgcggaagtgatcctgaaagaaggcatcaccccggccagcgacgccagccagatcccggccagcgccaaactgcgcacagacacggtggtggccgggatctccgagccgcaagggatctttaacccctactttttcgtcaacggctgggatgagaacgtgactaacgtcattttttcacgcctgatcgactgggacagccagggcaagctggtcccgggactggcggagagctggacggtcagcccggataacaaagtctataccatcaaattgcgccctggtctcacctttagcgacggctcaccgctgacggcggaagatgtcgcctttaccctgacggtcctgctcgaccccaaatatgatggcgataccgacatcaccctggccaatatcgccggcggggcggactacaaagccgacaaagctgacagcgtcagcggcctgaaggtcatcgacccgctcaccctgcaggtgaccaccacgcagccaggcgccaccacgctggccaaaattggcgggcctgtactgtcgaaagcctggtacggcaaagggtatcagcggggaaatctcgactatctgcgctcactgcacggcaagccgctgggcaacggtccttacgtgtacgacaaatatattcccggtcaggaaatacgcttccatgccaatagccatttttaccgtgggacgccgccaacgccgcgctttatctatcgcgtgaccaatccgtccaccaacttccagctgttccagaccggggagaccgactacgacgcctttacctcgcgccccgacgatattgagcaactgaagatgctcggcttcgccaatattaatctttacggctccagcgactacagccaggtggaattcaacgtgcatcgcccggcgctacaggataagcgggtgcgccaggcgctgatttacggtctggatcggcagaagctgatcgacgtggtctatcaggggtacggcaaagtcgccatcgagccgatcgcgccgatctcctgggcctttaacgctgaaggcgtcaacccttacccttacgatccggcccaggcgaaaaagctgctggatgaggccggctggaaagctggcgccgacggtatccgcgccaaagacggccagcgcctggagctgaccctgctggtgagcaagaaggtactcaacgatgcgctgatccccatcgccaaggagaactggcggcagatcggcgtgctgcttaagccgcaggtggtggatttcaacgccctgatggcgcagcgcaaagccggaaattacgatttggcctcgttcagcaccagcaccctcaacgacccgcacgacggggtatgggatttctacagcagcgaagctaaagagtccggctaccataacgcggaagtcgataagctgattaacgccggcaacgcggtgctcgacatcgaacagcgcaagccgatctaccaccagctgtataaagtgctggccgacgatccgccggtgatcctgctcggctatcgcgagatcctttccgccagcagcgcccgcgtcagcggctttaagccggatatctacaacggcctgaccggcagcctgccggatgtaaaaatcgtcaaataa

SEQ ID NO: 135220 - DNA, 960 bp, Enterobacter cloacae
atgagaaatttcatcctgaggcgcttgctgcaaacgctgccgatgctgctgctggcctccttcattatttttttgctgtttgccaaaacccccggcgactttatcgatggcaatatcaccctggcctctgcccgcgccgcggagctgaaggcgatctacggcctcgaccagccgctattgacccgctacctccactggctgggacagttgctgcgcggtgatttaggcttttcgctgcagtatcagatcccggtcagccagttgctcaaccagtacatctggaactcttttctgctggccagcgtcgcgctggtcttttactggggcatcggcctggcggtcggcgtggtttctgccctgcgacccggctcctggtttgatcatctggtgagcgtcgcggtgtttgccgccatgtcgttccccacctttttcctctgcctgctgctgattaaatggttcgccgtcgatctccactggctgccggtaggcgggatgaccaataccggcagcgacgagtgcggctggcagtatgtgctgcaggtggctgcccatctggcgctgccggtgctggcgctggtgatgctgcaggcgggcagcctgacgcgctatgtgcgcgccagtatgctcgacgtggtgaaaatggattttatccgtaccgcccgcgccaaggggttgcaggagcgcacggtgatcctcaaacatgccctgcgcaacgccctgctgccgattatcaccctgctgggcttcgagctgccggggctgttctccggggcgatcattaccgaaaaggtattcaactggccgggggcgggccacattcatatcgactcgctggccgcccgcgactatccggtactgatggggtttaccctgtttctggcggtgctgacgatcgtcgggaatctgctcgccgacgtactgtacgcctgggccgatccgcgtattcgtgtgaggtcatga

SEQ ID NO: 135221 - DNA, 804 bp, Enterobacter cloacae
atgatcctgtcttacttagcttcccgtcgccgccagcggcaggcggctatcccggcgctggcgcacattactccctctccctggcgccaggagtggcgacagctgcgccgtaaccggctggccatgttctgcctgctcctgctggcggtgatggcggtgtggtgcgtgctggggcccgtctggtcgccgtggagtgatgatgccaccgacgccctgagcatcaaccagccgcccggggcggaacactggctggggaccgatttcctcggtcgcgatgactacacccgcctgctgctggccgggcgcatctcgctgattatcggcctgctgaccatggtgatgtcggtgtgcctcggctacctgctcggcgccctctcgggttacgtcggcgggttaaccgacaaactgatcatgcgcgtggccgacctggtgatgactatccccgggttaccgctattgatcgtcgccggggcgatgctttctgagctcgatttttcgccggactcgcgcatttatatggtggtggtgatgctcagcctgctggagtggccccgactggcgcggctggtgcgcgggcaatgtctctccctgcgcgaacgcgattttatgctggccacccaggtgctgggcctgtcggcgcgtcgccggctgtttggccacctgctgccgaataccattccgattctggtggtgatggcgaccatggccgtcgcccacgccatggtgccgccgacgccgtcgtggggcaatatgatggatgccgctaacagcctgatcgatttccagcgccgcccctggctgtga

SEQ ID NO: 135222 - DNA, 981 bp, Enterobacter cloacae
atgaccacgccgttagtctcctttaatcatctttccgtctctttcgccggcgaacgctctcgcgtgcgcgcggtgcaggaggtttctttcaccattcaggccgggcaaaccgttggcgtggtgggtgaatccggctgcggcaaaagcgtcaccgccatggcgctgatgggcctcctgccgccgcagacggcgcgcatcgacggcggcgagatccgcttcgcggaccgcgatctgctgcggctgaaagccagacagatggccgatctgcgcggccaccagctggcaatgatttttcaggaaccgatgtcggccctcaacccggtgttgaccatcggggagcagctgtgcgaaccgccgatccgccacctcggcgccacgccgaaagccgcctggcatcaggccatccagctgttaagcgaggtcggcctggcgcgcggggacagcctgatgacccgctatcctcaccagctttccggcggcatgctgcagcgggtgatgatcgccatggcgctgagctgtcggcccaaactgctgatcgccgacgaacccaccaccgcgctcgacgtgaccgtgcaggcgcagatcctacgcctgctgcgggatcgggcgcgggccagccagatggcgatgatgctgattacccacgacctgggggtgatagcgcagatggccgagcaggtggtggtgatgtatgccggacgaattgtggaacaaggcgccaccgcggaagtgctacggcatcctcagcatccctacacgcgggggctgatcgcctcccgaccggtgcccggtgagcggcgtcggcggctgtactcaattcccggccaggtgccggatctggccgccctgccggcgggctgcgcctttgccgggcgctgcgagcgggcgacggcgcgctgccgggaggcgattccgccgctgctcggcgaccgccaacgtgccgcctgcttttatagcgaatttgcggaggtgacagcatga

SEQ ID NO: 135223 - DNA, 138 bp, Enterobacter cloacae
atgagcgaacgctatgtcattgaagtggatggactgaaaaaatattttccgctacgcgacggcctgtttggtcagcagaccggcgagcttcgcgcggtggacggcgtcagctttaatagaagagcgccggcagcgtga

SEQ ID NO: 135224 - DNA, 753 bp, Enterobacter cloacae
gtgaaatttcacggtcaggagctggccgacctgaccgcgcctgccctgcgcgctatccggcccaggatgcagctggtgtttcaggacccctatagctcgctgaacccgcggctgcgtattggcgacgcgattggcgaagccatgctgcagcacaaactgtgcgcccgcaatgagctatatgaccgggtgatcgacgtgatgaagatctgcggcctggcgccggaacactatgcccgcttcccgcatcagttttccggcggccagcgtcagcggatcggtattgcccgggcgctgatcctcaacccggattttatcgtcgccgatgaacccatctcggcccttgatgtgtcgattcaggcgcagatcatcaatttgttttccgacctgcgcgacaaccgcggggtcacgtttctgtttatctcccacgacctcggggtggtggagcatttatgtgacgatgtggcggtgatgtatctcgggcaactggtggaaagcgccagccgcgatgcgctgttcaaccgccccctccatccctacacccgcgccctgctggctgcggtgccgaccctcgacccgcacagtgaaccgcaggcgctggtgcaaggcgagatcccggatccggccaatccccccgccggctgccgcttttcatcccgctgcccgctggccagcgaacgttgccgcagagagcctccggcgctgcgcgaggtggccccgggccatcgggtcgcctgtcattgggtcgcatcctga

SEQ ID NO: 135225 - DNA, 528 bp, Enterobacter cloacae
atgcttaagcgtcgcactctcaaaacagcactggcggcggttatttcccttgccgtcatggccgcgccagcgtatgccaacccgggtaatggcaatggcaacggcggtggtaatcacgggaacagtggtaaccatggcaatagcggcaatcatggtaacaacggtaacagtggcgaccatggcaataaagggcaaaataaaggccagtccactgaagatcacggcaaacggaaaaactacggcaagcccgaccacgtcgacagcgatattagcttctcacgggcgcgctcccttgccgtgaactacggtctggtcggctatcaggcgctgccgccgggtatcgccaaaaatgtcgcccgcggcaaaccgctccctccggggatcgccaaaaagaccctgccagcttctatgattaacgacctgccctattatccgggctatgaatggcgggcggtcggcgatgatctggtgctggtggccctgagcaccgcgatcgtcaccgccgtgattaacggtgtgtttgactaa

SEQ ID NO: 135226 - DNA, 489 bp, Enterobacter cloacae
atggacaaagacacagtagtaacgctgttgaaatacaagcgctggattgaccttgccaccttacaggcgatccgcgcgattgacggaacggtacatggcgaaaagcgtcacctgaccatcaggctgatgaaccatatccatgtcgttgatatgattttccgggcgaatctgcgcggcaggccgcacggctacaccgcgctgaatacccctgagacgccaaccgttgatgagctggaaacggccatgaccgcctgtacggacgaatacattcagtacgtcagcgccatgacccccgccgacttccacgaacgtatcgccttcaaatttgtcgacggcggcgacggcaatatgaccgcgatggagatgctgaaccacatgctctttcacggcgcctatcaccgcggcgcggtgggctggatgattggcgaatgcggcggcgtgccgccgaaagaggtgctgaccgttttcctgcgcgaccatcattcctga

SEQ ID NO: 135227 - DNA, 285 bp, Enterobacter cloacae
atggcgagtgatacggaccggatttatatcaagatcctggaaacggtgctgatggctaccctggatcctgatttgtggaaatcggcgctgcagaaactggcgtttctcacccgcagcgccttgatggagctctttaacgtcaagcccgccgaaaacgcagtggcggagctgctggtgcggggcatgacgccttacatctgggcgtatctatcgccacgatcggaacccaccttagcgccctgtaccagaaaacccatactcgacatcaggcagagctcctgctga

SEQ ID NO: 135228 - DNA, 1542 bp, Enterobacter cloacae
atgttactccccgccagaacaccttcccgatacgccagcgccctggccgcgctttctgtctttatggcggccttgctgctgccgttaagttttaccggcggcgtcatgaccacccccgcgatacagcagtcgctgggcggctctcccgctgcgctgtcgtggctgaccaatggctttatgctgactttcggcagctttttgctggccgcaggggtggcggcggatgccatcgacagaaaacgtatttttatcgccggcgccgcgctgttttgcctgagcagcctgctgttttgtctgacgcacaatctcttcctgtcaggcgtgttgagggcgctgcagggcctggccgcggcgatgattttagccagcggcagtgcggcgctggcccagctgtatgatggcgctcagcggaccagggcattcagcatcctcggcacggtgttcggcgttggcctggcgttcggtccgctgctgatcggcttcatgatcgacgcggtgggttggcgcggcgtatacgccctgtttgcgctgctctcggcaggggttctgcttataggcctggtatctctgccagcggcagaaaaaagcgagccgcagacacccgacaacctcggcttaaccctgtttacgctggccctgatgctgtttactgcatcgcttatggtcattccggcccgcggttttttatccctgaccacgctggccttgctcatcgcgtcgggggggctgttcgtggcgtttgtcgtacgctgccggagggtgaacaacccggtgctggaactctccctgctgcgtcatccgcgttttgtcggcgtactgttgttgcctgtcgccacctgctgttgctacgtggtcctgctgattattgttccactgcattttatgggcggagaggggatgagtgagtcgcagagcgcactgtatctgatggcgctgaccacgccgatgctggttttcccatccgttgcggccctgctcacccgctggttttcaccggggcaggtgtccacggcgggactgatgatggcctccgccgggttgctgttgctgggcgatgcttttcacagtaaccacctcccgcagctggtgctggcgctgatcctctgtggggcgggggcggcgcttccctggggactgatggatggcctggcgatatccgctgtgccggtcgccaaagccggtatggcggcaggcctgttcaacaccgtacgcgttgccggcgaggggatcgccctggcgatagtctccgcggtattaacggcaagcaataccctgaccctgcagagtcgagtacacgggtatgcccccgaggtgattcaccgcgccgcaggctggctgggggccggcaatatgccgcaggcggctgcgcttttgcctgatttttccctccgggtgctgcgcgagagctatgactctgcttatacgctactgtttagcgggctggcggtcgtcaccctgctgtgcgccctgatgatctggctgacgttatgccggaaggggggcgctatccaaacccgcgacagcggatcctgccccccatga

SEQ ID NO: 135229 - DNA, 693 bp, Enterobacter cloacae
  misc_feature (670)..(679): n is a, c, g, or t
atggacagcctcacctcgctgacgtcctttgtccgcaccgccgaaacgctaagctttgttcaggccgccaggctgctgggcatatctgcctcggcggtgggtaagaatgtcgcccggcttgagcataaactgggggtccggctgttcaaccgcagcaccagaaacgtcagcctgacggcggagggggccgcatttctgacgcgctgccagagtatcctggagcagatccaggaggccgagtcagagctgaccagcagtctctcacagcccaccggcaaactgaggatttcactgcccgtcattggctaccgcctgttgctccccgccctcaccgcttttacccgtctttatccgcaggttgaactggatctcgactttagtgaccggctggtcaatctgatcgatgagggattcgatgtcgctatccgcagcggtgaattagcggactcccgcttgatcgccagaaagctgggaggctttcgttttgtgctctgtgccagcccggcctatctggcggaatacggcgtccccgactcgccagcggaattggcggcgcacaagtgcatttttttccgcttccccgcgacggggctgatccagccctgggaactgcgcggtatgcgactgacgggagatttcaggtccgctgccgttgtaacggtcaataacnnnnnnnnnnatgacggtcaataa

SEQ ID NO: 135230 - DNA, 264 bp, Enterobacter cloacae
atgacggtcaataacattgaggccgccattcgcttaagcgcggcggggatgggcatcgcttatgtgcctgattttgtcgtgcgcgaggcaatggatgagggacaactgcaggaggtgttgcccggctgttgcgacaaggatgggcatttctcggtcctgtggcccgccagccgctacctgtcaccaagaatacgctgttttatcgattttatggctgcggcagagatacccttgtcacccgcatcggcaagccctaccacctga

SEQ ID NO: 135231 - DNA, 990 bp, Enterobacter cloacae
atgaacgcaaccacccagaatcaacgctacgccttacaggaactggaaaaagaggcgctgatgggcgccgagggcgaagagaccttcgcccgcgaagtgcgctgtatcgacctgtcgaactttgccgcaagaaaaaatgacattgccgaacaactgtgggaggcggcggtggagatcggcttcttccaggtcagccatcacggtattccgctggcggagatccgccaggcgttcagcacgaccgaggcgtttttcaacctgcccgacgaggtgaagcgccagtatccgctggccggcaacgccggctgggaaagcaaagcgcaggttcggccatcgacccgcacgccggatcaaaaagagtcctatcagataacccggcctctgatggccgggcgctggcccagcgatcgggagttgccagcattccagcagacgatgctcgggtttgaatcgcagtgctggcagctggggatgaagatcctctcctgctttgctttgaagctcggttttccggaatcgtttttcaccaccgcgcacgatccgcagcgtgacacctatcagagcaccttgcgcatgctgcattactatgcaaccgagcagtcgcagcaggggatgtggcgggccggcgcgcacaccgattttgactgtctgacgctgctgttccagcgccccggccagggcggcctgcaggtttgtcccggtaaagaccgtgaaagccagcagtggaccagcattgagccgcgcgaggaggtgatcacctgtaatatcggcgatatgctgatgcgctggagcgacgaccagctgccgtctaacttccatcgggtgagaaacccgctgccccacgaatatcaggggccgcgctacagcctggcgtttttctgccaggccaataaagatgtcgagatcctcgggccgcagaggaagtacccgcccatcagcgccgaggattatctgcagcagcggatccaggccaattttgccaaagggtaa

SEQ ID NO: 135232 - DNA, 1419 bp, Enterobacter cloacae
atgtcattaatgattaaaaatgcccatgccatcctcagcggtctgcccggagaggcggcgcggctggccgggccggatattcgcatccgcgacggcaagattgccgccatcggcagcctgacgccgctgccggaagagcgacagatcgatgcccgcgactgcgtgatctatccggcgtgggtgaacacgcaccaccatctttttcagtcgctgctgaagggcgagccgcaggggctgaaccagagcctgacggcctggctgagcgccacgccgtaccgctttcgcgcggctttcgatgaacatacctttcgtctggcggtgcgcattggtctggtggagcttctgcgctcgggctgcgccagcgtggcggatcacaactacctgtactggccggatatgcctttcgatgcctcggagattgtcttcagcgaaggggaagggctggggatgcgcatcgtcctgtgccggggtggggcgacccagggccgggcggtggaacaggatctgccggtggcgctgcgtccggaaaccttcgacggctatatggcggatgtcgaacggctggtcagccgctatcacgacccccgacccgagtctctgcgccgggtggtgatggcgcccactaccgtcctgcactccgcgccgggcgcccagctgcgggagatggcgaagctggcccgccagctggggatccggttgcacagccatttatcggaaaccgtcgattatctcgacgccgcgcggcagaaattcgccatgacgccggtgcagttctgcgcggaacacgactggctgggaaatgacgtgtggtttgcccatctggtgaagctgctgccggaggagattgccctgctgggccgtaccggaaccggcatcgcccactgcccgcaaagcaacggccggctgggcagcggcatcgccgatctgctggcgttagagcaggccggggtcccggtctcgctgggggtggacggcgccgcctcgaatgaagcggcggatatgcaaagcgaagcccatgccgcatggctgctgcagcgcgcgcgcaaggggatgctggcgcagccgcgctacgccgggggcacctttgagggtggggccgatgcggccacggtggaggatgtagtgcgctggggcagcgccggcggggcgcagatcctcggcttagcgcagaccggcaccctgcaggtcggcatgcaggcggaccttgccatttaccggctggacgatccgcgctacttcggcctgcacgatatggccattgggccggtggcctgcggtgggcgcgccgcgctgaaggcgctactgctcaatggccgccccatcgtggaagacgacgccattcccggtctcgaccttgacgcgatgcgtcacgacgcgctggcggccgtccgtaccctccaacagcgcgccgctgtttaa

SEQ ID NO: 135233 - DNA, 990 bp, Enterobacter cloacae
atgaaaacaggcgcacgccttccccggggcatacgctggctgggcctgatggccctcggcggtgtctcgctggccgttcaggccgaggagaaaatcgttctgctgacctcctggtacgcccaggcggagcaggggggttattatcaggctcaggccaccgggctgtacaaaaaatatggtctcgacgtcgagatccgctccggtggaccgcaggtcaacggcatgcagttgctgttgtcgaagcgggccgatgtgatcatcggttacgacctgcagctgctggaaggcattcagcgcggcttccaggcaaaggccattgccgcgccctttcagtacgatccccaggggctgctgacccatgccgatgtcacctccctgcaggggctgaaagacaaaaccctgctggtctccagctccggtcaggcgacgtggtggccgtggctgaaggcgcaataccagctgagcgacgcgcaggttcgcccctataccttcaatattcaaccctttgtcgtcgatgacgctgtcgcccagcaggcctatgtcagctccgaggtgttccaggtgcagaaggccggagtgaaggcgaacttcttcctcttttccgagcacggctatcccccctacggcggcatccttatcgcccgcccggataccatcgccgagcgtaaagcggcgatggcgaagtttgtccgcgcctcaatggagggctgggtgagctatctcaaggatccggcgccgggcaatgcgttgattaagcaggacaacccgaaaatgaccgacgatctgctcgcctggggcgtgacccagatccgtgagcatcacctgatcgacggcggggatgccgccagccagggctgggggacgatgaccgacgcgcgctggcagaagacccgcgactttatggtcagcgccggtttgctggcggcggccaccgactggaaacaggcctacaccaccgaatttgttcaggccatgcaggttaaaccctga

SEQ ID NO: 135234 - DNA, 900 bp, Enterobacter cloacae
atgtttgccttctcccgatttctgctctatttcactgaagtggcccgtcagggatcgtttcgtaaagcgtcagaggcgctgcatgtgtcggcgtcttccatcgatcgtcagattttgcgcgtggaacaggagctggcgatgccgctcttcgagcgccatcccaccgggctgaggctgaccgccgccggggagctgctcctgcacgcggccaataactggaaaaaggactttacccgggtctgcgagcagctggacgatctgcgcgggttgcggcgggggcatgtgcgcatcgccaccatcgatgccattaaccggcatttcttttcgacgatgctcaaagaggtgcataaacattatcccaacatctcttttacattgaccaccatcaacaatatccacatccagcaggcgctgatctccggcgaggcggatttcggcatcatgctcaatccgcagacctcccgtgaactgcaggtccgggcgtttgccgagatgaatatggggattgtggtgcccaccggccatccgctggccagccgcagcgcggtgcgctttagtcagtgcctcgactacccctttatcctgccgtccgccccattgatgatcagcgagccggtggaggcgctggtgaacatcagcggcaacgaggtaaaggaggtggcggtatcgaataacattcacatgatccgcaccctgatcaaagagcagatgggcatcggcatcctgtgccggctggatattctcgatgaaattgagtccggccagctggcgtttgtgccgctaaccgatccgcagcttaagcctttcaccctggcgctgtgcgtctcgcccgcccgccagctttcccttgccgcctcgatgatgctgaaccagctggagatgctcttcagccagctgtga

SEQ ID NO: 135235 - DNA, 969 bp, Enterobacter cloacae
atgcacagccacgaacttatttcggtctcggtcggggaaatacgccccaacggacagggaaacctatccataattttgcagacggcggccggggaaatattaccggcctactccgccggggcgcatatcgatattattattcccggcgtcggctcccggcagtattccctgtgcggcacgcctgaccgcagtaatacttatgaaatttgcgtcagactgactgacacctccaccggcggctcacgctatttgcaccagcagctcaaagccggcgatcggctcgccatttcgccgccgcgcaaccattttcccctgccgcaggccgggcgctacctgctgtttgccggcggtatcggcatcacgcctttgctggcgatggctgaagcgattgccgccagaaagggggcgctggagctgcattattatgtcgccagctcgcgccagacggccttctccccgcgcctgaaccagctgactgcgaacggcacggtggccattcactgcagcgaggaaggcgcgtcgcttcgccagcgggtccccgaatgcttaactgtgccccaccctgataccgcagtaatagcctgcggcccggagggttttattcagagactgcggtcggtcatggaggaatatcgctggtcgccgtcgcagttcgtattcgagcgttttactcccgcggcggaaaataatactgcggcgaaaaatgcgttttatattgagctggcctccagcgggcagcgcctgcaggtggccgcggatcaaaccattgctcaggtattacagcacgccggggtggaggtaatgctctcctgcgaacagggaatgtgcggctcctgtattaccggggtcctcgacgggatccccgagcaccgggacagcgtgctgacggcggaagagaaagccggcaacgaccagatcacgctctgctgttcgcgggcgaaatcgccgggtctggttttggatctgtga

SEQ ID NO: 135236 - DNA, 1284 bp, Enterobacter cloacae
atgacgctcccctcctcttgcgcgccgctcaccggtatcagccgcgcccgactcccggcctgggcgctgcccgacggctggccgacgcaggccaacggtgaaccgctgctggcggacctggcctttcgcgacggccggatcgccgcactgaccccaaccgaccagccgactcccggcctgtgggacctggcgggagccctgacgctccccggcctggtggaaccccatgcccatctggacaagacattcaccattgaacgctgccgtccagcgcaggccgggctgctgccggcgatccacgccatgcatgaggatcgccgacactggtccaaggcggatattcaacgccgagcgtccaccgcgctggcccgggcggcagcgaatggcgtgacccatttgcgcagccatatcgactggtttaacgccgacgcgccggacgcctggcaggagatcgcccgcctcgataccggcggcatcaccctggagcgggtggcgctggtcccgctgcccctgtttcaggatccggtggaagccgaggccattgcccgcgcggtcgccaacagcggggagcgctgcctgctgggcggcttcatccactcctccaactgggacgccgccgccatggaaaatctgctgtgcagcgcggcccgctgggatctggatctggatttgcatattgatgaggagctcagcgaagtgtctcaggggctgacctggctggcggatcatctctcccgccacccttttcccggacatatctgctgcagccacggctgcgcgctggccgccggcagcgacgaacaggcggcgccgatcctgcgccagctggcggcgcacggcgtcacccttatcgctctgccgatgaccaacctgctgctgcaggatgcgacgttcggccgcacgccgcgccagcgggggatcaccctgctgcacgaggcgcaggccgccggcgtggccaccctgctcggctgcgacaacgtgcaggatgccttctgcccggcggggagctatgacccgctggacaccctggcctgcggtctgttcagcgctcagctcagcgacctgttcgaccggcagtcgcggctgatctgcgatcgcgcggcgctaaccggttcgccggcagacgcggcgccttttgccgtcggggcggcggccagcgtagtgattttcccgggtagcgaccgttttacctggcctttaaacagcgccgcccgtctggtggttaaccacggcaggttaacccaccggcgcgtgtggcaggaggagatggcacatgagtcttga

SEQ ID NO: 135237 - DNA, 480 bp, Enterobacter cloacae
atgagtcttgaagcaggcgccggggcgccgctggcgcggtatgccgcctggcgcagagccggcgattttatctttctctccggcattattccggtcaatcccctgaccggcaccatcgtcaacggctttcaggatgtgcctgagccggtgcgggagctgctgggggcgaccggcgaattttcgaccgatgcgaaacagggcccgatcctcgcccagagctggtacgtcctggagagcatccgccgcaccgtggcgtccgcgggagggcagatgagcgacgttatcaagctggtgcagtactttcgcaaccttgaccattttccctattacagccgggtcaggaagctgttttaccccgaccagccgcccgtttccaccgtggtgcaggtcagcgaaatgctgcccgacgccacggtactgattgaagtcgaagcgaccgtctggttacccccgtcatttaactccgaggcaccgcgatga

SEQ ID NO: 135238 - DNA, 882 bp, Enterobacter cloacae
atgattaacggttacattcctgccgcgcgctttcttccttttctgagctggacggacgtggccgccctgccggataaaagcaatacggttatcgtcctccccaccggggcgatcgaacagcacggcccgcatctgccctgctcggtggacagcgtgatatcttccggcgtggcgggccatgccctcgccaggctgccggcgacgatcccggcctacgccattccgccgatcgtctacggtaagtccgaggagcatctgcattttcccggcaccctgacccttagcggcgatacgctgctgcataccctgctggagatcgccgaatctctctatcgggccggttttcgcaagctgctgatgatcaacggccacggcggccagccgcagatcctgcagatcgcctgccgggaaatgcgcctgcgccacggggatttcatcgccatcccccacgacgtgttcaacgtgcccaactgcgaaaaacagtttctcagcccgcatgaacagcggatggcgatgcacgccgggcatagcgaaacggcgctgatgctggcgctggcgccggagtgcgtccatatggaacgggccgtcgctaatttccccccggaattcccctgcccaaccctgtcgaaaggccgcccggcggcggcgtgggcgtcgtatgactttggccccagcggggtgattggcgacccgaccccggcgacgcgggagcaaggcgaagggcttctcgactccctcgccgccagctgggcgcaggcgatcatcgagatccaccgcatggcctgggtcgaacgtcgcgaaccgacctggggcaaacagcactggcacggctttgtgcagtccctaccaccttctttcgctgctgaatccagggagccctga

SEQ ID NO: 135239 - DNA, 984 bp, Enterobacter cloacae
atgaataccagattgacgcccgtttttaccctgctgaccgtggccgccctcgcgacctcagcctcctgcttcgcggcggagaagtttacctttctcaccaactggtatgcccaggccgaacacggcgggttttaccaggcccaggccaccgggctgtatcaacacgccggtctcgatgtcgaaattaaaatgggcggcccgcagatcaacgtcatgcagctgatggcggccggtcaggcggactgcacccttggcgacaacggccaggcgctggagacctggcaggccggggtgcacgcggtgaccgtcgccaccgtgttccagcactcgccgacggtgtttatcacccatgacaaagtggagaacccggcggaacttaaagacaaaaccttcctgctcgccaccgaggcctatacctccttctggccgtgggcgaaaagcgagctgggtctggctggcagcaaagtgcgcccctatacctttaacgttcagccgttcctcgccgataaaaacctggtgcagcagggctacgtgacctccgagccgttctccgtcgccaaaggcgggcagccgttctatgtctatccgctcagcgactggggctacccgccctacggcaactcgattatctgtatggccgacaccatccgcaaacgtccggcggcggtggcggccttcgtcaaagcctccatggaaggctggaaaagctacctgcaggatcccgcccccggcaacagcctgatcggtaaagcaaatccgcaaatgggcgccgagcagatcgcctttggcattgcccagatgaagcagtaccagctggtgaccggcggcgatgctaagaccggcggcatcggcatcatcaccgagccgcggctgaagaaaacctgggacatgctggtgaaaaacaaactgatcgacgccagcaaggtgccgtttgagcagacttacaccctggagatggtcaaagacgccggagtgatgccatga

SEQ ID NO: 135240 - DNA, 306 bp, Enterobacter cloacae
atggatgagcccttcggcgcgctggatgaaattacgcgtaacaaactcgacagcgacctgctgcgtctctggcaggagcaaaacctgacggtagtgttcgtcacccactcgatccacgaagcggtgtttctctcccagcgggtgatcatgatggcggcccgtcccggacgggtggtcgaagatatccccatccgcgagccgttcccgcgcagcgaggcgttccgcgtcagcccggccttttccctgtatgcccgtcagctgcaggacagtctgttacaggccagccagtctggtatggagccataa

SEQ ID NO: 135241 - DNA, 816 bp, Enterobacter cloacae
atgaaaaccacaaccgcaacgccgtggatccagcatccgcgttttctcaaaattctctatccgaccctcgtcgcggtggcgatggtgctcctgtggcagggcgcggtgagctatttccgtatcccggcctttctggtgccgtcgccgctggtgatgctggaaagcctgtggacgcatctcacgccgctgctgctggcgctgctgttcaccctcaagatcaccctgatctcgtttctgctgtcgattgtcatcggcgccgcggtggcgtttatcctggtgcagaaccgctttgtggaaaccgccctgtttccctacatcgtgtttttgcaggtgacgccgatcgtcgccatcgccccgctgatcatcatctgggtgaaggatgccacgctctcgctggtggtgtgcgccaccctgatggcggtgtttcccatcatctccaataccactcagggactgcgcagcgtctcccccggcctgctgagctattttcgcctcaatcacgccagccgctggcaaacgctggtgcggctgcgtatcccctcggcgctgccctatttcttcggcgcgctgcgtatttccagtgggctgtcgctgattggcgcggtggtggcggagtttgtcgccgggaccggcgggaccaataccggactggcctatcagatcctgcaggccggctaccagctggatatcccgctgatgtttgccgcgctgctgctgatctctctcgccggtatcgcgctgtttggcgtgatgtcctgggtttcgcgccgggcgcttagcgcctggcatgaaagcgaagccgtgcaatctcattaa

SEQ ID NO: 135242 - DNA, 1419 bp, Enterobacter cloacae
atgactgatgaacagcgtcaacacgcggtcgcggcgatccagcaggcactcccggcgctggagtggaccttacagccggcgaagatcaaacggctctcccgcgattttcactggttcagtccgctactcaccgagcaactggcggggaaacaggcggacgcggtggttcgcccgcgcgatgaagaggagctgcgccagctggtctgcgcctgcgcgcagcaccagctgccgctgaccctgcgcggcagcgccaccggcaactacggacagctggtccccctcgaaggcgggctgctggtggatatgaccgggctcaaccagatcgtcgccctcggcaacggcacagtgagggcccaggccggcattcgcctggcggacatcgaaaccgccgcccgccagacgggttgggagctgcgctgtatgccatcgacctatcgactggcgagcctgggcggtctctacggcggcgggttcggcggtatcggctccatcaactatgggccgctggcggcgcccggcaatgtgctcagcgtcaaagtgatgaccgtcgagccggtcccccgcgtgctgaccgtcccggctcccgaagcgctgctgctgcatcacgcctacggcaccaacggcattatcctggaggttgagctggcgctggcacctgcgcaccagtggattgaacgtctggacgtgtttgacgatttcgccgatgcgctgaactatgccaacgcctgcgtccgctcgccggggctggtgaagcgccaggtggcgctgctggccacgccgatcgctgactattttagccacctcaacgatcgttaccatgccgggcaacatgcggttatcagcctgatcgccgaggagagcgaaggactctgcgccagcctgttaccgcgccatcgcgggagcaacgccatccggcaggccagcgacgaggcccggacgcgcaacggctcgttaatggaatactgctggaaccacaccaccctgcatgcgctcaaggtggacaatacgctgacctatctgcagacggcgtttgatccgctgcgctatccgcagcaaattttacagatggagcagcacttcgccggggaggtgatgtcccatattgaattcctgcgcgatatcgagggcaatctcaccgccagcggtctgcagctggtgcgctataccacgcccgaacgtcttaacgccatcatgcagatatttcgcgacaacgacgtcaagattaacaacccccacgtgctgcaggttgaggacggcaaacagggcgtgattcgtcccgacgtcgtggcggtgaaacagtctctcgacccggcgggattgcttaaccccggcaagctgcgcggctgggcgctgcgcgaccagctggaactcgacagcaacccgctgacgcgggccacccgcgaaagccccacgacctga

SEQ ID NO: 135243 - DNA, 279 bp, Enterobacter cloacae
ttggtaaagaacccgctcatctgggtcagcggatgcgcccagcccagcattagcgccagggcggccatcggcaccagccacagcagtatcccggcgctggtgctgttcgccctgatggaatggggccaccagcacgtgctgcatagcgcgccgcctattgcattggtggacagcgccagcggcgagaccgtccatccggggttcgtcaccgccagcggcagcgtggcgagccccagcgcgctacagatcgtcaaagccggtacccatgccgaaacctga

SEQ ID NO: 135244 - DNA, 909 bp, Enterobacter cloacae
atggaacatactgttgcaggcgccatcaaagaatggcgtaaacataataaagtgatcggtcaggtcaaaataagctataaaaaaattttacgaaaatgcagagagctctcgctcgcaggaggtaaatacagagaatatcaaggactttgtgcgaaatatcagtgcgcgcggttgaccgcggtgaccaaaggactggtgccttttgaggataaaccgtttaaagcgtatctcaataaacggctgtcaaaacgacgcaaactggatattgcccatggttcactgaatttcatcgagaaaacgtttcaccctgatgtcctgccgcagctctacaatgtcgcggattttggccgcgagatgttttctattcccttgaaaaatggcgataagcttgacgttaagctgctggcctcgccgtttcaggaggaaggggagctgatgctgcagctgtttcttggcgaccggcgcgtctatagcgtctgtttttcctgcaccgacgatggccgcgcttatatcggcggcatccagggcgggaaagatatcaccaatgacgaagtgaaggtgctgactaaagagctgcatggcgcgcggccgaaaaatatcatcatgagcgtgctgtatggtttgctgcgatatttcaacatctccacggtctacgccatcgattctgattaccacgtgaaaagcgatctggtgaaagccagttattcatcgctgtggctggaaatgggcggtgagaaacaggctcgcggctggtataaactgccggcgcaagagatcaaaaagagtattgaagaggtgaaaagtaagcaccggagccagtttattaagcgcgaaggtcttaaagagctgattcagattaatatggcgaatgccctgcagcaaattaccttgcctgcgcgggtgaattaa

SEQ ID NO: 135245 - DNA, 141 bp, Enterobacter cloacae
atggaaattgatctcgacaacctggtcttcagcggcctggatgaagcggaagagcgcaacgcggagcgtctggaagaagcggacaaaaaagcccaggcgatcgttgccgacgacgactgcggcgacgcctgcaaaatctga

SEQ ID NO: 135246 - DNA, 891 bp, Enterobacter cloacae
atgagaatgagtgtcaaacagttacgcgcgtttttagcggtagctcacactctgaatttcgcccacgccagcgaaaggctgaatctgtcgcagccagctctcagcctgaccatcaaagggttggaagaggcgctgggcggcgcgctgctgcagcgcagcacccgcaaagtgacccttacccaggagggggaactctttctgccgatggcccgtcagctgctggccgactgggataacgtcgaggaggccatgcgtcagagctttaccctgcagcggggtaaaatttcggtcgccgcgatgccgtcgtttgccgccaacgttctgccggaggcgctgaaagcctttcgcgaccgctatgccggggtgaacgttacggtgcatgacgtgattaatgagcaggtgatcgagatggtgcgcgaggggcgggtggagatgggcatcgctttcgagccatcgcccaaccacaacctgctgtttaccccgctggcggtggaccgcttcgtggcgatcgttccccaacaatccccgctggcgaagaaaaagcagctcagctggcaggagctgttgaccctcgactttattaccctgcagcgcccctcggcggtacgcctgatgctggaggaggcgctggcgcgcagcggacgtcagctggacgtggcgctggagagtcatcagctggtgacggtggggaggatggtggccagcggcctggggggcagcgcggtgccggcgctgtgtaaaacgcagatggcatcgttgggcgccgtctgcatcccgctcagcgatccgccgattgagaagtgcgtcggcgcgatccatgccggacatctgccgctgtcgaaggcggcgcaggcgctgctggatacgctgaaagggtttttacccacctga

SEQ ID NO: 135247 - DNA, 537 bp, Enterobacter cloacae
atgctgacccgtgaacaaatggcgatgcgcgtcgcccaggagctgcgcgacggcgactacgtcaacctcgggatcattaacgccggtaaacaaaccgtcaccgcgcaaaccggggcggcgatcttcgattccgcccagtcgttcgccatgatccgcggcggccacgtcgacctgaccgttcttggcgcctttgaggtcgacgtcgcgggcaacatcgcctcatggatgatccctggaaaaatggtcaaggggatgggcggcgccatggacctggtggccggcgcgcagaacatcatcgtggtgatgacccacgcctcaaaaaacggcgaatccaaactgctgccgcagtgcaccctgccgctcacaggcgtgggctgtattcgccgggtactcaccgatctggccctgctggagattgtcgacggcgcgtttgtcctgcgcgaagtggccccgggggtcagccccgacgaggtgatacgtaaaacggcgggacggctgatcgtcgccgacgacgtgcgcgaaatgcgcttcagttaa

SEQ ID NO: 135248 - DNA, 1182 bp, Enterobacter cloacae
atgaccgatattgccattgttgctgccgtacgcaccccgataggcagctttcgcggcgccttcgcccctctttccgccgtcgacctcggcgcggcggtggtgcgcggcctgcttgaacgctgccagctgcccgccgcagcggtcgacgaactaattttcggccaggtgcttaccgccggctgcgggcagaacccggcgcgccagaccgcgctgcgggccggcctgccggtcgacactccggcggtcaccgtcaatctggtgtgcggctccgggctgaaagcggttcagcaggcggtgcaggcgatccgctgcggcgacgccgggatcgttatcgccggcggccaggagagcatgagcaatgctccctatctgatgcatggcgcccgcgacggcctgcgtttcggccacgccagcctgcaggacagcatgatccaggacggcctgtgggacgcctttaacgactaccacatgggcattaccgccgagaacctcgccgacgccttcgacatcagccgcgagcgccaggacgccttcgccgccagctcccagcgcaaagcggcggccgctatcgccgccgggcgctttcgcgaggagatcgttccggtcagcgtcccgcagggcaaaaagccgccgcgattcgtgactgacgatgagcaaccgcgcccggagaccagcgagcagcagctggcccagctgcgcccggcgtttcgcccggctgacggcagcgtcaccgccgggaatgcctcgtcgctgaacgacggcgccgcggcggtcctgctgatgcgcgtcggtaaagcgcgcgagcttgggccgccggtgctggcgcgcattgtcagctcagcggtcgccggggtcgacccgtcggtgatgggcatcggcccggtgagcgcctgccgccaggcgctgcatcgcgccggctggacgctggacgaggtggaccttatcgaagccaacgaggcttttgccgtccaggcgctggccgtcggtcagctgcttgagtgggatagcgagaaggtcaacgtcaacggcggcgccatcgccctgggccatcccatcggcgcctccggctgccggatcctcgtcagcctggtgcatgagatgcagcgccggggcgccagcaaagggcttgccaccctgtgcgtcggcggcggccagggcatcgccatgaccctacaacgttaa

SEQ ID NO: 135249 - DNA, 924 bp, Enterobacter cloacae
atgtttacaccacgcctggcggtactcggcgcgggactgatgggcgtcggtatcgcctgccatttcgcccgccacggtcacaccgtccgcctgtatgacaccgatccgcagcgtctcgccgaggttccggcagtggccagcgccatcctgtgcgagctggaggccagcggtcaacaggatcccgccgaccgcgacgcggtgctggcccgtctgacccccaccccgacgctgaatgccctggccgatgccacgctgctgattgaagcgatccccgagcggctggcgctgaagcacgccctgtacgccgagctggaaacgctgatcgccgacgagacgattatcgccagcaacaccagcggcctgccgccggatcggctggcgcagggcatgcgccaccctgaacggttgctgatcgcccatttctggcatccgccgcacctgatcccgctggtggaagtggtgcccgggagcgccacgctgcctcatctggcacgccaggtgagcgacttttgcgccgcctgcgcgctggaggcggtggtgctcaaccgcgccgcaccgggctttgtcggcaaccggctgcagttcgccctgctgcgcgaagcactgcatatcgtccacagcggcatcgcttccccggaggtggtggaccaggtgatgcgcgcctcgctgggccgccgctatgcgatggtcggcccgctggaggctgcggacatgaccggcctggcgacggtccaggatatctgccagcacctgctgccggagctggccagcggcacggagatgatgtcgctggtggcggagaaagtggcgcgaggcgacaccggcgcccgcagcgggcaaggcttttaccgctgggacgaggtccggcaccagcgcatccagtcgcgccgggaacaccagctccgcttcgccctgaaaccctag

SEQ ID NO: 135250 - DNA, 771 bp, Enterobacter cloacae
atgaacttacacggtaaaacggcgctggtcaccggctccaccagcggcatcggtttagggatcgccaaagtgcttgcgcaggcaggcgcccagctggtgctcaatggcttcggcgacagcagccacgcccgggctgaagtcgccgcgctgggcaagatccccggctatcacgacgccgacctgcgcgacgtcgggcagatcgaggcgatgatgcgctatgccgaaagcaccttcggcggcgtcgatatcgtgatcaataacgccggcatccagcacgtggccccggtggagcagttcccggtggacaaatggaacgatattctcgccatcaatctctccagcgtcttccacaccacccgcctggcgctgccgggtatgcgccagcgcaactgggggcgcatcatcaacattgcctcagtgcatggcctggtggcgtcgaaagagaaatcggcctacgtcgccgccaagcacgcggtggtcgggctcaccaaaaccgtggccctggaaaccgcgcgcagcggcatcacctgcaacgccatctgccctggctgggtgctaaccccgctggtgcagcagcagatcgacaaacgcatcgccgagggggtcgacccggagcaggccagcgcccagctgctggcggaaaaacagccctccggggagtttgtcaccccgcagcagctgggcgaaatggcgctgtttctgtgcagcgatgccgccgcccaggtgcgcggcgccgcatggaacatggatggcggctgggtggcgcagtaa

SEQ ID NO: 135251 - DNA, 873 bp, Enterobacter cloacae
atggaacttcgttatcttcgctattttgtcgccgtcgccaggacgcggcacttcacccaggccgccaaggagctgggtatttcacagcctccgttaagtcagcaaattcagcggcttgagcgcgaagtggggaccccgctgtttcggcgtttaacccgcggggtggagctgacggaagcgggagagtctttctatgaggatgcccgccagatcctcgccatgagcgatgcggcgctggagaaggccaagggcattgcgcgcgggatgaacggcagcctgtcgctaggcattaccagttctgatgctttccatccgcaaatcttcacgctgctgcaccgttttcagctcgaccaccccggggtgaccctgcaccagatggaagacaatatggccaatctgatgaccgccctgagcgaggccgagctggatatcgccttcgtccgcctgccgtgcgagagcagtaaagcctttaatctgcggattatcgatgaggagccgatggttatcgcgctgccgcgcgataacccgctggcgacgcagccgaccctggccctggagcagctgcgcgacgtggcgccgatcctcttcccgcgggaggtggcccccgggctgtatgagctggtgtacaacagctgtctgcgcgccgggatcgatatggagcgcgcctggcagtcgtcgcaaatttcgtcgtcgctgagcatggtcaatgctggcttcggcttcgcgctggttccgcagtcgatgacctgcatccagcagccgaacgtcagctatcacccgcttagcggggcgccgctgaagaccgatatcgccatcgcctggcggcgcttcgagcgctcgcgtacggtgaaacgctttctggcgatgttctga

SEQ ID NO: 135252 - DNA, 582 bp, Enterobacter cloacae
  misc_feature (121)..(130): n is a, c, g, or t
  misc_feature (492)..(501): n is a, c, g, or t
atgaatcattctgctgaatgcacctgcgaagagagtctatgcgaaaccctgcgggcgttttccgcgcagcatcccgagagcgtgctctatcagacatcgctcacgagcgccctgctgagcnnnnnnnnnnatcagacatcgctcatgagcgccctgctgagcggggtttacgaaggcagcaccaccatcgccgacctgctgaaacacggcgatttcggcctcggcacctttaatgagctggacggggagctgatcgccttcagcagtcaggtctatcagctgcgcgccgacggcagcgcgcgcaaagcccagccggagcagaaaacgccgttcgcggtgatgacctggttccagccgcagtaccggaaaacctttgaccatccggtgagccgccagcaactgcacgaggtgatcgaccagcaaatcccctctgacaacctgttctgcgccctgcgcatcgacggccatttccgccatgcccatacccgcacnnnnnnnnnntacccgcaccgtgccgcgccagacgccgccgtaccgggcgatgaccgacgtcctcgacgatcagccggtgttccgctttaa

SEQ ID NO: 135253 - DNA, 300 bp, Enterobacter cloacae
atgaccgacgtcctcgacgatcagccggtgttccgctttaaccagcgcgaaggggtgctggtcggcttccggaccccgcagcatatgcaggggatcaacgtcgccgggtatcacgagcactttattaccgatgaccgcaaaggcggcggtcacctgctggattaccagctcgaccatggggtgctgaccttcggcgaaattcacaagctgatgatcgacctgcccgccgacagcgcgttcctgcaggctaatctgcatcccgataatctcgatgccgccatccgttccgtagaaagttaa

SEQ ID NO: 135254 - DNA, 1680 bp, Enterobacter cloacae
atggacaaacagtatccggtacgccagtgggcgcacggcgcagatctcgtcgtcagtcagctggaagctcagggggtacgccaggtgttcggcatccccggcgccaagattgacaaggtcttcgactcactgctggattcctcgattcgcattattccggtgcgccacgaagccaacgccgcgtttatggccgccgccgtcggacgtattaccggcaaagcgggcgtggcgctggtcacctccggtccgggttgttctaacctgatcaccggcatggccaccgcgaacagcgaaggcgacccggtggtggccctgggcggcgcggtaaaacgcgccgataaagccaaacaggtccatcagagtatggatacggtggcgatgttcagcccggtcaccaaatacgccgtcgaggtgacggcgccggatgcgctggcggaagtggtctccaacgccttccgcgccgccgagcagggccggccgggcagcgcgttcgttagcctgccgcaggatgtggtcgatggcccggtcagcggcaaagtgctgccggccagcggggccccgcagatgggcgccgcgccggatgatgccatcgaccaggtggcgaagcttatcgcccaggcgaagaacccgatcttcctgctcggcctgatggccagccagccggaaaacagcgccgcgctgcgccgtttgctggagaccagccatattccagtcaccagcacctatcaggccgccggagcggtgaatcaggataacttctctcgcttcgccggccgggttgggctgtttaacaaccaggccggggaccgtctgctgcagctcgccgacctggtgatctgcatcggctacagcccggtggaatacgaaccggcgatgtggaacagcggcaacgcgacgctggtgcacatcgacgtgctgcccgcctatgaagagcgcaactacaccccggatgtcgagctggtgggcgatatcgccggcactctcaacaagctggcgcaaaatatcgatcatcggctggtgctctccccgcaggcggcggagatcctccgcgaccgccagcaccagcgcgagctgctggaccgccgcggcgcgcagctcaaccagtttgccctgcatcccctgcgcatcgttcgcgccatgcaggacatcgtcaacagcgacgtcacgttgaccgtggacatgggcagcttccatatctggattgcccgctacctgtacagcttccgcgcccgccaggtgatgatctccaacggccagcagaccatgggcgtcgccctgccctgggccatcggcgcctggctggtcaatcctgagcgcaaagtggtctccgtctccggcgacggcggcttcctgcagtcgagcatggagctggagaccgccgtccgcctgaaagccaacgtgctgcatcttatctgggtcgataacggctacaacatggtcgctatccaggaagagaaaaaatatcagcgcctgtccggcgtcgagttcgggccgatggattttaaagcctatgccgaatccttcggcgcgaaagggtttgccgtggaaagcgccgaggcgctggagccgaccctgcgcgcggcgatggacgtcgacggcccggcggtagtggccatcccggtggattatcgcgataacccgctgctgatgggccagctgcatctgagtcagattctgtaa

SEQ ID NO: 135255 - DNA, 720 bp, Enterobacter cloacae
atgaaaaaagtcgcacttgttaccggcgccggccaggggattggtaaagctatcgcccttcgtctggtgaaggatggatttgccgtggccattgccgattataacgacgccaccgccaaagcggtcgcctccgaaatcaaccaggccggtgccgccgtccaacaggcgcgcaaaacgctgggcggcttcgacgtcatcgtcaacaacgccggcgtggcgccgtccacgccgatcgagtccattaccccggagattgtcgacaaagtctacaatatcaacgtcaaaggggtgatctggggcatccaggcggcggtcgaggcctttaagaaagagggtcacggcgggaaaatcatcaacgcctgttcccaggccggccacgtcggcaacccggagctggcggtatatagctcgagtaaattcgccgtacgcggcttaacccagaccgccgctcgcgacctcgcgccgctgggcatcacagtcaacggctactgcccggggattgtcaaaacgccaatgtgggccgaaattgaccgccaggtgtccgaagccgccggtaaaccgctgggctacggtaccgccgagttcgccaaacgcatcaccctcggccgcctgtccgagccggaagatgtcgccgcctgcgtctcctatcttgccagcccggattctgattatatgaccggtcagtcattgctgatcgacggcgggatggtatttaactaa

SEQ ID NO: 135256 - DNA, 564 bp, Enterobacter cloacae
ttgcaaccagatcgctcaagactttatcttcgccgcgtaaacgcattagatatagatgatctcttcaggatttatggcgaccctgcaacaaatacgttcaatccagcaggcccgtatcccgatatcagtcacgcacgtaatgtaatggcccgctggcttaaccactgggagaattataggttcggaaactgggctatctcacttaaagaaaatcccgatagaattatcggttttggagggcttagcattatcagttatgacgatacaccgataatgaacctggggtatcgtttctctacagaatcatgggggaaaggtctggcgacagagttcgctaaatatgcggtcgggtacgggtttgatgttttaaaactggctgagatttctgcggtagtaagaccaaaccatctggcatcccaaaagatcctgacgaaagcaggtctccggttttcacgaaatattcatgacgtgaaaaatgagcccgcaagcatgctttttactgtgactctggatgagtggaacaacgcgctaagtaggggaactaccccacccattgatcattag

SEQ ID NO: 135257 - DNA, 474 bp, Enterobacter cloacae
atgccgctcggcgcgcgcggctttctcacgctccaggcgcgcctgtcgggcctcgaatcgggctttggcttccgcagcgcgctgctcttcctgacgaatcgccgcgatctcggccttttcctgacggaagtactgcaccagcggaatattacttggacatacccacgcgcaggcgccgcactcgatgcagtccgccagattatgggcagtggctttatcgtgttgctgacctttgctgaaccagtacagctgctgcggcagcagatcggccgggcaggcgtcagcgcaggcgctgcagcgaatgcagcctttctcttcctgcggttcgcccatctcgctggcggaaggcgccagcaaacagttggtgatcttcaccaccgggacgtcgagccacggcagggtaaagcccatcagcgggccgcccatgatcaccattggctcggcgctggggcagaagccggcatcgttcaatag

SEQ ID NO: 135258 - DNA, 597 bp, Enterobacter cloacae
atgagcgaggatgcggataccctcgacaatctgcgccgcgcagtcctgcatcaggcggtcatccgccgtgatatagggctcgcactcggcggcgttaatgatcagcgttttaattttatctccgccaccgcgcagtttactgccggtggggaagcctgcgccgccgaggccagcaacgccaaactggtggatacgctcgatcagcgcttcacgcgtgcgggtctgatagtcgctccagccatcgcgctcgatccagcggtcttcgccgtcggcgtcaatgatcacgctcatctccgccagcgccgacgggtgcgcggtagtgtgcggagcgatggcggcaatggtgccggaagtcggggcgtgaacgggcagcattcttccccagccgcgggtcagcggctggccgcgcagcacccggtcgcccactttaacgcacagttcgccctcggcgccaatgtgctgcttcaacgggataacaaagcgctgcggcagggaaacctgacgcagcggggtgccgttagactgggttttcatttcaggcgggtgaataccgccgttgaaatcccagaccttgtcttttcggaaagcggaaaatag

SEQ ID NO: 135259 - DNA, 579 bp, Enterobacter cloacae
atgagcgcagtctggatagccgtgatcgccatcagcctgttagggctgattttcggcttaatactgggatacgcctcgcgtcgtttcgcggtgcaggacgacccggtggtggaaaaaattgatgagctattgccgcagagccagtgtgggcagtgcgggtaccctgggtgtcgcccctatgcggaagcagtcggcgtacagggtgagaaaataaaccgctgcgcgccgggtggcgaagcggtgatgttaaaaatcgccgccttgctgaacgtcgacccgcagcctgtcgacggcgatgcacaggaagcggagccggcccgcatgctcgcggtaattgacgagccgaactgcattggctgtaccaagtgtatccaggcctgtccggtggatgccatcgttggggcgacccgcgccatgcataccgtgatgagcgacctgtgcactggctgcaatttgtgcgtcgccccctgcccgacccagtgcatttcactcgttccggtggccaccaccccggaaacctggaaatgggatctgcatacgatcccggtgcgaaatattcctgtggaacaacatgtttaa

SEQ ID NO: 135260 - DNA, 582 bp, Enterobacter cloacae
atggctgattatttactgctctttattggtacagtcctggtcaataacttcgttctggtgaagtttcttggtctgtgcccgtttatgggggtttccaaaaagctggaaaccgcaatggggatggggctcgctaccaccttcgtgatgaccctggcctctatttgcgcctggctgattgatacctggatccttatcccgctaaatttggtttatttgcgtaccctggcctttattctggttatcgccgtggtggttcagtttactgagatggtggtgcgtaaaaccagcccggcgctctatcgcctgctggggatctttctaccgctgatcaccaccaactgtgccgtactcggggtagcgctgctgaatattaatctgggccacaatttcctgcagtcggcgctgtacggctttgccgccgccgtcggcttctcgctggtaatggtgctgttcgcggcgatccgtgaacgcctggtggtggccgatgtccccgcgccgtttcgcggtaatgccatcgcgctgattaccgccggtttaatgtctctggccttcatgggctttagtggtttggtgaagttgtaa

SEQ ID NO: 135261 - DNA, 441 bp, Enterobacter cloacae
atgacgtctcaatctgcagagcgcatcggcggatggctgctggctccgctggcctggttgctggtggcgctgctgagcgcctcgttatcgctgctgttttttgccaatgcgctgatgtcgccgcagacctataccctactgcgcgccatgagcgcgggccatatggcgctgtgggtcgcctcgctgctgtttgccctcgccatgtggtattacacgctctggctgactatcgcctttttcaagcggcgctcggtggtgccgaaacactatattatctggctgctcatcaccctgctgctggcgataaaggcttttgccttctcgccggtctcggatgtgcttgccctgcgtcagctgctgtttccgctgctggccgctgcgctgctggcgccctattttcgccgttcgcagcgggtaaaacggacttttgttaatccgtaa

SEQ ID NO: 135262 - DNA, 1371 bp, Enterobacter cloacae
atggccgcttttccgcacaatttcttatggggtgccgctaccgcagcgtatcaggttgagggaggacacgacgccgacggtaaaggaccgtcaatctgggatatctactctcatctgccgggtaccacctttgaaggcaccaccggcgatattgccgtcgaccactatcaccgttttcgcgaagacgtggcgttaatggccgaaatgggcctgcaaagctatcgattctccatctcctggccccgcctgctgcccgccgggcgcggtaaggtgaatgaagcgggagtccagttttacagcgatctgatcgacgaactgctggcgcacaatattgagccgatgatcaccctctatcactgggatctgccgcaggccctgcaggatgagggcggctgggaagcgcgcactaccgccgaggccttcgccgagtacgcccgcctgtgctatgcgcgctttggttcacgggtgaagctgtgggctaccttcaacgaaaccattgtcttcattgggcacggctacattaacggcctccatcccccggcggtccgcgatccggcgcgcgccattcaggcctgccaccacgtatttatcgcccatgcgctggcggtgaaggcctttcgcgagatggctgtggccggcgagattggcttcgtcaacgtactgcaaccgcataccccgctcaccgacagcgaggcggacattaaggccaccgaactggctgacgccatccatactcactggctgtacgatccggtgctgaaaggcacctatcctgccgacctgctggcgcagacccaggcgctgtggggggtacctcgctttgctccaggcgacgacgcgctgctccgtgacaaccgctgcgactttatcggtctgaattactatcgccgggaaacggtatctgcccagccgcctgagatcgctaccggcggcgagcctggcgtggagggattattctatttcgtgcgtaatccccagagtacatataccgaatggggctgggaaatctggccgcaggggctaactgacggcattatgatgattaaggcgcgctatggcgatattccgatatatatcaccgagaatggcctcggcgcgaaggacccgattattgacggggaagtggtcgacgacccgcggattgattatctcagcagccatattggcgccctcgaaaaagcgctggcgctgggggcagatgtgcgcggctattacccctggtcatttatcgatctgctgagctggctcaacggctatcaaaagcaatatggttttgtctatgtcgatcaccagcaaaatctggcgcggaaacgaaagaagagtttttattggtacaaatctgttattgccagtcacggcgaacagcgttaa

SEQ ID NO: 135263 - DNA, 138 bp, Enterobacter cloacae
atgacaactgtttttacccgtattgtagaacttattggctggattgtttttggtatttcggcactgcttttggttatcgcacaccatatagataactatcagtccccaccgccagcggatgtggtgcacacgaagtag

SEQ ID NO: 135264 - DNA, 1041 bp, Enterobacter cloacae
atgagcgatgcgatccgggtggggctggtggggttcggttacgccagcaaaacgtttcatgcgccgttgatcggcggcacgccgggtatggcgctgaaggcggtcgccagcagcgacgccgataaggtccatgccgattggcctggcgtgaaggtaatgagtgcgccgggggatctgctggacgacccggatatcgatctggtggtcatcgccaccccgaacgacacccgctttccgctggcgaaagcggcgctggaggcgggaaagcatgttgtggtggataagccatttaccgtgacactgtcacaagctcgcgagctggaaagcctggcgaagcactgcggtcggatactttcggtgtttcataaccggcgctgggacagcgatttcttaacggtcagcgcgttgatcaacgaaggtcagctgggggaggtgtgttacttcgagtcgcatttcgatcgcttccgaccacaggtgcgccagcgctggcgtgagcaggcgggtcctggcagcggcatatggtatgacctcgcgccgcatctgctcgaccaggtcgtggtgctgtttggcctgccggtaagcatcacggtggacctcgcgcagcttcggcccggcgcgcaatccaccgactattttcacgccgtgctggcctatccgcagcggcgggtagtactgcatggtacgttactcgccgccgcggagagcgcgcgctttatcgttcacggctcgcgggccagctatattaagtacggttttgacccgcaggaggagcggctaaaaaacggtgaacggctgccgcaggaggactggggatatgatatgcgcgacggtaccctgacccgcgccgaaggggatgaacgtagtcaggagaaatggctgacgctaccgggtaattatcccgcctactatgccgctatccgcgacgcgcttaacggcgtaggggaaaacccggtcccggccagcgaggcgattcagataatgaccctgattgagttgggtatcgagtcggccagacatcgcgccacgctcagcctggtctga

SEQ ID NO: 135265 - DNA, 1002 bp, Enterobacter cloacae
atgattgattcctcattgccattaaccgacattcatcgtcatcttgacggtaacatccgggcccaaaccatcctcgatcttggccgcgaatttaatatcgctcttcccgcaaccaccctcgacacgctgcgtcctcatgtccaggtcaccagccttgagcccgatctggttagtttcctcgccaagctcgactggggggtaaaggtcctggcctcgctggaagcctgtcgccgcgtggcgtatgagaacgtcgaagacgcggcacgaaatggcctgcactacgttgagctgcgcttctctccccgctatatggcgatgacccaccggctgccggtcgacggcgtggtagaggcggtaattgccggggttcaagagggatgccgcgatttccaggtcgacgcccggctgatcggtattctgagccgcaccttcggcgaagccgcctgtcaggaagagctggcggcgctgctcgcccaccgcgagggcatcactgccctcgacctcgccggcgatgagctaggcttcccgggtacgttgttccgcaaccattttaaccaggcccgcgacgccgggtggcatatcaccgtccacgcgggcgaagcggccggcccggaaagtatctggcaggccattcgtgagctgggcgcggagcgcatcggccatggggttaaagcggtagaggatccagccctgatggactacctggccgagcaccgcatcgggattgaatcctgcctaacctcgaacgtgcaaaccagcaccgtggcctccctggcccagcatccgctgaagcagttccttgagcacggcgtgctggcgagcctcaacaccgacgatccggcggtccagggtgtggacatcattcacgagtataccgtggcggcgccggcggcagggctgagccgggagcagatccgtcaagcgcagatcaacggcctgaccctggcgttcctcggcgaacaggaaaaagccgccctcattcagcgggttgccaaaggctga

SEQ ID NO: 135266 - DNA, 1218 bp, Enterobacter cloacae
atgaaatgtaaggcaagtagatgtaccggccaaaggatccaaactgcgtcagtccctgacacgatgctgaccacagggataacggcgttgttttcactaacctgcgcgctggcagtagccaatgtttattcagcacagcctttactcgactcgatggcggtcagcctgaaggtgtcgccaggcatgattggcagcgtcatcaccgctacgcaggcgggctatgccattggcctgctgttcctggttccgctcggggactggttgaaccgtaaatacgtggtgatgagtcaactgttgctttcagtagcggcgttagtcgcggcagggttatcccccaatatagcaacgctgcttggcgccatgctgatcgtcggcctgatggccgtggtggtgcaggtgctggtggcctgggtggcaatactggcgacgccgcagaaacgaggccaggcggtgggtaccctgaccagcggcattgtttcaggtatcctgttatctcggtttatctcaggcgcgatagccgatatcgccggctggcgagccgtgtatctcacggctgcctgtctgatgttgatgattgccgggatcgtctggaaaatcatgccttcgcccccgcagcagccgcagccgcaaaagcccacttacctttccttattgaagtccgtgtttcagctgtacctcaccgagccgcaactgagaaagcgcgggatcctggcgctatttatcttcgccgctttcagcatgctatggacgaccatggtcatgccgctcaccgccctttccctctcgcacacccagacggggatgtttggcttagccggcttcgctggcatgctggccgccgccagagcgggcaagtgggctgaccagggatgggctcagcgcactaccggcctggcgctggcgctgctgaccatctcatggcttcctatcggctatgccgaaacctctctgctttggctgatagctggcgtcattgcgctggactttgcggtacaggccgttcatgtctccagccagagcctgatcattgccgccaggcctgcagcggcaagccgcctggttggggcttacatgtgtttttattcgctgggcagcgcgacaggggctatcgttgccacacagctttattcccactggggatggcaggcggtctgccttgcgggcgccgcggtcagcgcgtgtgcatttctgatctggtcaggatcgcgtcaatcatga

SEQ ID NO: 135267 - DNA, 465 bp, Enterobacter cloacae
atggcaaagcaggaatcacttagaaccagtgaatgtccggtggcgagaacgttggaatcaattggtgaacgctggtgcctgatgattatccgcgaagcatttgacgatgtgcggagattcagcgagtttcaaaaaaatttggggctggccaaaaatatccttgcctcgcggctgaagcatctggttgatatcggtattttcgagattttaccggcatcggatggcagcgcatacaaggaatatgtcctgactgaaaaggggcgctccgtgtttccaatagttgtggcgctgcggcaatggggagagcgttatatgtttgagcaaggggaaacctattcggtcctgctggataacgcgcacggccagccccttccgtatctggatgtgcgttccgctcagggggataaactgcaaccaggcgactgtcatcgccggcgcattgtgtcagatacccgcgccgaataa

SEQ ID NO: 135268 - DNA, 186 bp, Enterobacter cloacae
gtggagagcgtaatccataacaatattgagggttttctgctgttgttattaagcatgtggccgattctgctggtggtattcattggtgtcgcaatttcattctataccatgctgttacgtaagacggcgctggcctgcctgcttttcgccctcgccatcggcgccgcaggctggagtctcgcttag

SEQ ID NO: 135269 - DNA, 339 bp, Enterobacter cloacae
  misc_feature (276)..(285): n is a, c, g, or t
atgaaggaaatcggcttaccgttattgctactgaccgcgctggccagtccggcttttgctgcagactgtcagccaaacggcattggcggctctttttgcattaacgatgacggtacgactaccgacacggtgcctaacgaagtcaacggcatggatacgtactcgaataatggcggctataccagttccctgcccgatcggtcaggggcggatgaagcactggaaggttcatcgctgtcgacgcagcaaggcgtcggcagcggacagagcgacagnnnnnnnnnngagcgacagtgcgctggcaggtcgcgactggcattcgcccgccaatctgaatga

SEQ ID NO: 135270 - DNA, 528 bp, Enterobacter cloacae
atgcgcgataaatattccggcctgcagattgggattcactggctggtttttttgctggtagtagtagcctatgcggcgatggagctgcgcgggtttttcccccgcagtgagcggccattgattaatatggtgcatgtttcctgcgggatcaccattttcgtgctgatggtggcgcgtctgctggtgcggctgaaatcgccggcgccgccgatcgtaccgaaaccatcgccgatgatgaccggtttcgcccatcttggtcacctggcgatctatttgctgttcattgccttgccgttgatcggcatggtgatgatgtactggcgcggtaacccctggtatgcctttggtctgaccatgccgtatgccccgcagagcgattttgagcgggtggataccctgaaggcgatccatgaatggttggccaatgccgggtactttgtgattggcctgcatgctctcgccgcgctgctccatcattactggtggaaggataatactctgctgcgaatgatgcctcgtaagcgctaa

SEQ ID NO: 135271 - DNA, 276 bp, Enterobacter cloacae
gtgccacattcacctgaagataaaaaacgggcgctcagccgcgtaagacgcatccgcggccaggtcgaagcccttgagcgcgcgctggagtccggcgagccctgtatgactattctgcagcagatcgcctcgattcgcggggcggcgaacggcctgatgggcgaaatggtggagatccacctgcaggacgagctggtcagcggcgacaccacccctgagcagcgggccgcgagaatggcagaggtcggtcatctgctacgatcctatttaaaataa

SEQ ID NO: 135272 - DNA, 1119 bp, Enterobacter cloacae
atgaaatcacgcgcagcagtggccttcggccccggtcagccgttaaaaatcgttgagattgacgtcgcgccgccgaaaaaaggcgaagttctggtgaaaatcacccacaccggggtgtgtcataccgatgccttcaccctctccggtgacgatccggaaggtgtcttcccggcggtgctgggccatgagggcggcgggattgtcgtggaagtaggcgagggcgtcaccagccttaagccgggcgatcacgtcattccgctgtataccgccgaatgtggcgagtgcaaattctgtaagtcgggtaaaaccaacctctgtcaggcggtgcgtgccacccagggtaaaggactgatgccggacggcaccactcgtttctcgtacaatggcgaaccgatctatcactatatgggcaccagcaccttcagcgaatatacggtttgcgccgagatttcgctggcgaaagtcaatccgcaggcgcctttggataaagtgtgcctgctgggctgcggcgtaaccaccggtatcggcgcggtgcataacacggcgaaggtcaaggccggggataccgtcgcggtctttggtctgggcggcattggtctggcggtgatccagggcgcggtgcaggcgcaggccgggcgcattctggcggttgataccaacccggataaattcactctcgctaaagagatgggcgcgaccgattttatcaatccgaacgactacgataagccgattcaggatgtgatcgttgagctgaccgacggcggggtggatttcagcttcgagtgcatcggcaatgtaaatgtgatgcgcgcggcgctggagtgctgccataaaggctggggtgagagcgtgatcatcggtgtagccggcgccgggcaggagatcaagacccgtccgttccagctggtgaccggccgcgtgtggcgcggttccgccttcggcggcgtaaaagggcgcagtcagctgccgggcatggtggaagacgccatggcgggtaaaattcgcctcgatccgtttattacccatcgcctgccgctggagcagattaacgaggcctttgatctgatgcatgaaggtaaatcgattcgcaccgtgatccactttggcgaccagtaa

SEQ ID NO: 135273 - DNA, 2373 bp, Enterobacter cloacae
atggcaactggcaacgcgccgcgcggattcccccggatcctgcagtggcttctcgccggactgatgctcatcatcggtctggctgtgggtattcttggggcaaaactggccctcgtcggcggaacactgtacttcgcgctgatgggcgtggtcatggtcatcgcggcggtgttgattttccgcaaccgccgcggcggtattctgttatacgccgtggcgtttatcgcctcggtgatctgggcgattagtgacgctggctggaactactggccgctcttctcgcgcctgtttgcgctcggcgtactggccttcctggccgccctggtctggcctttcctcgccagcccaccggcgaaaaaaggcccggcctatggcgtcgccgccgttctcgccgtggcgctggcggtgagctttggctggatgttcaaatccgcaccgctggtcagcgcgactgaagcggtaccagtcaagcccgtcgcgccaggcgaacagcagaaaaactgggcgcactggggtaacaccacccacggcgaccgtttcgccgccctcgaccaaatcaacaaacaaaacgtcaaccagctgcaggttgcctgggtagcgcatactggcgatatcccgcagagcaatggctccggcgcagaagatcagaacaccccgctgcagattggcgatactctctacgtctgtaccccttacagtaaagtgctggcgctggatgtggacagcggaaaagagaaatggcgctatgactccaaatcctcttcacccaactggcagcgctgccgcggcttagggtattacgcagatagccaggcgcaaaccgcgccagcgccaggcacgcagccggccgcctgttcccgtcgtctgttcctgccgaccatcgacgcccgcctgatcgccattgatgccgataccggcaaactgtgcgaaaacttcggcgatggcggtattgtcgacctcagcgtcggcatgggtgaagtgaaagcgggttactatcagcagacctccaccccgctggtggcgggcaatgtggtggtggtgggcggccgcgtcgcggataactactccactggcgaaccgccgggcgtggtccgcgcgtttgatgtccacaccggcaaactggcgtgggcgtgggatccgggcaatccagcgctgaccggtgttccgccggaaggtcagacctacacgcgcggtacgccaaacgtctggtcggcgatgtcctacgacgcgaagctgaatctgatctatctgcccaccggcaacgccacgccagatttctttggcggcgaacgtaccgcgctggacgataaatacagctcctctatcgtggctgtggatgccaccaccggccaggtgcgctggcacttccagaccacacaccacgatctgtgggactttgacctgccgtctcagccgctgctgtacgatctgcctgacggcaagggcggcaccaccccggtgctggtgcagaccagcaagcagggcatgatctttatgctcaaccgcgagaccggcgagccggtggccaaagtggaagagcgtccggtgccggcgggcaacgtcaaaggtgaacgctactcgccgacgcaaccttactcggtagggatgccgatgatcggcaaccagacgttgaccgagtccgatatgtggggagcgacaccgatcgacctgctgctgtgccgtattcagttcaaagagatgcgccatcagggcgtctttaccccgccaggtgaagaccgttccctgcagttcccgggctcgctcggcggcatgaactggggcagtgtttcgctggatccaaacaacagcctgatgtttgtcaacgatatgcgtctgggcctggccaactatatggtgccgcgcgcgaaggtggcgaaagacgccagcgggatcgagatgggcatcgtgccgatggaaggcacgccgtttggcgcgatgcgcgaacgtttcctgtcgccgctgggcattccgtgccagaagccgccgttcggcaccatgtccgcggtagatctgaaaaccgggaaactggtgtggcaggtgccggttggcaccgtagaagacaccgggccgctggggatccgtatgcacatgccaattccaatcggcatgccgacccttggcgcatcgctggcaacgcagtccggactgctgttcttcgccggcacccaggatttctacctgcgcgcctttgataccgcgaacggcaaagagatctggaaatcgcgtctgccggtcggcagccagtccggcccgatgacctacgtctcaccgaaaaccggtaagcagtacatcattatcaatgccggcggcgcccgccagtcaccggatcgcggcgattacatcatcgcctacgcgctcccagaccatcactga

SEQ ID NO: 135274 - DNA, 924 bp, Enterobacter cloacae
atggaaaaaaatggtctcttcagtcagcgcattcgcttgcgccatctacacaccttcgtggccgtcgctcaacagggaacgctggggcgcgcggctgaaacattaaatctgagccagccagcactctcgaaaacgcttaacgaactagaacagctgaccggtacccggctgttcgagcggggtcgtcttggggcgcagctaaccctggtcggcgaacagtttctgacgcatgccgttaaggtgcttgacgcccttaattcggccggccaggcgctgaaccgcaaagagggcctgaataacgacatcgtgcgcatcggcgcgctgcccaccgccgcgctggggatcctgccgacggtgatcggccagtttcacaagcagcaaaaagatatcacgctgcaggtcgccactatgaacaacaccatgctgcttgccggcttaaaatccggggagatcgacatcggcattggacgtatgtccgacccggagctgatgagcgggctgcattacgaactgttgttccttgaatccctgaagctggtggttcgcccgggacatcctctgcttcaggagacggtgacccttagtcgggtgatggagtggccggtggtggtctcacccaaaggcaccgtgccgcggcaaaacgccgaagcgctgctccagagccagggctgtaagatgcccgccggctgcatcgagaccctttccgcctccctgtcgcgccagctgacggtggattttgactatgtctggtttgtcccttccggggcggtaaaagacgatcttcgccgtggcgtgctaaccgccctgccgatcgccacccagggcgccggagagcccatcggcattttaacccgcgtcgatgcgacactgactccgggtacgcagacgctgctcagcgctatccgtaagtccatgcctgcctga

SEQ ID NO: 135275 - DNA, 621 bp, Enterobacter cloacae
atgaaagagtatctgcctgaaaccgcctcgcagacggcgggaccctatgttcatatcggcctggcgccggacgccgcaggctttcatatttttgagaaaaattttggcccggtcctcactaccgccgataccgtcggggagcgcatcaccattgaaggccgggttatcgacggctccgggacgccggtccgcgatgtgctgctggagatctggcaggccaacgccgcgggtcgctataaccatcctgacgatcgtcaacagcagaaagccgtcgacccggccttccgcggctgggggcgtacctgctctgatttcacctccggcatttggcgctttgaaaccatcaagccgggcccggtggtcggtcgcgatggccggctgatggcgccgcacgtcaacctgtgggtggtggcgcgggggatcaatattggcctgaatacgcggatgtactttgccgatgaacacgaggccaacgccagcgacccggtgctgaatctcatcgagtgggaggtgagacgcaaaaccttaatcgccgagcgcgaggttcgcggtacggaagtggtctatcgttttgacattcatctgcagggcgagaacgaaaccgtctttttcgatatttag

SEQ ID NO: 135276 - DNA, 741 bp, Enterobacter cloacae
atgaacgacaaatggtccccacgtgaggttgtccatcgcgattacagtagccacccgcccgcttacgcgccgggctataaaaccagcgtcctgcgctcgccaaaaaacgccctcatctctctgcagaactcgctgtcagagatcaccggcccggtatttagccgcgacgacctcggccctctggataatgacctaatcctgaactatgccaaagaaggcctgccgatcggcgagcggatcatcgtccacggttacgtgcgcgatggattcggccgaccgatgaaaaatacgctggtggaagtctggcaagccaatgctggcggtcgctaccggcataaaaaagatcagtatctggcgccgattgacccgaactttggcggctgcggccgggtgcttaccgatgaaaacggctattactgttttcgcaccatcaaacccggcccctacccctggcgcaaccaggccagcgactggcgtccggcgcatatccatttttctctctcgggcgacgcctgggcccagcgcctgatcacccagatgtattttgaaggcgacccgctgattaagcagtgcccgatcgtcaggactattaagaatgacgacgccgtgcgcacgctgatcgccgagctggacctgcacgccgccgtaccgctggattgtctggcctaccgcttcgaccttgttctgcgcggccaccgcgccacgctgtttgaaaatcgcactcagggggccgcccgatga

SEQ ID NO: 135277 - DNA, 1344 bp, Enterobacter cloacae
atggcgaacaccatcacggctgatgagattcgggagcacttttcgcaggccatgtcggccatgtaccagcaggaagttccgcagtacggaacgctgctggagctggtggctgacgtcaacctggcggtactggaaaataatccgcagctgcatgaacagctcgctaacgctgacgagctggcgcgcttaaacgtggagcgccacggcgcgattcgcgtgggcacagcggaagaactggcgacgctccgtcgcatgtttgccatcatggggatgtatcccgttagctattacgatctctcgcaggccggcgtgccggtccactccacggcgtttcgtcccatcgacgatgccgcgctggcgcgcaatccatttcggattttcacctcgctgctgcgcctggagctgattgaaaatcgcgccctgcgcgagcgggccgaggcgatcctcgcgcggcgcaaaatcttcaccccccgctgcctggcgctgattgcgcagtatgaagcagagggcgaattcacctctgccgacgcgcgcgagtttgtccaggaggcgctggagacgttccgctggcaccggcaagccaccgtcgatgaggagacttaccatgctctgcatcgcgagcaccgcctgattgccgatgtggtctgtttcccggggtgtcatatcaaccatctcacgccgcggacgctggatattgaccgcgtccagtccctgatgccggagtgcggtattgaacccaaagcgttgattgaagggccaccgcgccgggaggtcccgatcctcctgcggcagaccagctttaaggcgcttgaggagccggtgatgttcgccggagaacaccgaggcacccatagcgcccgctttggcgaaattgagcagcggggcgtggcgctgacgccgaaagggcgcgcgctatacgatcggctgctgcaggcggcaggaaccgggaaagacaatctcagccaccagcagcatctacaggaggtgtttagcgaatttcccgacagcgaatttctgctccgtcagcaggggctggcctggtttcgctaccgcctgacgcccacgggtgaggcacatcgccaggcgtttcgcccgggcgacgatccgcagccgctgattgagcgcgggtgggtggtcgcccagccgattatttatgaagactttttaccggtcagcgcggcgggcatttttcagtccaatctgggcaacgagacccaggcgcgcagccacgggaacgccagtcgcgaggcgtttgaggcagctctgggctgcccggtgcaggatgagtttgaactataccgacaggcggaggagcgcagcaaacgacgttgcggtctgctgtaa

SEQ ID NO: 135278 - DNA, 1500 bp, Enterobacter cloacae
atgcaacatccgtcgaaaccgttggcgaaaacccgtcagggaacgcttgccgggagcgcagaacaggggattcatatctggcgcggcattccgtacgccgcgccgcccgtgggcccgctgcgctggcgcgcgcctcagccagccgcccgctggcagggggtacgtccagccgagaccttttccgccgccagctggcaggacattgactactgccgcgagctcggcggcggcgatcctggcgccttcagcgaagactgcttatatctcaacgtctgggccccggccagcgcagcgcagccgctgccggtgatggtctggctgcacggcggcgggtttaccatcggcgccggcagcctgccgccttacgatggcaaagcgcttgccagccgcgacgtggtggtggtgacagttaactaccggctgggccatctcggttttttcgcccatccggcgctggaagaagaggcgggcgaacgtctctataatttcgcgttgctcgatcagattgccgctctgcagtgggttcaggagaatatccacgccttcggcggggatgccgccaacgtcacgctgtttggcgaatccgccggggcgcgcagcgtgctgtcgctaatggcctccccgaaagcgaaagggctgtttcataaagcgattattcagagcgggtatacgctacccgatctgccgcgggaaaaagcactggaaaaagggcgccagctggcggaacacttcgccttaccgcaagccagcgctgaggaattgcgggcgatcccggcggaggccttctggtcgctcaccgcgcctctgaataccgggccagcgcctattgtcggagacgcggtgctgccgcagccgatgctggagaccttctttgccggccgccagcatccgataccggtgatgatcggctccaatagcgatgaagctagcgtgatggccgtgttcggcgtcgatattgccgggcagatccagaagctgcgccgtgagcgccgtctggggctgatcaaactcctctatcccggcgtgaagggcgatgaagcgctggggcgggaagtatgccgcgacatggccttcaccacccttggttatgtagtgatgcaggcgcaacagcgcgtgggtcagccgtgctggcgctactggtttgattatgtcgcggaagcggagcatgacgcctacccgcatggggcctggcatggcaacgaggtgccctacgtgtttgataacctgcggttgaccgacccggtgcggcagtacgccagcgaagcggatctggccttcgccgctcaggtcgctgactactgggcgcagtttgcccgcctcgccagcggcgagcagacgctttccggcgcggtgcgctggccggcgtgcctgcgcgggcgggatcgcctgttgcgcattggcttgcataagcgcgccgggtttaaagtggagaaccgctttatgcgcgccagactggcgctgtttcgccgggtgatgaagcatcacgtgacgctggaataa

SEQ ID NO: 135279 - DNA, 1089 bp, Enterobacter cloacae
atgcaagtgaaagcagccgtcacgctgggctaccagcagccttttgtcatcaaagacgtcgaggtcgccccgccggggaagggcgagatattagtgaaaattgtcgccaccggcgtctgccataccgacgccgtgatgcgcgacaaccccggggtggtgcctatgccggcgatcctcggccatgaaggcgccgggatcgttgccagcgtcggcgaggcggttagcggcatcagggtaggagaccacgtagtgctcagctacgccgcctgccaccactgcgaaaattgtttaagcaaccacccttcggcttgcgaagattttaatacgcttaattttggcggccgacgcgaggatggcaccaccccctaccggctgggagaccaggatctgtccctgttctttggccagtcgtctttcagccagtatgtggtcacccgcgccagcaacgcggtcgtggtcgacccggacgttgatctcaccctgctcggcccgctgggctgcggtatccagaccggtagcgggacggtgctcaaccgcctgaaaccggtggtcggcgaatcgctggtggtgtttggctgcggcgcggtggggctgagcgccatcatggcagcgaaattaaccggctgttcgcagattatcgcggtggatatccatgccagccgcctcgccctggcgggcgaactgggcgccacccatcagatcaacggcaaggaacaggatgccgtcgccgtgattaaacaaatcaccggtaaaggcgcccactacgcggtggaaacgaccggcgtctccgctatcgttctgcaggccgtacacgcggtgaaaccgctgggaacggtggcgattgtgggctttaccggagatatcacccttaacgtgcagaacgacctgatggcggagggaaaatcgctggtcggggtgattgaaggcgacgccgtgccggcgctgtttattccgctgttggtgcaactctataaacagggaaaattccctatcgataagcttatcgcccgctatccgttggccgatatcaaccaggccttcgccgactcggcgtccggcaaggtgatcaagccggtggtggtcatgtga

SEQ ID NO: 135280 - DNA, 1845 bp, Enterobacter cloacae
atgccctggctacacgccagaggaaatgaaaaaaacaggctgttcctctggacagggcttttttaccttttttctgctggcaacaattggattattaatcgtttttgtctagagtgggcggaaattatcacgcagcgtgatgacgcgttgcgaatcaattcacccgtgcagaaggacgctttctcaggcatgaaccgcagacgttttcttaaatcttccatggctgttgccgccgtatgcggaacgtcaggagtcgcttccttattcagtcaggccgcttttgccgaagacgcgggcattgccgacgggcaaacgcgtcgttttgattatgctgttctgcaggcgatggctcacgatctggcgcgccagccgtggggcggcgccccgcgcgatctgccgccgacgctcgccaatctcaccccgcaggcctataacagcatccagtacgatgccaaccactcgctgtggaacaatattgaagagcgtaagctggacatccagtttttccacgtcgggatggggttccgtcgccgcgtgcggatgttctctttagacgccagcacccagcaggcgcgcgagatccacttccgtccggagctgtttaagtacaatgacgccggtgtggatacccgtcagctggaaggacagtctgacctcggcttcgccgggttccgggtgtttaaagcgccggagctggcgcgccgcgatatcgtggcgttcctcggcgccagctacttccgcgcggtagacagcacctatcagtatggcctgtcggcccgcggtctggcggtggatacctttaccgataccccggaagagtttcccgactttacgtcgttctggttcgaaacggtcaaaggggacgccacggtgtttaccgtttacgcgctgctggacagcccgagcatcactggcgcctacaagttcaccatccactgccaggatacccaggttatcatggacgtggaaaaccacctgtacgcccgcaaggatatcaaacagctgggtatcgcgccgatgaccagtatgttcagctgcggcaataatgagcggcggatgtgcgacaccatccatccgcaaatccacgactccgatcggctgtcaatgtggttgggcaacggggaatgggtctgccggccgctgaataacccgcagaagctgcagttcaatgccttccaggacaagaacccgcgcggctttggtctgttgcagctggaccgtgatttctcccactaccaggatgtgatgggctggtataacaagcgtcccagcctgtgggttgagccgcgtaaccagtggggcaaaggggcggtcagcctgatggagatcccaactaccggcgaaacgctggataatatcgtctgcttctggcagccggaaaaggcggtgaaggcgggcgacgaactggacttccgctaccgtctttactggagcgcgcagccgccggttagcaccccgctggcgcgcgttctggccacccgcaccgggatggggggcttccccgaaggatgggcgccgggtgaacactacccggataagtgggcgcgtcgttttgccatcgactttgtcggcggcgatttgaaggcggccgcgccgcgcggtattgaaccggtgatcaccctctccagcggggaagcgaagcagattgagatcctctacgtcgagccgttcgatggctaccggatccttttcgactggtatccgaccaccgactcaaccgacccggtggagatgcgtctgttcctgcgctgtcagggagaagccatcagcgaaacctggctctatcagtatttcccgccggcagcagataaacgcaactacgttgacgaccggatcatgaaataa

SEQ ID NO: 135281 - DNA, 579 bp, Enterobacter cloacae
atgaccgcagatatcccagcagtacctgagtcgatcccggtaaccgacgcgctgacgctaatcgccattgatgagcgctacgttagcgacctgcaccagctggtggtcaaaaaccagcgctggctacagcagtcgctcagttggcccgccgaggtgcgcagcgaagacgagacccgccgccatgtgcagggtaacgtgatgctgcatcagcgggattacgccaaaatgtttttgctgtttctcgataagcagctagtcggggtcctgtcgttcaatcagatcgagccgcagaataaaacggcctatattggctactggatcgatgaagagcaccaggggcaagggctgctttcccgttcattacaggcctttatccgccattatgccgccagcgggctggtgcgccggtttgtgatcaaatgccgggtggcgaacacccgcagcaaccaggtagcgttgcgcaacgggtttgttctggaaggctgtctccgacaagccgagtatctgaacggtagctatgacgatcagaatatctacgcccgcattattgaccgcgatgaggcattaaagcgcgcctaa

SEQ ID NO: 135282 - DNA, 981 bp, Enterobacter cloacae
atgcgtaaataccgtctcagcgaacagacccggcagtattgttatgaggaagagcatggcaaacaaagcgtcaccctgcgccagatcgtggcgcttattgatttcgctgacgttaaagcgggcagcgaaggcggctgggtggatgaggaatgcgctctcagccagcagggggagtgctggatctacgatgtcaacagcgtggtcttcgccggggcgcgcatccgcgacgacgcccgcttaaccgggttctgcgtggtcagccatgaggccaccatcggcggacaggcctgcattcacgcctcgcagatcagccatcacgcgcagatcagtgacaacgtcacggttacgcagagccaggtgcgcggttattgtcgccttgccgacgaggcgcgtcttctcccccactgccaggtgattgccgcgcgcgggttaaccgccgatcgcgacaaagtcctgcagatctatcagcgagccaccgtcagcgcctcgcgcattctccaccaggcgcaaatctacggcgatgccttcgttgagcatgcgtttgtcgaacatcgggcggaagtgtttgaccaggcaagacttgaagggaacgaagaaaacgacgtctgggtgtgcgataacgcccgggtatacgggaacgcgcgcctgatcgccggtcatggagaggatgccattcccaccgtacgctacagttcgcaggtggcagagaatgcggtgattgaaggcaactgcctgctgaagcatcgggcgatggtcggcggcgaggcgcagctgcgaggtggtccgattctgctcgacgacgatgtgctgatccaggggcggacagtcatcaccggcgatgtgatcgttgagcaccaggtctccatcaatgacgaggtgcagattgccgcacaggagggagaggccattcatctgcgcggcccgaaaacgcttgacggccagcagcacatcacccgcacgccgctgttaggcgcgctttaa

SEQ ID NO: 135283 - DNA, 1005 bp, Enterobacter cloacae
atgaataaaacgcaaacgccgcggcaggtgctaaacctgccggcgggttattttggcatggtgctcggcaccatcggaatgggcttcgcctggcgttacgccagcaccctctggccggtcagccgcagcattggtgatgggctggtgacgctggcgatggcgatgtgggtcctgctcagcatggcgtttatcagccgggcgatccgctttccggcgagcgtgctgcgggagatgcgtcatccggtgagcagcagcttcgtcagcctgtttccggccaccacgctgttggtggcgattggtttggctccctggtgccggccgctggcgatcgggctgtttgtgccgggcgtggcgctgcagctcgcctatgccgcctggcaaagcggtgggctatggcgggggaaccatcctcgcgaggccaccacgccggggttgtatctgccgacagtagccaataattttatcagcgcgatggcctgcggcgcgctgggattttccgatgccggactggtgttcctcggcgccggggtcttctcctggctgagcctcgagccggcgatcctccagcgtctgcgcagcgcaggcgagctgccgacgccgctgcgcacctcgctggggatccagctggcgcctgcgctggtggcctgcagcgcctggctcagcgtcaacggcggggaggccgataccttcgctaagctgctgtttggttacggcctgctgcagctgctgtttatgctccgtctgatgccctggtatcatcgtcagccgttcaatgcttctttctggagcttttcgttcggcatttccgcgctggccaccaccggtctgcatctcggccaggccaggggagacggcttttttcatcatctggcgatgccgctatttatttttagcaatctggttgtcggcctgctgctgctgcgtacagcgttgctgttggtcagcggaaaactgttgctccaggtcgaccgggaaacactcctgaataagaaggaaggatcatga

SEQ ID NO: 135284 - DNA, 597 bp, Enterobacter cloacae
atgacaaagcgtgacgcggattattttagtcaaaaatacagcctgacccgcacccattccgaggtgctgcatgccgcgacgattgtgccgccggggcgggcgctggatctgggctgcggcaacgggcgtaacagcctttatctggcggcgaacggcttcgcggtgacggcgtgggataaaaatccgatgagcctcaacaatctggaaagtattcgcgccgccgagcgactggataatctgcaaacggcggtgaaagacctcaacagcctgagctttgacggcgagtatgacctgatcctctccaccgtagtgatgatgttcctcgagcctgacaccatcccgggcctgatcgccaatatgcagcgctgcaccgccgccggcggctataacctgattgtggcggcgatggataccgaagactatccctgcaccgtcggcttcccgtttgcctttaaacctgatgagcttcgtgattattaccagggctgggagctgctgaaatacaatgaggacgtcggcgagctgcatcgcaccgacgccaacggcaatcgcatcaaattgcgcttcgccaccctgttggcgcgcaagcctgcctga

SEQ ID NO: 135285 - DNA, 669 bp, Enterobacter cloacae
atgcgtactcgcgttttactgaaagtcgccgctctggcgggaatattggcgttgaccggctgtgcggcgaaagtggcgcaaccggatcagtattcgggcttcttaaaagattattccagtttgaaagaaacgacctctgcctccggcaagccggagctgcgctggatcgatccgaacttcaatccggccaactatgacaatattgtttatcacccggtgacctactatccggtaccgaagccgaccacccaggtaggggagaaggcgctgcaggatattcttaactacaccaacaaagagctgaaacaggctatttccgagcgtaaaccgctggccactaccgccggcaagcgcagcctcatcttccgcggggcgatcaccggggtggactccagcaaagaggggctgcagttctatgaagtgatcccggtcgctatgattgtcgccggcacccaggccgccaccggccatcgtaccatggacaccgatctgtactttgaggcggaggtcattgacgccagcaccaataagccggtcatcaaggtcgttcgtaaaggggaaggcaaaaccctggcgaatgagaatacaccgctgaccgtcgataccctgaagcaggttatcgatgatatggcggtcgacgccgttaaattcgatccctctcagcgttaa

SEQ ID NO: 135286 - DNA, 897 bp, Enterobacter cloacae
gtgaacgcattactctatgcactcgttgtcgtgatctggggtacaacgtggattgcgatttttttacaacagggaccggtggccgcgccggtatcgattttctggcgtttcgccgtagccagcgtcacgatgctggcgattctgctcgtcacacgacgcctgcggccgctgggcgcgaaagatcatctctgctgcctgctgcagggctgctgcgtcttctgctttaatttctggtgtttttataccgccgccgcctggatcaataccggtctggaatcggtgatcttttcgatggcggtactgtttaacgccatcaacagctttctctttttccgccagcagccgccgggccgcttctgggccgccgccgcgctgggtctcgccggtatcgtcatcctgttctgggacgacctgctggccaacggactaaacgcctcgctgctgtgggggatcgggctgagcgccctgggtacctacggtttttcgctcggcaatatgttcagtattcgccaccagcgccgcgggctggaaacgctgaccaccaacagctgggcgatgctctacggcacgctggtgatgggggcgatcgctctgctacgcggcgataactttatgccagaatggaccgtcagctatctgggcgccctgctttacctggcgctgttcggctcggtcatcgcctttggcgcctatttcactctcgttgggcgcatcggcgccagcaaagccgcctacagtacgctgctgtttccgctggtcgccttatccatttccaccgtctatgaagggtatgtctggcacagcagcgccgtgatcgggctggcgctgatcctgctgggtaacctggtaatgtttgccaaaccggaacagctattgctgcgccgaaggctggcctga

SEQ ID NO: 135287 - DNA, 870 bp, Enterobacter cloacae
atgggttacgggacatttgaaacattacggcgacagaacgcggtgctgaagggaaccgtggagctgaattccggtattcaactggccgcctggtataacaattgcgataccgtgacggtgcgcagcgaccatcataccttaagtctgtacgtggctgatggctacgaaagctatcaaaagacgccgcacggctggaaaaatggcggcggcccggaccgtttttgtctgatgccgaaaggcgatgaaagcgtatgggatatccgcggcgatctgtcgtttgtacatctttactgtaccgatgcgcacctgcgtcgcgtcggcgaggaggtgtgggaccgcagcccggcgaatttcaccctacaggaaaagaccttcgccagcgatgataaaatcaccgcagtgtatcgtcagtttttgctcgctaacgactggcggcagccggcgaaccagctgaccctcagcgctgccagcagcttactgcttacccatctgatccagcactattccaccgtgcagtggcgtttgccgacggtcaccggcgggctggcgccaggcgtaaagcgtcacgtactggcctggatcgatgctcatctcgatcagcccttgaccctggccgacctggcgcagcaggcgggtctgagtgagtttcattttgctcgtatgtttcgtcagtcgctaaatatggctccgcatcagtacgtcatgcagcagcgaatggcgaaggcgcaaaatctgatctgccatagcgcgctgccgttaaccgagatagcgctggcctgtggttttagctcccccagccatttcagccatcgggtcaaagccgccaccgggctgacgccctcccagctacgggcggcgcagcgcggatag

SEQ ID NO: 135288 - DNA, 1167 bp, Enterobacter cloacae
atgcgctcgtttagtcttccgcttcccactctgttcgctggcttcgtcgccgtgttggtggggtacgccagttccgccgccatcatctggcaggccgccgccgcggccggcgctacccccgggcagatcgccggctggatgacggctcttggcctcgccatgggcatcagtactctcgcgctgagcgcctggcggaaagttcctgtgctcaccgcctggtcaacgccgggcgctgcgctgttagttagcggcctgcagggggtgaccctcgccgaggccgtggggatctttattttcgccaacgcgctgatcgttatctgcggcgccaccggcctgtttgcccggctgatgaagatcattccccattcgctggccgccgcgatgctggctgggatcctgctacggtttggtttgcaggccttcgccggcttacaggatcatctgccgctgtgcggcgggatgctcgccgcctggctgctgtgtaaagcgctgtggccccgcttcgccgtggtggccgcgctggtgattggagcgctgattgcggcggcgtccggggatgtggctagcgccgccgtgccgctggcatttgtgacgccggaatgggtcgccccgcagtttactccggcgcttttgctcagcgtcggtctgccgttcttcctcgtcaccatggcctcgcagaacgctccagggttcgccaccctgcaggcatcaggctataccgtaccggtctccgcactgatcgtcgtttgcggggggttggcactactgctggcgccgtttggggtttattccatctgcatcgcggcgatcaccgctgcgatttgccagagcccggaggcgcacccggatccgaaccagcgctggctggcggccatagctgcgggcggtttttatctgctggccggtctgttcggcgggtcaatcaccgccctgatgtcggccctgccgccggcgtggatccagatgctggcgggtctggcgctgctcggcaccatcggcgggagtctgtttcaggcagtgcatcaggccagtgaacgcgatgcggcggtgctaaccttcctggtcaccgccagcggggtgacgctggcgggaattggctccgccttctggggcgtggtgctcggcggggtgagttacggcgtgctatccgcgctgcgccgcccgtag

SEQ ID NO: 135289 - DNA, 570 bp, Enterobacter cloacae
atgaatattgcgcaacatctggcggcaacgcttaaaaccctgcgccagcagcgaggctggagcctgtcgcgactggcggaagagaccggggtgtcgaaagccatgctcgggcagattgagcggaatgaatcaagtccaacggtggcgacgctgtggaagattgccaccgggctgaacgtaccgttttcggcgttcatcgtcccggacgccagcgccgcgccctccgcgtttgatccgcagcagcaggcgatggtggtgacgccagtattcccgtgggatcccgagctgcgctttgaccatttttcgataacccttgcccccggcgcgctgagcgaatcaacgccgcatgagaaaggggtgattgagcatgtggtagtgataagtggtacgctggatttgtgcttacaaggggagtggcactcgctgcaggcgggtgagggtaggcgtttcgccggcgacgcgacgcatgcgtatcgtaaccgcggcgcccaggcggcccatttccattctcttatccattatccaaaagaaaaaaccgcgagcgaacccgcggccagacaagatgactga

SEQ ID NO: 135290 - DNA, 1962 bp, Enterobacter cloacae
atgcgcctgcacaatcatcgtcttgaacttcttagtcctgcccgcgacgccggtatcgctcgcgaagcgatccttcacggcgccgatgccgtttacatcggtggacctggctttggcgcccgccacaacgccagcaacagtctgagcgatatcgccgggctggtgcctttcgctcatcgctttggcgcaaaggtatttgtgacgctgaacaccattctgcatgacgatgaactggagccggcgcagcggctgattaccgatctctacgacgcaggcgtcgatgcgctgatcgtccaggatatggggatcatggagctggatctgccgccgattgagctgcacgccagcacccagtgcgatattcgcagtgtggaaaaagcgaagtttctctccgacgccggcttcagtcagatcgtgctggcgcgcgaactgaacctcagtcaaatcaaagccatttacgaccacactgacgccactatcgaattctttatccatggcgcgctgtgcgtggcctattccgggcagtgttacatttcgcacgcccagaccggacgcagcgccaaccgcggcgactgctcgcaggcttgccgcttgccgtataccctgaaggacgatcaggggcgggtggtggcctatgagaaacatctcctgtcgatgaaggataacgatcagaccgccaacctggcggcgctgatcgacgctggcgtacgctccttcaaaattgaaggccgttacaaagacatgagttatgtgaaaaacatcactgcgcactaccgtcaaatgctggatgccattatcgaagatcgcggcgacctggcgcgcgcctcggctggacgcaccgagcatttctttatcccgtccacggataaaaccttccaccggggcagcactgactactttgttaatgcccgcaaaggcgatatcggcgcctttgattcgccgaaatttatcggcctgccggtgggtgaagttctgaaggtaggcaaagaccacctcgacgttgaagtcagtgaaccgttaaccaacggcgatggtctcaacgtgatgattaagcgcgaagtggtgggcttccgtgctaataccgtggaaaaaaccggcgaaaaccgttatcgggtatggccgaacgagatgccagcggatctgcataaagtgcgcccccatcagccgctcaaccgcaacctcgatcataactggcaacaggcgctgctaaagacctccagcgaacgccgcatcgcggtagacgtgacgttgagcggctggcaggagcagctggttctcaccatgacctgtgaagatggcgtcagcgtgacccacacccttgacggggagttcgccgaagctaaccaggcggagaaagcgttggccaacctgcgtgacggtgtcacaaaactggggcaaaccatctactatgcgcgcgaggtgcaggttaatctgccgccgctgtttgtgcccaacagcctgctcaaccagctgcgtcgggaaactgcggagatgctggatgaagcgcgcctcaacgcctggcagcgtggcacccgcaagccggtctccgtaccgccgccggtctacccggagacccatctctccttcctcgccaacgtctataaccacaaggcgcgggcgttctaccagcgctatggcgtacagctgatcgacgccgcctatgaagcgcacgaagagaagggcgatgtgccggtgatgatcactaagcattgtctgcggttcgccttcaacctctgcccgaagcaggcgaaaggctccatcaagagctggaaagccacgccgatgcagctgatccatggcgatgaggtcctgaccctgaagtttgactgccgtccgtgcgaaatgcacgtggtcggcaagatcaaaaaccatatcctcaaaatgccgcacccgggcagcattgtggcctccgtcagcccggacgatctgatgaagacgctgccgaagcgcaaaggggcctga

SEQ ID NO: 135291 - DNA, 231 bp, Enterobacter cloacae
atgttaaagagaagcataagcgccctgctgttgctgtgcgcattattttccgggcatctgttgacccatcgtcagggacacgagtactttccggtgcaaagtctcgaacagcagctgctgcacgaagcggatagcgatgagcttcgcagccagcacgaggaggccgccgcagacctgcgcgaacatcaccgctggcaggacgaccgtaaaccgcgggcatcctgccaatag

SEQ ID NO: 135292 - DNA, 306 bp, Enterobacter cloacae
atgaagaagttggctttactgtacgccgtaatgacgctgggaatgtcgtcatgggcttttgctgccgacaacccgccgccgccgccggaaaaaggcgcgcagcatcagggtaaaccgccggtgaaaaacggccaacacgatggcaagcaagcgcaatacaacagcaaacagccacaacgagacggcaaacagtcacaacgagacggcaaacagccgcagcacgacggtaaacagccgcagcacaacggcaagcagccgccaaaagggagcgagcacagcgggaaaccgctgccgccgaaagcgtaa

SEQ ID NO: 135293 - DNA, 126 bp, Enterobacter cloacae
atgcatactgcctggcctaaacgtctgctgtggctgatcgcgctctggggaggcagcgtactgacgctggccgccattagcctgctgtttcgcctgctgatgaccgccgcagggctaaaagtctga

SEQ ID NO: 135294 - DNA, 1011 bp, Enterobacter cloacae
atgggtatcgaattatcggtgatctggttcgtgattatcgtctttgccacgctgatgtacatcgtcatggatggctttgatctgggcatcggcctgctgttcagcacggtgcggggcggcggggatcgcgacgtaatggtcaacagcgtcgcgccggtatgggatggcaatgaaacctggctggtgctcggcggcgccggcctgtttggcgcctttcccctcgcctacgcggtgatcatcgacgccctgtcgatccccctgaccctgatgctgatcggcctgatttttcgcggcgtcgcctttgagtttcgcttccaggccacaccgtcgcaccggccattctgggatcgcgccttttttggcggctccctgctggcaaccttcagccagggcgtggtggtcggggcggtgatcaacggtttcaccgtcagcggtcgcgccttcagcggcggcatgtttgactggctgaccccgttcagcctgttctgcggattcggactatgcgtgacctatgcgctgctcggcgccacctggctggtgatgaaaagtgaaggtgcgctgcagcagagaatgcgcagcgcatcgcggcagttgctgggtgccctgctggcggtgtttgccgtcatcagcctgtggactccgctggcgcacccggcgattgctgcccgctggttcagcctgccgaatctctatttcctgctgccggtaccgctgctggtgatcctcgttagcggctggctgtggcgcacgctgcatcagcgcgaccgccatgtttcgcccttcacgctgacgctgggcctggtctttctcggcttcagcggactggggatcagcatctggccgcatattatcccgccggccatcacgttgtggcaggctgccgctcccccgcaaagccagggctttatgctggtgggcgccctgctgattattccggtcattcttggctacacctgctggagctattacgtgttccgcggcaaagttcagcctggggagggatatcactga

SEQ ID NO: 135295 - DNA, 1413 bp, Enterobacter cloacae
atgaaaaagtatcaacagttggcgcagcaactgaccgagcagatcgcccttggcgtctggttgcctggagatcggctgccgtcgctgcgcgagcaggtgatcagcagcggcatgagctttatgaccgtcagccatgcctatcagctgctggaaagccaggggcgcatcgtcgcccgtccgcagtcgggttattatgttgccccccagccggtgaagctccgccagccggcgccgcctgcccaggtcactcgcgatgaagccgtcgatatcaatacctatatctttgaggtgctccaggccagccgccaggcgtcgatgctgccctttgcctcggcctttccggacccgcgtctcttcccgctgcagcagctcaaccgctcgctggcgcaggtgagtaaaaccgccaccgccatgagcgtcattgagaatctgccgccgggcaatgcagaactccggcatgccattgcccgtcgctatgccctgcaggggatgaacgtctcgccggacgagatcgtcatcaccgccggggcgctggaggcgcttaacctcagcctgcaggcggtgaccgagccgggagactgggtggtggtggaaaacccctgcttctacggcgccctgcaggcgctggagaggctgcgtttgaaagcattgtcggtggccactgacgtcagggaaggcattgatctgacggcgctggaggcggccctgcaaaactatccggtgaaggcctgctggctgatgaccaacggccagaatccgctcggcttcaccctcagcgctgaaaaaaaagcggcgctggtggcgctgctggcgcgctataacgtgatgttgatcgaagatgatgtctacagcgagctctattttggccgcgaaaagccgttaccggcgaagttctgggatcgccaggagatgacgctgcactgcagctcgttctcaaaatgtctggtacccggctttcgtatcggctgggtggcggccggcaaacaggcgcggcggatccagcagctccagctgatgagtacgctttccaccagttcgccgatgcagttagccctggtggattacctgtccaccaagcgctatgacgcccacctgcgccgtctacgtcgtcagctggcggagcgtaaacagcaggcctggcaggcgctgctgcgccatctgccgccggaggtcgtcgtccaccacagcgacagcggctactttctgtggatcgaactaccggaaggggccgacgctagcgcacttagcgcccgggcgctggcgtcgcacatcagtattgccccagggaaaatgttctccacctccgacagctggacctcgtttttccgttttaataccgcctggggctggggggaacgcgaagagcagggggtgaagcgcctgggggagcttattcgcgaacagcttgcctga

SEQ ID NO: 135296 - DNA, 936 bp, Enterobacter cloacae
gtgctggcgggagtcgatgtaatacagcacgcggtccgcatgcagggtttcgtaacggtatttcgcacaggcgatgtcggtggtggtgtagagatagccgccatcctttttctggacgatcacgcccatcggttcgccttccttgtttttatactcatcaaggaacactaccgttgcgccttcgctttccaccgccagatgtttagctttcaggtccgccacaatgcctggcagcatcgggttatacaggctttcacccatcacgtcgtcacgggtcagggtcacgttcagacggttataggtaagctggttctgggacatggtaatgtccaccagcttgcgccacatctcgaggaagtacgggtcgccaccttgaagttttaccacgtagctgcgcgcgcgctcggcgaaggcttcatcttcgtcatagtgctttttggcttcacggtagaaaccttccaggtctgccagcgccatttcgcctgcgttttcctgctgctgcttttccagatacgcgatcagcatgccgaactgcgtgccccagtcgcctacgtggttagcgcggatcaccttgtgaccaaggaactccagggtacgcaccgccgcgtcaccgatgatggtggagcgcaggtgaccgacgtgcatctctttcgccacgtttggcgcggagtagtcaaccaccacggtctgggcttctggctgagccacgcccagacggtcagatttcagcgccgcgtcaacgtggcttgccaggaacgcaggctcaaggaaaatgttgataaagcccggaccggcgatttcggttttgctggcgatgccggtgagatccagatgcgtcagtacctgctcagcgagctgtcgcggcggcatgcccagttttttagccactgccatcacgccattagcctgatagtcgccaaactgtactttcgctga

SEQ ID NO: 135297 - DNA, 423 bp, Enterobacter cloacae
atgtcgttctgtcatatgcgcattgccaggccggtcagcgaactggacaccaccgccagcatgtattgcgccgggctgggactcgagctgctcggcagctttaccgatcatgaaggattcagcgggataatgctcggcgcgcccgaagcgggctggcatctggaattcacccagtgccgccaccatcccgtcaccccctcgccaggcgatgaagatctgctggtgctgtactatccgcagcaggcggcatgggaggcacagtgcgcagccatggacgccgccggatttctgcgcgttacggcgtttaacccttactgggaggtcaatggcgtcactttcgtcgaccgggacggttaccgcacggtattgcaaaaccgcgcctggggcatggtgtgtgattcgtcgggtatggcggcgagctga

SEQ ID NO: 135298 - DNA, 1188 bp, Enterobacter cloacae
atgagcacttccgtcagcactacacaactcaatttgcgcattatttcgatcgttgtttttacctgtatctgctatctctccattggtctgccgctggccgtgctgccgggctatattcactatcagctgggctacagcacctttgtcgccggaattgtgatcagtctgcagtacatatcgacgctgataagccggccgcacgccgggcgctacaccgatatctgggggccgaaaaaagtggtcagccttgggatcgtctgctgcctgctcagtggcgccttcacgctactggcggtagtcctgcaggcaacgccgatgctggccattgccgcgctgctggcgggccgggtgtttctcggcgtcggcgagagctttaccgccaccggcgccaccctgtgggggatcaaaaccgtcggcgcgatccacacgtcacgggttatctcctggaacggcgtggcgacctatgtggcgatggcggtcggggcgccgctgggagttaccctcaatcactattttggcatcagcggctttgctacggtggtagtgctggtcgcggccatcggtctgctgttcgctcgtacccgccaggacgtcaaggtgaccgccggcgccagagcgccctttcacgcggtggtgcgaaaaatctggccttacggcctggggctggcctttggcaccgtcggtttcggcgttatcgccacctttatcaccctctacttcgccgcgcacagctggcagggcgccgcgtttaccctttcgctgttcagcgtcggctttatctgcgttcgcctggtgctgggaaataccattacccgctttggcggagtcccggtctccctggcctgcttcatcatcgaaagtctcggcctgctgcttatctggctggcgccatcagcatggatggccggcgtcggcgcctttctcaccggttcgggtttctcgctggtctttccggctttaggagttgaggcggtaaaacaggtggaagagcaaaatcagggaaccgccctcggcacctactcggcgtttcttgatctggcgctgggcctgaccgggccgctggccggctgggtcgccgggttctacgatctcgccacgctgtatctgctggcggcgatcgtggtggcgctcgcattcctgctgattttccgcgtacatcggcaacagcggcttgtcgccagagagtag

SEQ ID NO: 135299 - DNA, 291 bp, Enterobacter cloacae
atgcaccaaagttttaatcagcgcgttcatttctattactgcgtcctggtcgcgctgaagatgcacggaaaatcgaaaaaagcgggtggtatcaggggaaagaataactttctgctgaaatggctgcgccgggcgcaggataacaacatttttcctcccgatatcaccagtgaaatcgaatggctgcgaggaaaaattattcaggctggctatgacaccgatctcgagccgatgctggattttgtctacgccaccgccagccgcgccgaggcgctcaaaaacgccgaatag

SEQ ID NO: 135300 - DNA, 762 bp, Enterobacter cloacae
atggccgactggaatccttcgttgtatctgcaatttgacgctgaacgtacccgccccgcggccgacctgctctcgcgtattgcccatctgcaggtcgagcacgccgtcgacctcggctgcgggccgggaaacagcacccgcctgctacgcgccgcctggccgttggcgacgatcgtcggtatcgataactccccggccatgctgatccaggcgacgcaggccttacccgactgcgaattcattgatgccgatattgcccgctggcggcctgcgcaaccgccagatgtgatctatgccaacgcctctctgcagtggctgacggatcatgagacgcttttcccccatctggtaaaccagctggcggacaatggaacgctggcagtgcagatgccggataactggcaggaaccttcccataccctgatgcgtcaggttgccagcgagatggggttgccggaccgtggacgccagccgttactcccgcccgccgcctggtacgatctgctcagccgccagggttgcgaagttgatatctggcgcaccacctattttcatccccttgcttctcatcaggcgattgtcgactggctgcagggcaccgggttacgcccctatctggcaggcctggacgagcaggccggaagcgcgtttctcacacgctatctcgcattgctggccgcacactatccgttacagtgtaacgggaaggtgctcctgcgtttcccacggctgtttatcgtggcgcgaaagatcgccgcctga

SEQ ID NO: 135301 - DNA, 321 bp, Enterobacter cloacae
atgagtactcctcctgtcgatcgccgaacgctggctgctatcgcgccaaagctagccgagctgaccgaaacggtgctgtttggcgatatctgggcgcggagcgagctgtcgccccgcgaacgcagcctgatcaccctttccgccctgacggcgcagggcaaaactgaacagctgccgtggcacatcgcgttcggctatcagaatggcctgagccgggaagaaattgtcgaattgtttacccatctggcgttctatgccggttggccggctgcggccagcgccctgacctgtctgaacgcgcaggaggcgtcatgcccctga

SEQ ID NO: 135302 - DNA, 381 bp, Enterobacter cloacae
atgcccctgacccgaatttcgcttggcaccgcctggcgtcccgcggagtttgctcaattgtcggcgctctttcatgagtgtctggtggcggagttcgaggttccgtcagcagacagatttcagtttatcgaacgggccgccgatgagcagcgcatttacgacccgcactacctcagcgaaggacgcagcgcccgcttcgtgctgtttcatattttcgccggaaaaccgcgcagccgggcgcagaaacagggactctatcgtcggctctgcgcgcggttagacgacgagatggcggtcagcccgcaggacgtgatggtggttatccagtttaaccaactggaggactggagttttagcgcagggaagatggcggatgaatga

SEQ ID NO: 135303 - DNA, 483 bp, Enterobacter cloacae
atgtcaaatccagcatatttatggttaactgatgagaatgattcgcctattataggttcttgcctgatgcccacacgtacaggttccatcgaattgcgcgcagtgaatcatcatgtttggttacctaccgataataatacaggaaagctgacgggaacccgtcttcatacaccggttaaaattcaaaaagagtttgacagaacaacacctttgttatttagggctctttgtgaaggtcgaaccttaaaatcggcaacgctaaaaatgtacagaataaatgaggcgggactggaaattgaatattttaacatagcgatggcgaatattaagattacggcaatcacaccaaatttacatccggccggaatgacaagtactcaccttgaagacattgatttccgttatgagacgatcacctggagatacacagaagggaacatcatgtatcgtgattcatggaacgatcgctgttgtgcctggtag

SEQ ID NO: 135304 - DNA, 195 bp, Enterobacter cloacae
atggatttcttgaaaagatggttaaaggaagaattcattctttttttatgggggtggggcattgtattattaatcattgtatttagcatgattgcagtctctcttttccctgacattgccattaacttaataggactttttattttattaatcattgggtttcacgttgttgtttggtttaaagttaaaaactga

SEQ ID NO: 135305 - DNA, 447 bp, Enterobacter cloacae
atggtcatcgatatccgggaagtacggccccacgacaaagccgaatggcttcagctttggcaaggctacactcgtttttacggtagcccgcagccggaagaggtaaccgaatgcacctggcagcggatgctggatgtaaactcgtctgtattgggtagagtcgcggtggtggatgatgcggtggtcggcttcgctatctgtgttcttcatgagggaacctgggttaccacgccgatctgctatctggaggatctgtttgtcgatcccgccttccgtggacagggtattgccagaaccatgattaagtcgctgcaaagcgaaggggcggacaaaggctggtcgcggctgtactggcatacgcgccgtgataatcccgcccgtcatctgtatgatgagtttaccccggctgacgattacgtacgctacaggatcacgcttgagtcctga

SEQ ID NO: 135306 - DNA, 1452 bp, Enterobacter cloacae
gtgaaaactttaaaccgtcgtgatttccccggcgcgcagtaccctgaccgtatcatccagtttggggaaggtaacttcctgcgcgcattcgttgactggcagatcgacctgctcaacgagcataccgacctgaatgcgggcatcgtggtcgtgcggcctatcgccacagattttccgccttcgctgaacacccaggatggcctgtacacgactattattcgcggcctgaacgagcagggcgaagcggtcagcgatgcgcgtcttatccgctcggtcaaccgggagatcagcgcttacgcagacttcgacgcttttttacgcctggcgcataacccggagatgcggtttgtcttctccaacaccaccgaggcgggcatcagctaccatgccggggatcggtttgacgacgcgccgccggtcagttatccggcgaaactgacccgtctgttgtttgagcgttaccagcatttcgccggtgcggccgacaagggatgggtgattattccctgcgagctgatcgattataacggcgaggcgctgcaggcgctggtgctgcgctatgctagcgaatgggaactgccgcaggcatttatcacctggctgacctccgcgaataccttctgttcgacgctggtggatcgcattgtgaccggctatccgcgtgatgaagtggcggctctcgaggcgcagaccggctataaagatgctttccttgataccgctgagcatttctacctgttcgttatccaggggcctgcctcgctggaggccgagctgcgtctcgataaactgccgctgaatgtgcgcattgtggacgatatcaagccgtataaagaacgcaaagtggcgatccttaacggggcgcacaccgcgctggtgccggtggccttccaggccgggatcgacaccgtgggtgaggcgatgaacgatgcggagatttgcgcgtttgtcgaaaaagcgatttatgacgagattattccggtgctggatctgccgcgcgatgagctggtgtcattcgccagcgccgtgacagggcgcttccgtaatccctatattaaacatcagctgctctcgattgcgctcaacggcatgaccaagtaccgcacccgtattctgccgcagctgctggcggggcagaaagcgcatggcgcgctgccgccgcgtctgacctttgccctggcggcgctgatcgccttttaccggggagagcgggatggtgagatctatccagtacaggatgacgccgactggatatcgcgctatcaaacgctgtgggcccgccatcgcaatggccagatgagcactcgcgagctggtcaccgccgtgctcagcgtggcggatcactggcagcaggatctgagccagatcccggggctggtggagctggtgactgccgaccttgacgctatcctgacctgcggtatgcgcgacgccgtcaaacctctttgctga

SEQ ID NO: 135307 - DNA, 531 bp, Enterobacter cloacae
atgaccacatccttttcactgcgcacgctctcgcgtgacgatattctccatcacctcccggcattaagcgagatcctggcaagctgcgtcaacggcggcgcctcggtgagctttatgctgcctttcgcgccgcaaacggcgataacgttctggcaacgcactgccgacagcgtggcggccggggagcgcattgtgctggccgccttcgacgcggaagaacgtcccgttggcaccgtgcaacttatcaccagtcaaccggaaaaccagccccatcgagcggatgtcgccaaattattggttcaccaaaatgtccgccgccaggggatcgcccaggcgttaatgagcgaactggagcgcattgcccggcgggaaaggaagacggtgctggtgctggacacggcgaccggcagcggggcggaacagttctatgcccgctgcggctgggaaaaagtgggggaaattccgcgctatgcgctgatgcccgacggcgaaatgactgccacctcactattctataagtttctgccctga

SEQ ID NO: 135308 - DNA, 1425 bp, Enterobacter cloacae
atgtcttcactgtcgattcggtcatttacgctgtttcgtgaagaacaacccgtgcgcgatgcattggtcttatttacgttaacgctactgctgcattttcttggcgctatgctgcgtctggtgcaggagctctctttcttctggccgctcaatgcagtgatggccgggatttttgcacgctatgtatggcttaaccgtagctatttttatgccgtctgttttgcggcaatgctggtctatgacggattaacctcgcgctggggaatgggctttgcctcattgctgattaacttttcgaatattgtctttattgtgacgctggcgcagctggtgctgtgggataaacgtcgcgccgactccatgccgggcccgataaacgcgcttaatttattctgtttctgcctgttagccgccttactgtgcgcagcggtcggcgcgctggggtcggtggatgttgaacgcgccaccttcgttccccagctggcggactggtttagcgaacagttctcaacggcggtattaatcctgccctttattctgaccctgacgctgccttcggcattaagcggttttcgctttcgccagctgctgccggtgctggcgctggtcctgtcaattgcgcttggcgtggcggtaggcggcgcgggcagcattaccttcccgttaccggctttgatctggtgcgctgtacgctatccgctgccgctgacctgtctgctgacttttctcactggcatcggcgaaatactgctggtcgctaattcgttaattcacttttcgccagatgcgcgaatgcagccgtggcagctgttctccacccgcctcggaattgccgccatgctgattagcccggtgattgtcgcatccagtgtcgaagcgattaacacgctggtgaagcagctggccctgcgcgccgattttgactttcagacccgcgtctattcccgttccggactgagcgaagcgttgaagcgtcagacgctgccggcggataagctgctgacggtgatggtgctggatatcgatggcttcaaacgggtgaatgatgctctgggccatgaaggcggcgattgcgtgctgacccagtttgcccagcaggttcgacagctggtgggtgagcaggggatggtggcccgtatcggtggcgaagagtttgcggtggccgccgtcgtcgacagcgcccagcagggctatttgctggcggaaaagatccgtcacggggtggagtcgcagcctttcggcctgggccagaacccgatccacctgaccatcagtctgggactggagacgcgcgaggtaggccacgcccgcatcaccgagctgtttaaccagctgctgttggcggcggacgatgagatggtgaaagccaaacagagcggtcgtaaccaaatttgtatgccgacgctgaccgaaagcgcgccataa

SEQ ID NO: 135309 - DNA, 369 bp, Enterobacter cloacae
atggtcgatcaggatcgcttgtttgcgcgcctggcgcgctcgacgtttcgctcacgcttccgtctgggggggaaagagcggcaatattgtctcgataagggaccggaggtcattgatcggcatgccgcagactttattcgccagcggctggcgcccgctgcgccgatcaatgatggcaagcagacgccgatgcgcggtcacccggtgtttatcgcccagcacgcgaccgctacctgctgtcgcggctgcctggaaaaatggcatgccattccccacggccgcgcgctgagcgagccggagcaggactatatcgtgcaggtcatccaccgctggctggtgctacaaatgaatgcgccgtctgtgcgctaa

SEQ ID NO: 135310 - DNA, 927 bp, Enterobacter cloacae
gtggcgacggttatctataatgcaatgctggaagccattctggcagaaatcaggccgctgattggccgcggaaaagtggcggattatattccggcgctggccagcgtcagcggcgacaagcttggtatcgcgatcagtacggtggacggtcagcactttgccgctggcgatgcccatgaacgtttttccatccagtcaatctccaaggtattgagcctggtggtggccatgaaccactatcaggaggaggagatctggcagcgggtggggaaagatccttccggccagccctttaactcgcttctgcagctggagatcgagcagggcaaaccgcgcaacccgtttatcaacgccggggcactggtggtctgcgacatgctgcagagccggctcagcgccccgcgtcagcggatgctggagattgtccgccgtctgagcggcgtggccgatatcgcctacgatccggtggtggctcgctcagagtttgagcattcggcgcgcaacgccgccatcgcctggctgatgaaatcctttggtaacttccataacgacgtcgccaccgtgctgcagaactatttccactactgttctctggagatgagctgcgttgagctggcgcgaacctttctgtttctcgccgaccgcggcattgccccgcatctcgacgcgccggttattgcgcccatccagtcccgccaggtgaatgccctgatgatgaccagcggcatgtaccagaacgccggtgaattcgcctggcgcgttggcctgccggcgaaatcgggcgtcggcggcgggatcgtggcgattgtcccgcaggagatggcgatcgccgtgtggagcccggagcttgacgacgccgggaactcgctggccggcgtggcgatgctggaaaaactgactcagcggatggggaggtcggtgttctga

SEQ ID NO: 135311 - DNA, 1389 bp, Enterobacter cloacae
atgatgaatttatctgcaacgcacgccgtctccgtcaatccgactaccggtgaggtggtctcctcgctgccgtgggccagcgaacgcgaggtcgacgcggccatcgcgctcgccgcggcgggctatcgccagtggcgtcagacgccgcttgccgaccgcgccgatgccctgcgccgcatcggggccgcgctgcgcgcccgcggtgaagaggtggcccagatgatcacccttgagatgggcaagccgatcgctcaggcgcgcggcgaggtggcgaaatcggccaacctctgcgactggtacgctgaacacggcccggcgatgctggcgacggaagctaccctggtggaaaataaccaggcggtaatagagtatcgtccactgggcgccatactggcggtcatgccgtggaacttcccggtctggcaggtgatgcgcggcgcggtgccgatcctgctggccggcaacagctatctgctgaagcatgccccgaacgtgatgggcagcgcccgtctgctgggcgagatttttgccgccgccggcctgccggatggtgtatttggttgggtgaacgccactaatgacggcgtttcgcagattatcaatgacgaccgcatcgcggcggtgaccgtcaccggcagcgtccgcgccgggaaggcgattggcgcccaggcgggcgcggcgctgaagaaatgcgtgcttgagctggggggatccgatccctttatcgtgctcaacgatgccgatctcgatgaagcggtgaaagccgccgtcaccggccgctatcagaacagcggccaggtgtgtgcggcgtcgaaacgctttattctcgaagccggcattgccgaggccttcacccgcaaatttgtcgacgccgtggcagcgctgaagatgggcgacccgcgcgatgagcaaaactacgtcggaccgatggcgcggttcgatttacgcgatgaactgcaccagcaggtaacggcgacccttgatgaaggagcgactctgctgctgggcgcggaaaaaatcgaaggggcgggcaactactatgcgccaacggtgctgggcaacgtcaccgccgggatgaccggctttcgtcaggagctgtttggtccggtagcaaccctgaccaccgctcgcgacgctgaccatgcactggccctcgccaacgacagcgagtttggcctgtccgccacggtctataccatcgacgaggcgcaggcccagcgctttgcccgcgagctggagtgcggcggcgtcttcctcaatggctactgcgccagcgacgcccgcgtggccttcggcggcgtgaagaagagcggttttggccgcgagctgtcgcattttggcctgcacgagttctgtaatgcgcagaccgtctggaaagaccgtcgctaa

SEQ ID NO: 135312 - DNA, 879 bp, Enterobacter cloacae
atggacctgactcagctagagatgtttaacgctgtcgccagcaccggcagcattacccaggcggcgcagaaagtgcatcgcgtgccgtccaacctcaccacccgcatccgccagctggaggccgacctcggcgttgagctgtttatccgcgagaaccagcgcctgcgcctgtcgcctgcgggacacagctttttgcgctatagccagcagatcctcgccctggtggacgaggcgcgaatggtggtggcgggcgacgaaccccaggggctgttttctcttggctcgctggagagcaccgcggcggtacggatccccagcactctggcccactttaatcagcgctacccgaaaattcatctggcgctctcaaccggcccttccgggacgatgatcgacggcgtactggaaggcgccctgagcgccgcgtttgtcgacggcccgctggtgcatccgggcctggaggggctgccggtgttccctgaagagatgatgatcgtcgccccctacggccacgcacccatcacccgcgccagcgaagtgaacggggccaacgtctacgcctttcgcgccaactgttcctatcgccggcattttgagagctggtttcatgccgacagagcgaccccgggcaggatccacgagatggagtcttaccacgggatgctggcctgcgtcatcgccggcgccggcctggcgttgatcccgcgcagcatgctggagagtatgcccggccatcagcaggtttccgcctggccgctggccgaagaatggcgctggctcaccacctggctggtgtggcgccggggcgccaaaacccgccagctggaggcgtttatagcgctgctgaacgaagatcggcaaacagtggtttctccataa

SEQ ID NO: 135313 - DNA, 423 bp, Enterobacter cloacae
atgtacaccatcaccgacatcgcccctaccgatgccgaatttatcgccctggaccttagccagctgccgccgcagacggtcatcgccctggcgatccgcagcccgcagggcgaggccgttggctgcggggctattgtcctcagtgaggaaggctttggcgagatgaagcgggtctatatcgatccccagcaccgcggccagcagctgggagaaaagctgctggcggcgctggaagcgaaagcgcgtcagcgcgactgccataccctgcgcctggagaccggtatccatcagcatgcggccatcgccctctacacgcgcaacggctaccagacccgctgcgcgtttgcgccgtatcaacccgatccgctcagcgtgtttatggagaaaccactgtttgccgatcttcgttcagcagcgctataa

SEQ ID NO: 135314 - DNA, 945 bp, Enterobacter cloacae
atgcacaccaaagcccgtaaagtgatgattattggcgccggcaatgtcggcgcgtcggcggcctacgccctgctcaaccagagcatttgcgaggagctgatcctcgtcgaccttaaccaacagcgcgctgaggcccacgctcaggacctgagcgacgccgcggcctacctgccggggatgatgaccatctccacccgcgaggccagcgactgcgccgatgtcgatatcgcggtgatcaccgtctccggcggcgcgctgcgccccggccagagccggctggatgaactaacctccaccgcgaagattgtgaagagcattgtgccgacgatgatggccaacggatttaacggcatctttctggtggccaccaacccctgcgacatcatcacctggcaggtatggcagctttccggcctgccgcgcagccaggtgctgggcaccggcgtctggctggataccacccgcctgcgtcgcctgctggcgcagaaactggagattggcgcccagagcatcgacgcctttatcctcggcgagcatggcgatacccagtttccggtgtggtcgcactcctcggtatatggcacgccaatcgccgacctctaccagcagcgcaccggcctgccgctcgatcgcgaggcgatggctgacaaagtgcgcaagctgggatttgagatctacgcgggtaaaggctgcaccgaatatggcgtggcagggaccatcgccgagatctgccgcaatatcttcaccggcagccaccgcgcgctggcggtctcctgcattcttgacggcgagtacggggtcagcggcgcggcggctggggtgccggcggtgctggcccagggtggcgtgaagcagatcattgaactgcagctggccggcgaagagcaggcgaagttcagccagtcgatcgcggtgatcaaggccaatatcgcccgtctgccctga

SEQ ID NO: 135315 - DNA, 762 bp, Enterobacter cloacae
atgaagggatataaccggttagagcagattatggacttcctgaaaagccataatctggtgacagtcgaccagctggtggcggcgaccaacgcctcgccggccaccattcgccgcgacctgatcaaactcgatcaggaaggggtgatcagccgaacgcacggcggggtgacgctgaaccggtttattccttcccagccgacgacgctggagaaagcccagcgcagtccgcttgagaagcaggctatcgccagtgcggcggcagcgctggtgaaagccggcgacgccattgtgcttgacgccggcaccaccatgattgagctggcgcggcagatcacccatctgccgctgcgggtgatcaccagcgatttacatatcgcgctgttcctatcggaatttaagcagatcgaagtgacgattatcggcgggcgcatcgatgacagcagccagtcgtgcatcggcgatcacggccgccgcctgctgcagaccatctggcccgatctcgccttcgtcagctgcaacggctgggaccttgagaaggggctcaccgccccgacggaggaaaaggccgccctgaagcgcgatctgatggccaatgcccggcggcgtatcctgctggcggacagctccaaatacggcgcctggtcactgttcaacatcgctccgctggcgtcgttgaccgatatcgtgaccgacgcccacctgccggataaaacccgcgaggcgctggagaccctttccccgcagctgatcattgccgactga

SEQ ID NO: 135316 - DNA, 987 bp, Enterobacter cloacae
gtgtctaagatgattgcagtgacaatgggcgacccggcagggattggtccggagattattatcaaatccctcgccgagggggcgctgagcggcgcgccggtggtggtggtgggctgcgcgcagacgctgcggcggatcctggcgctaaatatcacaccgcgggcggagctgcgcattattaaccatcccgccgaggcgagtttctccccagcgaccatcaacgtcattgatgaaccactcagcgacccgcaggggctgcgccctggcgaagtccaggcccaggcaggggatctcgcgtttcgctgcatcaggcgggcgaccgcgctggcgctggagggcgcggtcgcggccatcgctaccgcgccgctgaataaagaggcgctgcatctcgccgggcacgcttatcccggccataccgaactgctggcccacctgacgcagactaccgattacgccatggtgctctataccgagaagcttaaggttatccatatcactacccatatttccttgcgccagttcctcgataccctcaaccagccgcggattgagacggtgattggcgtggcggatcgctttctgcgccgcgtcggctatccgcgtccgcgcatcgcggtcgccggcgttaacccgcacgccggggagaacggcctgtttggcgatgaagagatccgtatcgtcgccccggcggtcgccgccatgcgggcgaagggagtggaggtgaccggcccctgtccgccggacacggtgtttatgcagtgtcacgaaggcatgtacgacatggtagtggcgatgtatcacgaccaggggcatattccgctgaagctgctgggattctatgacggggtgaatattaccgccgggctgccgtttatccgtacctccgcggatcatggcactgcgtttgatattgcctggacaggtaaagcgaagtctgagagcatggcaacctccattgagctcgccatgcacatcgcgcaggaataa

SEQ ID NO: 135317 - DNA, 1236 bp, Enterobacter cloacae
atgaacgacggcaataacagagtgctggtgctggcggatgactttaccggggccaatgacgccggggtcagcctggcggaggcgggtatgtcggtggaagtggccttcaccgccggacagccatcaaccgcccgggcattaattctcaacagcgacagccgggcgatgagcgccgcggcggcggcggacaaggtcgccgctctgctgcgcggcgcggcgacattcgtcccgcactggcaggtaaagaagattgactccacgctgcgcggtaatcccggcggcgaactggaggcaatgatggcggcgcaaggctgccggatggcggtggtggccccggcttatccggcagccgggcggcatacccgggacgggcgctgctatgtgcatggtgtgcccctcgatcagaccgaatttgccagcgatccgaaaacgccggtgagccgggcggagattagcgaaattatcgccatgcagagccgtcttccctgtctgaccctgaacgctggccagcttccggcggcattagcgacggcgggcgaggagaagcgagtgttgattgtcgacgcctgggaagacagccatctggaccaggtgatcgacgccgttgcgccccatgcgcgggagaccctgctggtcggctcggcgggtctctgcgaggcgctggctcgccgcctgcgccgcagcgagcagggcccgctgctggcggtggtcggttcgatgagcgagatggcgcagcgccaggttgctgcgctgcaggtccattcccgagtacgggtgattgaaattgatgtcgaacaggcctttagcggatcgccgaaggaggaagcttcacggatcgccggggcgctgcgtgagggccagcactgcgtggtgaccacccgcccgaatcacgccgcccggcacgggattgaagcccggtgccgtgaacgcggtctcagccgcgccgcctacggggagcacatctgcgcctggcttgccgacgtcacggcactggtggtggcgctgtgcccaccgggcgccctgtacctctctggcggcgatgtagccatcgccgtcgcgcacgcgctcggcgccacagggtttcagatccgcggccgggtggcggagtgcgttccatacgggcattttctcggcggccgctggtcgcggccggtgatgaccaaagccggaggattcggcaccgacaccacgctattacatgttgtgaattttattgaggagaaactgagtgtctaa

SEQ ID NO: 135318 - DNA, 342 bp, Enterobacter cloacae
  misc_feature (289)..(298): n is a, c, g, or t
gtggcgacgatacacagcacaatcatcagcggggctggcgcctcatcggccctgctcccgctgctggccggtaaaacctcaatcctgctggtgaccgacaagaacgtcggggcgctggaggcaacccaggcgattcatcgcctgctggcggctgaagggcgtgaagttgaggtcattgacagcgtgccagcggagcccaaccatcacgatgttacgcagatcgtcagccagctgggcgccagccagccgcagatggtcgttggtatcggcggggggagcgtactggatnnnnnnnnnngtactggatgtagcaaaactgctgtcagtacttctgcaccctga

SEQ ID NO: 135319 - DNA, 768 bp, Enterobacter cloacae
ttgttaatcccggccaccgcgggcaccggatccgaagcgacgccgaacgccattctggcgatccccgagcagcagacgaaggtggggatcatctccccggtgctgcttccggactatgtcgccctgctgccggagctgaccaccagcatgccgcccagcatcgcggcgtcgaccggaatcgatgctctgtgtcatctgctggagtgctttacctccaccgtcgccaacccggtgagcgataacgccgcgttaatcggtttacacaagctggtacgccatatcgagcgttcggtaaatcagccgcaggatctgacggcgaagctggagatgctctgggcctcgtggtacggcggcgcagcgatcaactattccggcactcacctggtgcatgcgctctcctatccgcttggcggtacctggcacctgccgcacggggtggccaacgccattctgctggcgccctgcatgcgggtggtccgccctcacgcggtggcgaagttcgctcaagtctgggacctgatccccgatgcagatcgcacgctcagcgcggaagagaaatcccatgcgctggtcgcatggctggcggcgctggtcaaacgactgccgctgccggacaacctggccgcgctaggcgtgcctcaggagagtatttccgccctcagcgcagcggcgcaaaacgtcaaacgcctgatgaacaatgccccatgcagcgtcagccgcgaagagatcgcggccatctaccaaacgctgtatccagaacatgcctaa

SEQ ID NO: 135320 - DNA, 885 bp, Enterobacter cloacae
atgaggaaagctattagcggcgtactcaccgccattgtcactccctttaccgccgagggagcgcttaacctgccggcgctacgccagcaggtgcagcggcagctcgccgcaggcaacggtattttctgcggcggcaccaacggcgagttttttgtcctcaatgaggaagagaagatcgccgtcgccagaacctgcgtggaagaggcggccggtcgcgcgccggtggtggcccatattggggaggtttccacccgggagacgcgccggctgggccagcagatcgcccgcctcggagttgacgcggtatcggccattaccccgtggttcgtacccttgaagcaggaagagctgattaaccactatacggcgatcgccgacgcgctgagcgtcccgctctttctttacaacattcccgcccgcaccggcaacactattgccccggagaccgcgcgccagctggcccgccacgagaatatagtcggcattaaggatagcgccggcagctacgacagcctgaaaggctttctcgacgcagtgcgcgatatcgacggtttcgacgttctgaacgggccggactcgcttatccatcagggattcgtcgacggctgctcggcctgcatctcggggcttgccaacgtcgcccccgctgaaattaacgccatctggtcgcgctttcacgccggggatatcgccggatcgcgccaggcccaggagcaggtaacgggcctgcgcaccgatctgtataaagtggcgttctcgcctgcggcggtgaagaaagccctgcagctaatgggtcacgaggtgggcgacagccgctacgcggtgcagtttagtgaccaccagctgcagcagattaaaaatatcattaacacctaccttcactaa

SEQ ID NO: 135321 - DNA, 951 bp, Enterobacter cloacae
atgaaagtaatttgcacctcgccctcattcgccaaatacgacgatgcgcccattttggcactgaaagaggccgatcttgaactggtcatgttgcctgccgatgcctctatagagatgctggctcagcatctgcctgatgccatagcgatgattgtcgccttcaccgacatcaatgaatcgctgctggcaaaggccccgaggctaaaaattgtctgcaaacacggcgttggtgtggataacatcgatcttaacgctacacgtcagcgcaaaatttttgtcactaacgttcctgatgccaacaagcatgcggtggccgattttgcttttggcttaattctcaatactgcccgccagatttatcaggcaatcagtgaaacgaaagcaggcaactggcctcgtatttttgccactgatgtatatggcaaaaccctggggatcgtcggtttaggccatatcggtaaggaagtggcgcgacgtgcgcgcggattcaatatgcgagtgctcgccaccgacgcctggccagacagagaatttgcacaacaacaccagattgaatatgtctcactggataccctgacggcgcaaagtgattttattagcctgcatacccctttaaccccggaaactgaaaatatgtttaatgccgcccggctacagcagatgaaatcaggggcattcctgatcaatgtttccagaggcggtattgttgatgaacaagcgttgtatgaagcactaaaatcaggacacctcgccggagccgcagctgacgtttttctcgaggaaccttgcgctacgcaccctttatttaccctggcgaattttgcgccaacatctcatattgctggatatacggatggcgcaattagcaatattagcgcgcgctgcgtcaacaatattattacctgcgtctgtcgtggtgaacgacctgaaaacattatgaattcgctgtaa

SEQ ID NO: 135322 - DNA, 1320 bp, Enterobacter cloacae
atgaacacgacagctaacactactcgtattcgctggtggatagccgggttaatgtggttggctattgccatcaactatatcgaccggacagtattatctgccgcagccccacatttaatcgatgaactgaaactcgaccccgaaatgatggggtttatcatggcggcttttttttggtcatactcgttattacagatccccgccgggtggttcgccgatcgttttggtcagaaaaaaggtcttggtttagccgtcgcctggtggtcaattgccacctcgatgatgggtgttgccacgggttttaaatcacttctggcactgcgtctggctttaggtgttggcgaggccgccgcctaccccagcaacgcagggatcgccgcacgctggtttccggataaagaacgtgccaccgtatccggactcttcgatagtgcgtcaaaatttggcggggcgattgccatgccgcttatcgtctggatgatctacacctttgactggcgactgacctttttgattatcggcagtgtgggcattttatgggttatcgcctggtattttatctatgctgaaaacccggaagaacacaaacgcatcagtccttcagaagtgcgtattattcgtgatggtcaaaaacaacatcacggcgacaaaactgtattgcccatgaaatggtataagctcttgcgttatcgtaacatttgggcaatgtgcatcggcttttttaccatcaattatacctcctatttttttattacctggctccctacttacctggtaaaagaaaaaggtatggattttattaaaatgggaatggtagccgctctgcctttattatgcgggatggtgattgaagtttttgctggctgggcctcggatcgtctggtacataagaaagtactgtctctaacagcgacccgtaaactgtttttgactatcggcttgcttatggcactttgtatcggctttgcaccatttaccgactctgtgtttatgaccgtctttctcttgtgtgtcgcaaaatcaggcacgacggtcgccgcatcgcaggtttgggccttaccgggtgatgttgcacccaaaaatagcgtctcaattgtcgctgggctgcaaaatacggtttcgaatatgggaggcgcagtcggtccgatcattacgggtgcgatcgttgctgcgacaggctcattcaactgggcactgattttctcggccattcttgtcgttatcgggataatcaactacctgttcctgatgggtaaaattgaacctatcaatgacaaaggtggaaaatcacccgtccttaatgccgcagaacaacattaa

SEQ ID NO: 135323 - DNA, 795 bp, Enterobacter cloacae
atgcaggaaattcaattttatctggtcgatgctttcagcgataaaaactttggcggcaatgccgcggctgtctgcccgctcagcgagtggttagccgacgatgtgctcctgaaaatggcccagcagcataatcaatccgaaacggctttctttgtccgtaccgacgagggctatgagctgcgctggtttaccacactcgctgagatcaatctctgcggccacgcgaccctcgccgctgcgcacgttattttcgaatatctcgaccatccttcggcgacgattctctttagcacccgttttgttggtgagctgcgggtcacccgtaatggcgactggctgacgctcgatttcccggcgtggtcgacctccccggtgcaaaacccgccggcggatctgctgaccgggttgggactcgaggccgccgttgaagttcgggaagggcgcgattatctggtggtgctggcggatcgccagcaggttgaagcggtgcgaccggatatggcgcggctgcgaacgcttggcaaaatgagctgcgtcagcgcgccggatgaagagtatgactttgtcagccgcttcttctgcccgggagaaggggtgccggaagatccggtcaccggctccgcccatagcatgctgatcccctggtggggcgaaaagctggggaaaaccaccatgatggcgcgccaggtctccgctcgcggcggcgacctgcgctgccagtggcagggcgaccgtgtgctgattagcggccaggccaccacctatatgcgcggaacggtttacctgcgaggttaa

SEQ ID NO: 135324 - DNA, 1200 bp, Enterobacter cloacae
atgacttcgaatacggtctcacgcaaggtagcgtggctacgtgtcgtgacgttggccatcgccgcgtttatttttaacaccacagagtttgccccggtcggtctgttgtcggatattgccgacagcttcggcatggaaaccgcccaggtgggcatgatgctgaccatctacgcatgggtggtggcgttaatgtcgctgccgtttatgctgctgaccagcaaagtggagcgccggcgcctgcttatcggcctgtttattctgtttatcgccagccacgtcctgtcgttttttgcctggaattttgacgtgctggtgatcagccgcattggtatcgcctttgcgcatgcagtgttctggtcgataacatcggcactggccatccgcatggccccgccgggcaaacgggcgcaggcgctgagcctgatcgccaccggtaccgcgctggcgatggtgtttggtattccgatcgggcgcattatcggccagtactttggctggcggatgaccttcctggcgatcggcctcggcgcgttagccaccctggcctgcctcgtaaaactgctgccgaccctgccgagcgaacattctggctcgctgaaaagcctgccggtgctgttccgccgcccggcgctggtcagcgtgtacattctgaccgtggtggtggtgaccgctcattataccgcctacagctatatcgagccctttgtccagacggtagcgggcctgagcggcaactttgccaccgtactgctgctgatccttggcggggccggtattatcggcagcattctgttcggtaagctcggtaaccagcacgcgtcggggctgataagcctggcgattgccctgctgctcgcctgcctgctgctgctgctgccggcctcgcataacccgcagcacctgatgctgctcagcatcttctggggggtggcgatcatgattatcggtctcggcatgcaggtgaaagtgctggcctccgctccggatgccaccgacgtagccatgtctctgttctcgggcatctttaatatcggcataggcgccggggcgctggtcggcagccaggtgagtctgcatctttccatggcctccgtcggctacgtcggcgccattccggcgctggtcgcgctggtctggtcgctgatgatattccgtcgctggccggtatcgctggaagaccatcagccgcaccactcctga

SEQ ID NO: 135325 - DNA, 669 bp, Enterobacter cloacae
atgttcgatttgtttaaagcaatagggctcggcctggcggtgcttttaccgctggcgaatccactcacaaccgtggcgctgttccttggcctggccggtaatatgaacaacgccgagcgtaataaacaggcgttaatggcatcggtgtatgtcttcgccatcctgatggtgtcgtggtatgccggtcaggtggtgatgaatacattcggcatatcaatacctgggctgcgtatcgccggcggattgattgtggcctttatcggtttccgcatgctgtttccccagcaaaaagcccacgattcgatggaagcgaagatcaaatcggaagaactgcaggatgaaccgaccgccaatatcgcctttgtgccgctggcgatgccaagcaccgccggtccgggcaccatcgcgatgattattagctccgcctcgaccgttaagcacggtgtggacttcccggagtgggtggtgctggcggcgccgccgatcatctttttgctgttaggggtgattctgtgggcttgtctgcgcagttccggcgcgattatgcgtctggttggcaaaggcggcatcgaggccatctcgcgactgatgggctttctgctggtctgcatgggcgtgcagtttattattaacggcgtgctggagatcatttcgacctggcatccctga

SEQ ID NO: 135326 - DNA, 435 bp, Enterobacter cloacae
atgaaaagtaccagcgacctgtttaatgaaatgatcccgctgggtcgcttgatccagatggttaaccagaaaaaagatcgcctgctcaatgactacctctcacctatggatattaccgcgacccagtttcgcgtgctctgctccattcgttgcgaagtatgtattacccccgttgagctgaaaaccgtgctttccgtcgacccgggcgcgatgacgcgcatgctcgaccgcctggcgtgcaaaggctggattgaacggttacccaaccccgctgacaagcgcggcgtgctggtgcagttgacgccggacggcgcagccctttgcgagcagtgtcatcaggttgtgggtcagaagttacaccaggagttaacgaaaaatctgtcggcggacgaagtcgccatgcttgagcaactgctcaagaaggtcctgccgtaa

SEQ ID NO: 135327 - DNA, 375 bp, Enterobacter cloacae
atgtccagacgtaataatgacgccatcactatccatagtattttgtcgtggatcgaggataacctggaatcgcccctgtcgctggaaaaagtgtctgagcgctccggttactctaagtggcacctgcaacgtatgtttaagaaagagaccggccattccctcggccagtacatccgcagccgcaagctgacggagattgcgcagaagctcaagcagagcaatgagccaatcctgtacctggcggaacgctatggtttcgagtcgcagcagaccctgacgcgaacgttcaagaactatttcgatgttccgccccacaagtatcgcataacgaatgtacctggcgaatcccgctatctacatccgctaaataactga

SEQ ID NO: 135328 - DNA, 219 bp, Enterobacter cloacae
atgaaactattcgctgccgcagctatcgtactcttgtcgctggcctccagcctcagctatgcggagcaaaacaccacgccggtgcgtcaaaaccagcgtgatacaatgattatcccttcagaacataatgattcgccgtttgatttcaatcatatggcggctggtaatgataaatctgacgaacttggcgtgccgtactaccagcagcacgacctgtga

SEQ ID NO: 135329 - DNA, 900 bp, Enterobacter cloacae
atgacgaggaaagatggactactggcgctgctggtagtggtggtgtgggggcttaactttgtggtgattaagctggggttgcacaatatgccgccgctgatgctggcggggctgcgctttatgctggtcgccttcccggcgctgctgtttgtcgcccggccagctattccgctgcgcctgctgctgggctatggcctgaccataagtttcggtcagttcgcctttctgttctgcgctatcggcctgggtatgccggccgggctggcctcccttgtgctgcaggcgcaagccttcttcaccatcatccttggcgccttcgtctttggcgaacgtctgcagggcaagcagctggcggggatcgccctggcgatctttggcgtgctggtgctggtggagggcagccttggcggggagcatgtgccgctggtgggctttatgctgaccctcgcggcggcgctcagctgggcctgcggcaatattttcaacaagaaaatcatgtcccaggcgagccggccgccaatcatgtcgctggtggtctggagcgcgctgatcccggtgctgccgtttatgctggcctcattgttgatcgatggcccgcagaccatgctggcgagtctgcaacacatcgatctgctaacgatactgtcgctgctttatctggcgtttatcgccactatcgtcggctatggcatctggggatcgctgctggggcggtatgaaacctggcgggtggcgccgctgtcgctgctggtgccggtggtgggaatggccagcgctgcgctgctgctcggggagacgctgagcggactgcagctcaccggggcggtgctgattatggccgggctctacattaatgtctttggcttacgtttggtgcggcctggcatggcgcgcggataa

SEQ ID NO: 135330 - DNA, 1197 bp, Enterobacter cloacae
atgatcaccactctccggcgctccaccatcgcgctgctggcatcgtcgttactgttgactatcggccgcggggccacactgccgtttatgaccatctatctcacccgatgctttcagctggaggtggatgtgattggctatgccctgtcgctggcgctggtggttggggtgttgttcagcatgggttttggcatcctcgctgacaggttcgataaaaagcgctatatggtgtggtcagtgctggtgtttattcttggcttcagcgcaataccgctggtcaataacgccctcctggtggtgatcttctttgcgctgatcaactgcgcctactcggtcttttccaccgtcctgaaagcctggttcgccgaccggctgacggcagagaaaaaagcgcgcatcttctcgctgaactacaccatcctcaacatcggctggaccgttgggccgcccatcggcaccctgctggtaatgcacagtatcaatttgccgttctggctggcggccgcctgcgccgcctttccgctggtgtttattcagctgtttcttcagcgggatggcgccgccgcggcccagccgggcgccgcgccctggacgccttcggtgttgctgcgcgaccgggcgctgctgtggtttacctgctccgggctgctggcctctttcgtcggcggcgccttcgcctcctgtctctcgcagtatgtgctggtggtcgccagcagcgatttcgccgagaaagtggtggccgtggtgctgccggtcaacgccgcggtggtggttgctctgcagtacgcggttggccggcggctgagcgcgagaaatatccgcccgctaatgaccttcggcaccgtctgctttgtgatcggccttgtgggctttatgttctctggcgccagcctgtgggcgtgggggatctcggcggcgatcttcaccctcggggaagtgatttatgcccccggggagtatatgctgattgaccatattgccccgccggggatgaaggccagctacttctccgcccagtcgctggggtggcttggggcggcattcaacccgatgctgacggggttgatcctcacacatctgccgcactggtcgctttttgtcattcttatcgtggcgattgtcgccgcctggctgatgattttccgcgggatcaatgcccgcccctggcaaccggattctccgctggccaacgcctga

SEQ ID NO: 135331 - DNA, 483 bp, Enterobacter cloacae
atgaacagcaacaatcaggtcaaacaattacggctgcagcgcgcctggtcccaggagcagctggccgaaatggcgggtctcagcgtccgcacgatccagcgcattgagaatggcgaacgcccggggctggagaccctcagcgccctcgccgcggtctttgaggtgacggtggccgagatcggcggcgaagcccggcgggaagacgcgccgggccaggaagcctcactggatctgcgcatagaggaagccaaagcgcgggtgcatcaggagagccgctttttccgttcgctgtcggtggcgctggtggtttgcgtgctgctggcggtgcttaaccgcttcactaatccacagtactactggtccggctgggtcgccctgatctggggcgccctgctggtggtgagaggattacgcctgttcgtgttcggcgaatggattaaaaactggcgccaggcgcgcctgcagcggctgctgcgcaaatag

SEQ ID NO: 135332 - DNA, 699 bp, Enterobacter cloacae
atgttacaggtgagtcagctacatcaatactacggcggcagccatattttacgcggggtggatttttccacccgccagggcgaagtcacctgcctgctggggcgcaatggcgtcggtaagaccacgctgctgaaatgcctgatggggctgatcccggcgcgcagcggtgaggtacgctggcaggatcagaacatcacccatcgcaaaccgcaccagcgggtgcaggccggggtcgcctacgtcccccaggggcgcgagatatttccgcgcctgacggtggaagaaaacctgctgatggggctgtcgcgctttcccgcccgcgaagcgcagcaggtgccggaggagatctaccagcttttcccggtgctcaggaccatgaagcagcggcgaggcggtgacttatccggcggccagcagcagcagctggcgattggccgcgcgctggccagccgcccacagctgctgatccttgatgaacccaccgaggggatccagccctcggtcatcaaagagattggcgaggtgatccgccagctggcgagccgcggagacatggcgatcctgctggtggagcagttctatgactttgccgccggactggcggaccactacctggtgatgtcgcgcggcgccatcgtccagcaaggcaagggtggtgatatggagagcgacggcgtgcgcgccatggtgaccatctga

SEQ ID NO: 135333 - DNA, 798 bp, Enterobacter cloacae
atgcaaccggatgaaggactatttacccgccagctgcccggcgatcgctttcgcgaacaaaccgatccggtgctgcagctggagaacatcaacgtcagctttgacggtttccgggcgctgacggatctgtcgctggcgataggcgtcggcgaactgcgctgtgtgatcggccccaacggggcgggcaagaccaccctgatggacgtgatcaccggcaagacccggccgcagagcggcaaagcgctctatgaccagtcggtggatctgaccactcttgacccggtggccatcgcccgccagggcatcgggcgcaagtttcagaagccgacggtcttcgaagcgctgacggtggcggaaaatctcgccctggcgatgaagggggataaatcggtgtgggccagcctgcgcgcccggatgagcagcgaacaggacgatcggctgaatgaggtgctgcgcctgctgcgtcttgacggcgagcgctaccgccaggccggtctgctgtcccatggtcagaaacagtttcttgagatcggcatgctgctggtgcaggagccgcatctgctgctgcttgatgagccggcggccggcatgaccgatgcggaaacggagtatacggcggagctgtttcgtaccctggctggacagcactccctgatggtggtggagcacgacatgggatttgtcgagaccatcgccgaccgggtgacggtcctgcatcagggccaggtgctggcggagggatcgctgcgggaggtacaggccaatgagcaggtcattgaagtttatctgggacgttaa

SEQ ID NO: 135334 - DNA, 1074 bp, Enterobacter cloacae
atgagccaaccaatcaccttaacgctggcgcagcgcgcgccgcggcctctgcgctggctggggatcctgctggtgctggggctgctgagtatgccattcctggcgctgctgccggcctcccatccgctggcggtgccgagctggctgctgacgctgagcggcaaaatcctctgctacgccattgtggcggtggcgctggatctggtctggggctatgcgggcatgctgtcgctggggcacgggatcttctttgccctcggcgggtacgccatggggatgtacctgatgcgccaggcggcgggcgacggtctgccggcgtttatgtcttttctctcctggagcgagctgccctggttctggtggggcacgcagcatttcgcctgggcgatggcgctggtggtgctggttcccggtctgctggccctggttttcggctggtttgcctttcgctcgaagatcaaaggggtctatttctcgatcatgacccaggccctgacctatgccggtatgctgctgttctttcgcaacgagaccgggtttggcgggaataacggcttcaccggttttaccacgctgctgggctttcctgtcaccgccaccggcacccgcgccagcctgtttatggccacggttttgctgctgttgctgaccctgtggctgggcgcggcgctggcgcagagtaagtttggccggatcctcaccgcggtgcgtgacgccgaaaaccggctgatgttctgcgggtacgacccgcgcggcttcaagctgctggtgtggacgctgtcggcggtgctctgcggtctggcgggggcgttatatgtcccgcaggtcgggatcatcaaccccagcgaaatgtcgccgaccaactccatcgaggccgccatctgggtggcgctcggcgggcgcggcaccctgattggcccggtgcttggcgccggattggtcaacggtgcgaaaagcattttcaccgtggcgatgccagagtactggcagctgtttctcggcctcatcttcatcattgtgaccctgtttttaccccgcggggtgatgggcctgctgcgtcgaggagaccgctaa

SEQ ID NO: 135335 - DNA, 1545 bp, Enterobacter cloacae
atgaacgcattgcgtctcatgagtgtgttggcgctactgctgatcctgctgccatggcgggcgcaggccgcggaggcggacgacttcgttgccgccagtcgcagccagcaggcgcagctgttgacccagtgggcggcagcgccgcaggcggatcgtctgccgctgctgcgggcgttgaccaatgttttccggacccgacagggcggattacagccattgggcgctgtcgccgcgccgcagggcgaaacccgaccggtccgtctgaccaacaggctgcgcaatctggctgccggcgcgctggccagccaccttattttaagtgacaacgtcacagagcgagcttccgccgcacgaacgctacagcgggaagcgaccccggccatggccgcgctgctgcaacagcggctgcaggcggaaaccgatgataatgtgcggggtctgctggaggtggcgctggcgcgcctgcagctcgctcagcctgaggccagcgcgcggctggccgccgtgacgctgctcggccattccgcggacccggaaacccaggcgctgctgatcccctttaccgatgcccagcatgagccggatgcggcggtgcgcgagtcggccagcgatagcctgcaaaagatcaaacatcgtctgctgctcggcgatctgctgggccaggcctttatgggactgtcgctgggatcggtgctgttgctggccgcgctggggctggcgatcacctatggcctgctgggggtgattaacatggcccacggcgagatgttaatgatcggcgcctacagctgctggctggtacagcaggcgctggcgcagctcgcgccgcaatggctggccttttatccgctggtcgcgctgccggtggcgtttctggtgaccgccgggatcggcatggcgctggagcgcaccattattcgtcatctgtatggtcggccgctggaaacgctgctcgccacctgggggatcagcctgatgcttatccagctggtgaggatgctgtttggcgcgcagaacgtggaggtggcaaacccggcctggctctccggcggcgtgcaggtcctgccgaacctgatcctgccgtggaaccggctggcggtgctggcgttcgtcctgctggtgctgtgttttacctggctcatcctgaaccgtacccgtctggggatgaacgtccgcgccgtgacgcagaaccgggcgatggccgcctgctgcggcgtgcctaccgggcgggtggatatgctggcctttggcctcggctctggtattgccgggctgggcggcgtggcgctgtcgcagcttggcaacgtcgggcctgaactgggtcagggatacatcatcgactcgtttctggtggtggtgctgggcggcgtcggccagctggccggcagcgtggcggcggcctttgggctgggcattttcaacaaaattctcgaaccgcaaatgggcgcggtgctgggcaagatcctgatcctggtgatgattattctgtttattcagaaacgaccgcagggtctgttcgcgctgaaagggagggttatcgactaa

SEQ ID NO: 135336 - DNA, 1272 bp, Enterobacter cloacae
atgcaacgtagaacgttattaaaagcttttgcactctccgcctctgttatggctatgggtctctcctttcaggcctatgccgccgacaccatcaaagtcgggatcatgcattcgctctccgggacgatggcgatttccgaaacgccgctgaaagacgtcgcgctgatggacatcgacgacatcaacgccaaaggcggggtgctgggcaagaaactggagccggtggtggtcgacccggcctccaactggccgctgtttgccgagaaggcgcgccagctgctggcccaggataaagtggcggtggtgtttggctgctggacgtcggtctcgcgtaaatcggtcctgccggtgtttgaggagctgaacggcctgctgttctacccggtgcagtacgaaggggaagagatgtcccccaacgtcttctataccggcgcggcgcctaaccagcaggctatcccggcggtggaatacctgctgagcgaggacggcggcggcgctaaacgtttcttcctgctggggacggactacgtctatccacgcactaccaacaagatcctccgcgccttcctgcatgccaaagggatccaggacaaagatatcgaggaggtctacaccccgttcggctacagcgattaccagaccatcgtcgccaatatcaaaaaattcgccgccggtggcaaaacggcagtggtctccaccatcaatggcgattccaacgtaccgttctacaaagagctggctaaccagggtctgaaagcgaccgatgtaccggtggtggccttctcggtgggggaagaggaactgcgcggcatcgataccaaaccgctggtcggcaacctcgcggcatggaactactttgagtccgtcgataatccgaccaacaaagccttcgtcgccgattatcgcgcgtatgccaaagcgcacaagctgccgaatgccgatacggtggtgaccaacgatccgatggaagcgacctgggtgggtctgcatatgtgggcgcaggcggtgaccaaagcgggcaccaccgatgtcgataaagtgcgcgaggcgatggccgggcagaccttcaacgcgccgtccggttttaccctgaccatggatgccactaaccatcatctgcataagccggtgatgatcggtgaaattgaaggcaacggccagttcaacgtggtctggcagaccgataaacccgttcgcgcgcagccgtggagtccgtggatccccggtaacgataagaaacctgaccatccggtgaaaaccgtcagccagtaa

SEQ ID NO: 135337 - DNA, 1104 bp, Enterobacter cloacae
atgcaacgtcaacaggccccgttccgcgcagacatcgtcggcagttttttgcgcccggacagcattaaacaggcgcgtcagcagctggctgaggggattatcgacgccgctcagctacgcgagattgagaataacgcgatccgtcatctggttcagcagcaatgcgactgcggcctgcatgtggtcaccgacggtgagtttcgtcgcgcatggtggcatttcgatttcttcgatggcctgcagggcgttgaacgttacgatgccgagcaggggatccagttcaacggcgtgcagaccaaagcgcacggcgttcgcgtcaccggcaagctggcgtttggcgaccacccgatgctggaggatttccgctatctgaaaagcatcagcggcgacgcgcagccgaagatgaccattcccagcccgagcgtgctgcacttccgcggcgggcggaaagatatcgatgccacggtctacccggatcttagcgactacttcgacgatttggccaccacctggcgcgacgccatccgcgcgttttatgacgccggctgccgctatctgcagctggacgataccgtgtgggcctatctgtgctccgatgcccagcgccagcaggtacgcgagcgcggcgaggatccggatgcgctggcgcgtatttatgcccgggtgctgaaccaggcgctggagggtaagccggccgatctgacggtgggcttgcacgtctgccggggtaacttccgttcaacctggatctcggaaggcggttacgagccggttgccgaggtgctgtttggcagcgttaatgtcgatgccttcttcctggagtacgacaacgaccgctccggggatttcgcgccgctgcgctttattcgtcccggccatcagcaggtggtcctcgggctgatcaccaccaaaaacggcgagctggagaatccgcagggggtgaaagcgcgtctcgccgaggctgcgcagtatgtgccgctcgagcagatctgcctcagcccgcagtgcggtttcgcctccactgaagaggggaatgccctcagcgaagaccagcagtggcaaaaggtccgtctggtgacctccatcgccgccgacgtctggtaa

SEQ ID NO: 135338 - DNA, 399 bp, Enterobacter cloacae
atgagtgtagtaacccaatttccccccgccacctccgctgaggctatccgctggttcagccataagctgcatcttgagaccgactgcgccgatgtgcacagcgcccagcgtgccggcgaggtcgactttgtcctgctgcacgtggtcggcagcgaggaagctttcgccagacgtcacctgccaggcgcgcagcatctcccgcacagccagatcaccgccgagcgaatggcggcctggccggcggagaccctctttgtggtctactgcgccgggccgcactgcaacggtgctgacgttgccgcgctgaagctggccgagctggggcggccggtgaaaatgatgctcggcggactcaccggctgggaagatgagggctatgcgtttgtttccggtaaatga

SEQ ID NO: 135339 - DNA, 288 bp, Enterobacter cloacae
gtgggcggaagccagcgcggcgcacagcgcctcggggaccggggcgtcgacgccgcgccagccggggaccacaatcgtatcagcctgggcgagaagttcaggaccgccgtcggtcatcaggcggatgccgccggtagcgcacagcggcccttcatcgacggcggcgacggcgaactggtaccagttgtcgcccatttccgggcgcggcaggccgaagatctccacggctacgccaaactcaaaggtgcacaggccatcgtaggcgagggcgaccacctgatgacgtga

SEQ ID NO: 135340 - DNA, 783 bp, Enterobacter cloacae
atgttcggcatcgcgtttcacgtcgaacctgtcgcgccactggctgcggaacagttcgatggcggttttatccgtcgggaactcatgggcgggcagcagattaatggagtccacttcctccagcgtgcgctgggtgtcggcgtcgaacacgcgcaagctgtcgatctcatcatcgaagaaatccagacgatatggccgatcgctgcccatcggataaagatcaagcagcgcaccgcgcgtcgcgtattcgccgtgctccatcacctggtcgacatgacgatagcctgctccgtccagctgcacgcgcagggcatcgcgcgacaggcgctggccttttttcatcaccagcgcatggccgtgcaaatagctgtgcggacagacgcgctgcatcagggtattcaccggcacaatcagcacgccgcgctgcatggtgggaagctgatacagcgtcgacaggcgcgaggagatgatctcctggtgcggagagaaactgtcgtagggaagcgtttcccagtcggccaggctgaataccagactgtcggtgaactgacgaatttcgtcgtgcaggcgcagggcgttttgcatgtccggggcaaccagcaccaccggccctggatgccgctcggcaatttctgccaccagcgtggcgcaggccgcgcctgtcagttcgcccagctggcgttggtcacctgcttttacaggcaaggaaaaacgatagtgttcaggcatggctatgtcagagtctcttggggatataccaacagtattggggcatatcactga

SEQ ID NO: 135341 - DNA, 792 bp, Enterobacter cloacae
atgcttaaacgcatagccctctttggccgcacgctgggcgtagatatccagcagctcggcggccacgtcgcgtactttttctgccgccttctggcgcgcgcgcgcccaggcatcgccgcccagcttgtgcagcggcgcattctcttccgcccccccggcgtagcggctgataagatgcagggacgacaccggcacatacagtttggcgtcgttggcgtaggtcagcatcaggtattcacctttgatgccgcctgcttcgagggtggtcatcccctgataacgacccacaccgtgttccaggtgaacgatcggctgaccggggtgcagttcggccaggttacggatcagggtgtccgggttgatggtgcgacggctgtcctgacgacggcgcgcgacgcgctcgcccagcaggtcgctttcacaaatcaacgccaggttattgagcgtatcaatgaatccgtgctcggcggcgccgatcatcaggtaacggccattaccggtcgcttcgctcagacgaagaatgcgctttggcgcgactttgatccgtcccagcagttcgcccagcgcttcacggcgaccttcactttcaacggagaagaccaccggcccggtgaaggactcaagaaacttgcgcagattatcaagcggggatttctgctgcgcctgaacagccaggtcaggcagtgtccggaacgcgagattggtgttcgctgccttctcggcaagcaaatcggttttcagctgcatgcgcggccagcgtttcagctcggcgttgagctcgtcggtacgtag

SEQ ID NO: 135342 - DNA, 342 bp, Enterobacter cloacae
gtggcgcaccccgaagcggtgctcttcgtcgacgatcagcagccccagatctttccacttcacgtcactttgcagcagcttgtgagtgccgatcagaatatcaattttgccttcactggcctgttccaggatctgcgtctgctctttggcgctgcgaaaacgcgacagcatctctatgcgtaccggccagttggcgaagcggtcgcggaagttgtcgaagtgctgctgggcgaggagggtagtcggcaccagcaccgccacctgcttgttgttttccaccgccaggaaagcggcgcgcatcgccacttcggttttgccgaagcccacgtcaccgcagactaa

SEQ ID NO: 135343 - DNA, 2871 bp, Enterobacter cloacae
gtgcagcagtacggcaatcttaatggtactgaaggcaatctctcgcaactggttggcgtctcgctgctgagcacgattaatgtgtcgctgttgtcgggcagtagcttccgcttcaacgtggacaacaacacaacagaggatatgacggttgatgtcagcggcgtgtctctgctttcaacggctgggctgttaacgtcgatagtcaatctgctgggggctggaaatacgctgacagccgatctgtcggtgattgatatcgcgactggacgcgtagttgctatcgacgcgggaagcgtgagtattagcgcaacgttgcttggtgggttggtctatagcggaacagcttcctttgagaatctgcctgctggtagctatgcgctggcgatatcctcaccaaattccgatggagttctggtgagcctgatcaacacgctcgcaggtgcaggagtagccacctttgtagaagcaacggtaaccgattcgctcggttatagcggaagtaccgttacaggcaatgtgctggagggatcggataacggcgatatggccgatagcggtaccgaccttacggtaacgtcggtaacggccaccactgctgcaggtgagactttctcagtgaatggcggcaccatatcggtaacgggtgcttacggcgtactgactattaacgctgacggcagctatagctaccaggcatcaggtaaggccgggtcggcaggtaatgcggatgtatttacctacaccattacggatggtaatgggctgcaatcaaccaccaccctgactatcaatatcggtcaggaggtcgagaccgcccaggctaatccggatacgcaggcttattacgtcggcaacgtcgaagataatcttgatatccaggggggcaatgtcgttcaggtggcgggcctgtcgctactgaataccgtgaatgtcgcgcttccgaccaatggctttaagtttgtcgtggctgaagggactgaacaggatgtgacgttaggcgtttcggggtccactgcccttagcatcgcgctaggcgccgttaccctggatctcattctgatcaataccgacactaaccagatagtcggcgttattaaggatggaattacagcaacgccgacaggtttccttggattaagccttgaatacgcgggaggaggggagtttgaaagaattggcgccggtaactatatggttgttatttcgtcgccgactactgaaggattgattggttcgatactgaatctgaatttgggcaccagcattagtatggaggtgacagattcgactaaatacgtgacggggaatgttctgcacaccgatagcgatggcgatgttggcgatacaggtaatgaaattaccgtaagcagcattcagtttggatcgcagatcgaaacagtcactgccggcggcgtcacgattaacggtacatacggtactctgataatcaagtctgacggtagttatagttaccatgctaatggaacaacaggggtgggtcagagtgatgtcttcacctacacgataacggatgggctgggtcatacatcgtcgactacgctgacgatgaacattgagtcaacgccaccggtagcggttgatgatatcgcctccctgtcggcggcaacggcaatgcagtcggttacctggacgcaaagcgtcagcaatcttgcagtgccaaacacggcagtagcggctaatgcgacatcggcggcgaaagtcaccagtcagaactttaccattgctgaaggccgggaggtggatggagcatctatcactctcaacttgagtggtaaccgaaccagtggtctctcactactgaatggcgatctttctgggacggtctctcttatccatcatgtcactgttgatggtgtcacaacagatgtaacggtgtggacgagttctctgacgatggctctggatggttctctccttagcccgtcatccgatacggatactgtgacgctgaacatggttaacggcggcattccgctacaactggcggcaggtgattatactctgagtattagtcatacgatgcatgccggcacggcgttgtcctacaacctgtcagcgagcgtagcaggaacagagatccttaccgatgcgcatctgacggtcgggcaatctgtggcagggaatattctcgacggttccgatgcgaatggaacaccagacacgcttggttcgctgcatagcggctttacgataagtggcgaaaacaatctgggtatcgcgaccaactggaccttccattctgatggcacagtaactaacaatacgggaaccagcgcatctaatggaaatgcggtgctgtatggtgaatacgggatcctgaccattaatgggcaaggtggttacacctatcagttgaacgggggtgtgaataccgatgcaataacgtctaaggagacatttacttatacccttattagtagtgatggcggcagttcgacggcgaatctgacgatcgatctgcacccgcagatcgccggcagcgtcaatgacgatagcgttcatagtaccgcttacgatgacaccttcagcatgggtgtgggagccgatacgctggtttacaacctgctggcggatgacaacaccggaggcaacggtagcgatatctggagcgatttctcggtcgcccagggagatcatatcgatgtttcggcgctgttggtcggctggaatggttccagcgatacgttgggtaactatattactctgagttatgtcggcggaaacaccgtggtgtctattgatcgcgatggaacgggtggaaacacccatcaacctgcgacgttgattacgctacagggggtccatatcaattcgctcgatgagctaattgataccaataactcgaactaa

SEQ ID NO: 135344 - DNA, 1437 bp, Enterobacter cloacae
atgcgtctatttcaaaaaaaagggatggtcagcgtttacagctgcagcactattttcctgtcaatctgcgtggtattaacggttgacgcagaggagctttcttttccgcccaccagcatcagcacccagaggttaaacgatactcagcaggtcgccggatatagcgaagagcttatcaaccctgaaagtcatcttgccggtccactggatattgctaccgcagtaaaatcagcagtcaattggcatcctgctatcaatcaacaggtgagtaaacttcaggagcaggtgcaaaaagtggatgtagcgaaagccaaatattatccgcaggttaatgcgggtatgaataatgggtacagtaacacctactctgattctggatattccccctcattagttgtctctgtttcgcaaatgctgtacgactttggcaaagtctccagttcggtgagagcggcggacgctgccgttgcccaacagcaggcgatggtcatgcttaatatcgatcaggtggctcatgataccgcgggtgcagtggtacagctgcaaggttatcaaaagctcgtgaaaatagcccaggcccaggtcgattcgttaaagcatattggcgatcttattcgccagcgcaacgacgccggggcgacatcgctttctgatgttgtgcagacggatacccgcgttgagggtgcgcaggcgacgcttatccagtatcaggcagcgcttgagcgctggaaggcaacgctggcgacgtatcttggtctcggaagtattacctccgtaaccgaaagcgtaccgcaggctatggatgccgcctgcgccgttagtaaaatcgattatcgaaccgtaccagcggtgctcgccgctttggcccaggctacacaggcacaagcccaggtagataatgccaccgcgcaaatgttgcctacaatctcgctggaacctcaggtaacgcattacctcaatgataattacgccaacagcgcggtattaaataaaacgcagtattcggcatgggtcaaagtagaaatgccgatctaccagggcggcgcgctaacggcttcccgcgaagcggcgcagcaaacgctgtctgcggcgaatgccgggatcagaaacgcgcaactcgatgccagccagaagttgagcgcctcccgcgacgaggcggtaaacctgaaacagtctatcgccatccagcgccgccagcaattgcttggcgaacaaacccgcgccctgtatcaggatcaatatttacagcttggcacgcgtccgttactcgacctgcttaacgtcgatcaggaaatttatcaggcgcaatttaatcaggtattaactgaagcgcaactgcgaaatctggaactggactgtctgttcagtacagggaaaatgcgcgccgtttttgctctggataaccaaagaattcagggcgtggagattcgaccatga

SEQ ID NO: 135345 - DNA, 2172 bp, Enterobacter cloacae
  misc_feature (940)..(949): n is a, c, g, or t
atgagcgaacaaccccagcgcagcgatattccgcatttacaggattgggctaacgctatggcttttgtcgccagccattatcggcaaagttactcaccggggacgcttcatgccgcggcggagtgggcgacgcaaaaaacgctgcctgatgcgcttaaacatttatgccgtcatgccggattgcattgccaatttcttaatggcaatgaccggaaaatgtcggcctggcggctgccgcttgtggtacagctcaaagatggccagattggcattattgaaagcttcgatctacataactcagtcgggatccgttttgtcaaagagcttacattactaagccactgtccgcttgactccttgttagatgaaattgaattcactgtggcttttcgtccggcctcgccggagaaagatattagaactgaaagctacctcacacgcttccagccggactggttacgtaagatcgttttaaaagattggcgtccctatacacatgtcatgctggcgtcgctggcgatcaatattttggcattagccggtatcctgttttccatgcaggtatatgatcgggtaattccggcccaatcctatcccacgttatatgtcttgtttagcggcgtattaattgccgcagtgttcaatttcgttctgaaaattacccgcggtcacgtgaccgacctgctgggaaaacgtggggatattcgtatctccgatcgcgtatttggtcacgcattacggctgaaaaataccgcggtgccgcgctcgacgggcagctttatttcccagattcgcgagctagagcaggtacgggaaatgatgacctcgaccatgatgacggtcattgccgatttaccttttttcctgctttttcagcttgtgctatttatcgtctcgccatggctgagttggatcgcgcctgttgcgactatcctgatgnnnnnnnnnngacagatcctgatgctgttaccgggattgttactgcagaaaaaactggctgagctggcaaataaaaatcagcatgaaagcacgctgcgcaacgccattttggtggaaagcattcagggcctgccggatataaaaatgatgcaggcagaaagtcgctttctgcaacaatggaacagctatgtggcgattactgcggaatcgggagttcaaacccgaaaagtcactcatgggctggtgagctggggcatgtcgatccagaacctgttgtatgccaccgtagtggccgttggggcgccgctggtgattaatggcgacatcacgaccggcgccatggtggcggcatcgatgctgtccagtcgaatggttgctccgatgacggcgctctgcggggtactggctcgctggcagcaggtgaaagtagcgaaagcaagcctggataatttaatggcgctgccggtagaaggggggctggatgagccgcggatccatcgagcggttctgcacggtaattatgaatttcgcaacgccgagtttcgttacggcaaagacaatggccccgcaccgctgcgaattaaacagctttctatcaaagccggggaaaaaatagctgttctggggcgcattggcgccgggaaatcaacgcttttgcaggcaatgatgggtaatgttgagttgacgtcaggcgaactaaggcttgacgatctttcgctgccgcaaatcgatctggcggatattcgccgtaatgccacgctactgacgcaggaggctcggttatttcatgggacattaagggaaaatgtgaccctgggacggcctatggcgagcgatgatgaactggtgaaagtgctggagctgtgcggtgcgctggagtttgtcaacaaactgcctatggggcttgaacatctggtgatggagggagggcttgggctttccggcgggcagcggcagtcactgctgctggctcgagcgctcatccgcgatcccaatattattctgctggatgaacccacctcattctttgatgaacgaacagaaaaagcgtttgtcgagcagttggcccgttgggcaggagaacgtacgttaatcatcgccactcacaaagcggcggtgctcaatatcgtcgatcgtatactggttattcaggacgggcagctggcgctggataagcctaaagcgacggtatttgagcaagaaaaagcgcgtgctcaggtggtgaacatatga

SEQ ID NO: 135346 - DNA, 1221 bp, Enterobacter cloacae
atgaataagcccactgctgcgattttcccgttggtaaaggaactcgatccggttgctgcgatggctgataacgagcgtgatgaggccgagctggttaaatcgcgccgcctgatcgctttactggcgctactgctggtggtcacaggcgtttgggcgtggtttgccacgcttgatgaagtatccaccgggaccggaaaagtgatccccagctcgcgcgaacaggtgttgcaaacgctcgatggcgggatcttaactgagctgaacgttcgcgaaggcagccgtgtcgccgcgggccaggtggtcgcacgattggatccgacccgcagtgaatccaatgttggcgaaagtcaggcaaaatatcgcgcgtcattagccgcaagcattcgcctgaccgccgaggtgaacaaccaaccgctgatttttccaccatcgctgaaggcctggccggggctactggcggaagaaactcgcctctatcacagtcgcagggagcagctaacgaagtctatgcggcaactggagcagtcgttatcgctggtcaatagtgagctggcgataaatgaaaagctggctaagaccggtgcggccagtaatgttgaagtgcttcgtttacgccagcaggctgccgatattgagctaaagaaaattgacctcaacactcgctactatgttgatgcccgcgagcagttgtcaaaagccaatgcggatgtcgccagccttgccgaagtgattaagggccgggcagattcagtggctcgattgaccgtgcgctcaccggtgcaggggatcgtcaaaaatatcaaagtgaataccatcggcggggttatcgcgcctaacggtgaactgatggatatcgtccccattgatggtcgattgttgatcgaagcgcggatttctccgcgcgatattgcatttattcatcccgatcagaaggcgctggtgaaaattaccgcctatgattatgccatctatggcgccctcaatggtgttgtcgaaacgatatctcccgacacgattcaggacgaggcaaaacctgatgtttactattatcgggtgtttatccgtaccgatcataactatctggaaaataaacgcggtaagcgttttttaataggtccagggatgatcgctacggttgatattaaaaccggagagaagacagttatggattatttggtgaaaccatttaatagggcaaaagaagcgctgagagaaaggtaa

SEQ ID NO: 135347 - DNA, 2316 bp, Enterobacter cloacae
  misc_feature (2231)..(2240): n is a, c, g, or t
atggcattgagcgatttattacaacaggcttgctttcagtgcaaaccattaaaaacgaccgcattgcctgctgattatcctgggtgggtcatcttttttagcgtcagtgacggtaagcagcgtgcgcatgtccatgtttcgacagcagccagctttgatcaagcctggctagccggggccagagcgctgcaggagtggcgtaaaaagcaagataatgaaacccaatggttacgaattgatattgtcgatagcgtagaacagctaacgtgggaaactctattaaagaaactcaatatcaccaaacgcaattattttcgcttcggtatctcttttgatacacaatttacgcaagcgatccttgaacaggaaattgcggcgaatgctttactttatgatggggacaatggcgtagcggcgccaaatgacatcaatctggaaaattatggtcaacgccgatttaagcgcagtttgaactggccgagcgaacctcagcagatactatggcggtttaaaacgcgttcagtattctgcgatcgtaacggagctaaactcatcgaacatactggccgcagttccggctaccgcgttatcggtgatgaatggcaaaaaaattatctgcccgaggttattaaaaaggggagcgattatctggctcgtcaggtcaaaaaagacggactctattattacggatggtttccctgctttgaccgtcctgtgcgatcctataatgctttacgccatgccagctcaacctattcgctgattgaggggtgggaggcgactaagcagccgcaccttcgtcaggcgatcgatcgggcgattgcttacctggtcaataaccttatttctgttcgtacgcttgctgatggacgacaggctgcgtttctttgtgatgtcgaaaatgaaattaaacttggcggtaatgccgtcagtattctggcgctggtgaaatacaccgaaacgacgggcgatcgacaatatctggacttgttgtcgcaactggccactggaattgcatttatgcaggacgcgcaaagtggtgagtttgttcatgttcttaacagccacgacctctcattgaaagccaaacatcgcatcatctattacgacggtgaggcggcttttgccttaatgcgcttgtatagcttgacgttggcgccgcagtggctggttatggtggagaaagcatttgaatacttcattcgacaaaaacactggcagcatcacgatcactggttgagctattgcgttaacgaattaacgcgttttcgcccggaggagcgttatttccgcttcgggctggacaacgtgcgcgatcatctggatttcgtgctgcaacgggtaacaacctatccaacgctactggagttaatgatggcggcggcggaaatgattgcgcgcctggaggcctctaccacacagcgccatttgctcgacgactttgataaagacaaattttaccaggcgctggaggcgcgggcgcgttatttactggatggtttcttctggccagagctggcgatgttttttaaaaatcctgcgcgtatcgttaatagtttctttattcgtcaccatagctatcgtgttcgaattgatgatgtagagcactatctgtcaggttatatcgcttatcagaagtattttcaggcagccagcaaacgtcagcaatcgccaatcgcggcgccgcccgcgcctcggggaacgaccctttttttgttggagaatctgcgcgacgtggggaatggtattgaggttgcggctacccggcgagcaaggctgtttgttgaacatttacacaccgtcccgtggcttatcaccgccgtctggaacccagaccttaacgatgcggtaaaagcgttgaaggcacggggagcgttgccggaagcggtgccggtttataacctctacaatgcattagcgtcgtgcctgagtgcggggaagatcgtcccgcttcccgggctgaaaggggaggttgagcttcgtcagacagttgtgccgaaagcagaggcgccaatcggtaaaaataattatcaattacgcccgcaggggcaattggtggaagattacgtcgatagcgcaggaaacgtgttgctgcgtaaatattttgatatcaagaaagcgaatctgcagattatccgcatggatgtcgctttgccgggcggggaggtcaaatcctttaaccaacaggaagcgtttttctcctggatgctggaaatgatgctgcccgcagnnnnnnnnnnggcaactggcattttatcgtcgataaaaacaaagcgtggaaagattttgtctgttcgcaaccggcacagcggatga

SEQ ID NO: 135348 - DNA, 831 bp, Enterobacter cloacae
atgaactgcacggttagcgcggtcatccactctcatcatcaattgctaaacggcgggataaaagcttcttaccgtcatttactggaacaaccgcaactggtggatcggttaatcgtactcaccgacgaacaatggcaagatttacagcaagaggggatccccggcgctcgccttgtggtcatccccaaccatatggatgacagcaaaattccggttaacccgcaaaaggagccctcagaaacggtcatttacctggcgcgttattctgaagaaaagcagcatctgacgctgttcaacgcattccgtaaagtgtccgcacaacgtcccgatgcgcggctccatacttatggcgtcggcccgcttcgccgtaaacttagcgatcaggttaaggcgtggggattagaagacgtgataaaaatcaacggatttacctcggatattgctgccgttcatcgacacgcttgctgtacggtcctctgttcaaatcaggaggggcaatctctgtcggcggtcgaggccatggtctacggcacgccgttaattagttttgctattaaatatgggccgcgcgatattctgcaggaccgccaggccgggattctggtgccttacggcgacgaagaggcgttggccgcggccttagttcgggttatttccgataaggcgctacaaaaagagatgcaggccgccgctatccgcaatgcgcgccgttattacgctaccgcgatagccgggcgctgggaaagctggttacagcacaatgagcagcgaatgaaggagcaggaggagaagccactcaatgtggcttcgctcaaacaacgtgtcgtgtaa

SEQ ID NO: 135349 - DNA, 876 bp, Enterobacter cloacae
atggtgcaggaatcccgctgcgtcaaaggttcgatattacttaatcatcgtctcgaaaaagaatatgttgaagatgatttccatattttttatagcctgcaagggcgagacgccctcaaatatcagtacgacagctcaggcagtggcgtccctgacagtatcaaagatattgccgggcaactacaggccgctaaatacctctattccagtgtgcttggccttcgctttccgttacagcaaaagatctatgctcaggccaggcaaatcaatgtctatgtgctgcaactgccgaaaggaaatggtttggccttcgatcgcgtggcggcagaaacgatgagtgacggcaggcagctgccttgcggtttaaagtttgtattgaatgccgcgctggaaccggcgcgtaacattacgccagctcatgaatttttccatctttatcagtatggctatgccgtttttaaacaaaagtggtatctggagggaatggcgcgatggatggagaacagctttaaagcgcctgagaaaaatacccggcggctctctccgcttcctcattgcgacagtaattttacccggggttataacgccgcgaattactgggcgagctttgcgcaagcacattttgctgatgtcgctatccccgccgcagcacagcgttttcgttacagcgacggttcgccagttttaatagcgcaggaagtaaaggggggagcaatgctagcgccgttttttaatcagttggcgcagggcagcgcggcacagtcgcggcagttaaatcaggcgaacatccgctggtctgaagctcagcagcgcagtccgcaatttaatgaggcaatctgtcaggcgttggccgccgcggtggcagagaaaaaatag

SEQ ID NO: 135350 - DNA, 318 bp, Enterobacter cloacae
atgatagccagcaaattcggtatcggccaacaggtccgccatacgctcttgggctacctgggcgtcatcgtcgatgtcgatcccgagtattcgctcgcggagccggaagaggatgaaattgccgccaatgacgaattgcgcgcggcgccctggtaccatgtggtgatggaagatgatgatggccagccgattcacacctatctggcagaagcgcagctgagcagcgaaacccgcgacgaacacccggaacagccgtcccttgacgaactggccaaaacgattcgtcagcagctgcaggcgccaaggttgcgtaactag

SEQ ID NO: 135351 - DNA, 1176 bp, Enterobacter cloacae
atgacagattccctattcccccgcttagtgttagccaaaggacgcgagaaatccctgctgcgtcgccatccgtggatattctccggcggcgtcgcccgcatggaaggtaaagcccgcagcggtgaaaccatcgatatcgttgaccatcagggaaaatggctggcccgcggcgcttactcgccgtcgtcgcagatccgcgcccgcgtgtggaccttcgaccgcaatgaagccatcgatagcgccttctttgaacgccgtctgcagcaggcgcaaacctggcgtgcctggctggccgagcgcgatggcctcgacagctaccgcctgatcgccggcgagtccgatggcctgccgggcgtcactatcgaccgctttggcaactttttcgtgctgcagctgctcagcgcaggcgccgaataccagcgcgccgccatcatcagcgccctgcagaacctgttcccggactgcgccatttacgatcgcagcgatgtcgccgtgcgtaggccggtggtgggcgaactgcccccggcgctgctgccgatcaccgagcacggcatgaagctgttggtcgatatccagggcgggcacaagaccggctactacctcgaccagcgcgacagccgcctggccacccgccgctatgtcgcggataaacgggtgctgaactgcttctcctacaccggcggctttgcggtgtcggcgctgatgggcggctgccgccaggtcaccagcgtggatacctctcaggaggcgctcgacgttgcccgccagaacgtggagatcaacggactggatctgtccaaagcggagtttgtgcgcgacgacgtgttcaaactgctgcgtaaataccgcgatcagggagagaaattcgacgtgatcgtgatggatccgccgaagttcgtggaaaataaaagccagctgatgggcgcctgccgcggctataaagatatcaatatgctggcgatccagctgctgaaccccggcggcgtgctgctgacattctcctgctccgggctgatgaccaccgatttatttcagaaaatcatcgccgatgccgcaattgatgccgggcgtgatgtacaatttatagaacagttccgtcaggctgccgaccacccggtgatcgcaacctacccggaagggctgtatctgaaggggtttgcctgtcgcgtcatgtaa

SEQ ID NO: 135352 - DNA, 555 bp, Enterobacter cloacae
atgaaaacagctatccgcatggctgtggcgatgttagcggctgtgagcagcggcgcgatggccgcgccgtttagcgtaagcagcaatgatatgcgtgacgggcagccgctggcccagcagcactggtttgccggtttcggctgtaccggaggcaatgtctctccgcagctggcatggaaaaacgccccggcgggtacgcgcagcttcgcggtcaccgtccgggatcccgatgcgcctaccggcagcggctggtggcactggacggtggtcaatatcgccagcagcgtcttttcgctgcccgctggcgcgggagataaaaacagcgctacactgccgggcggagcgatccagggccgcaacgattttggctatgccggcttcggcggcgcctgtccgccggcgggagataaaccgcaccgctatcgctttacggtatgggcgctggatgtccccacgctgccggtggatgccggggccagcggggcgctggtcggctatctgttacacagccatgctctcgccagcgcacagttgacggcgatggccgggcgttaa

SEQ ID NO: 135353 - DNA, 789 bp, Enterobacter cloacae
atggagagtatccgctttcagcataacgccttaaccgcggcggagatcaccacccgacggctatgcagactgcatcgcgtgcggctgttctccccggcgctctgtcgggtgaaacgcggcagcaaagtgattgtgcaaggggagagccgggtgctggcgactccgcaacagctgattgttttgccagctgatgtggaactggaggtgattaaccagccggagaatggcctcttttgctccgatctgctatcgctgacgcccgagctgctgacgaggtttaagactcgttatctcagcgaatcaccgccaggacgcctgacctcgctctgcgcaccggtgacgacagagctggcgtttatgtggcaaagcgttctgcaggcggtgcgggagggattgtccgtcgcgctgcagcagcaccagaccatggggctgctgctggccctgtatgaggctggctatgcgggcccgctgctcgtcgagcggcagcaggatctgtcggcgcaggtgcggcagctgattatgctgtcgccggcgcaggcatggagcgtgtcgcgggtggcgaaaatgctctttctcggcgagtccacgctgcgccgtcggctgcagcaggaatcgcagagttttcgccagatcgtcgaggaggtgcggatggcccacgccctggggcagctgcagaccacctcgcggccaataggcgaaattgcgcagaacagcggatatcagtcgggatcgcgctttaccgcgcgcttccgtcagcattatggtttactgccgaagcatgtacgctga

SEQ ID NO: 135354 - DNA, 282 bp, Enterobacter cloacae
atggccagtatctgcacaatggcatgggtttacggttcggttcagggcgtgggatttcgctattccacgcagcgggaagcgctgcagctgggggtgaccggttatgcccgtaatctggatgacggcggggtggaagtgcttgcctgcggcgaggcggagcaggtggaaaaactcatcgcctggctgaaagccggggggccgcgcagcgcgcgggttgaccgagtgttaaccgagccccatcaacccacccgcagctgggacaaattcgcgatcctctattag

SEQ ID NO: 135355 - DNA, 660 bp, Enterobacter cloacae
atggatcgcataattacatcatcgcgtgaccgttcctcgctgctcagcacgcacaaggttctgcgtaacacctacttcctgctcagcctgacgctggcgttttccgctatcaccgccaccgccagcacagtgctgatgctcccttcgccgggtctcattttgaccctcgtggggatgtacggtctgatgttcctgacctacaaaacggcgaataaacccaccgggattatttccgccttcgccttcaccgggttcctcggctatatccttgggccgatgctgaacgcgtatctttctgccggcatgggcgatttaatcggcctggcgctgggcggcacggcgctggtcttcttctgctgctcggcctatgtgctgacgacgcgtaaagacatgtcattccttggcgggatgctgatggccggcgtggtggtcgtcctgattggtatggtcgctaacctgttcctgcagctgccggcgctgcacctggcgattagcgcggtgttcatcctgatctcttcgggcgccatcctgttcgagaccagcaacattatccgcggcggtgaaaccaactatatccgcgcgacggtcagtctgtatgtctcgctgtacaacatctttgtcagcctgctgagcatcctgggcttcgccagccgggactaa

SEQ ID NO: 135356 - DNA, 1653 bp, Enterobacter cloacae
atgacattacacaaaaaaaatcacatcacccgaacactcctggctgtcagtatgctggctatgagcggcggggcgctggcggcgcaggtgccgccgggcacccagctggcggaaaagcaggagctggtcagaaataacggcagtgaaccggcgtcactcgatccgcataaagtcgagagcgatgttgaattcaatatcattagcgatctctttgaagggctggttaacgtgtcgccagcgggggcgatccagccgcgactggcggaacgctgggaaaacaaagacaacctgttatggacctttcatttacgccccggtctgacctggtctgacggcacggccattacagcgcaggatatcgtctggagctggcaacggctggtctcgccggcaacagcctccccctacgcgagctaccctggcaatatgcatatcgccaacgcccgcgagattgccctcgggcaaaagggacccgagacgttgggggtgaaagcgctgaacgacaccacgctgcaggtcactctgacccagccgaatgccgccttcctggcgatgctggcgcacccttcgctggtaccgatcgacaaagtgctggtggagcggtatgccgataaatggacccgaccagagcatatcgtcaccagcggcccgtataagctgtcccaatgggtggtgaatgagcggctggtggctgaacgtaatgcaaagtactgggataatgcgcataccgttattaataaagtgacttacctgccaatctcttcggaggccgccgatgtcaaccgctacaaagcaggggagattgatattgtctatacggtgccgatcaatcagtttgcgcagttgcagaaaaccatgggcgaccagctggacgtttcgccgcagctggcgacctattactacgaattcaatactacccggccgccgtttaacgacgcccgtgtgcgtcgcgcgctgaatatggcgcttgataaagatatcattgccggaaaagtgcttggccagggccagcgcccggcctggctgatcggtcagccggatatcggcggcgtgacgctgcataacccggactacgccagctggccgcgtgagaaacggattgccgaggcgaaaaaactgctggcgcaggcggggtatgatgaaagccatccgctggtctttaccctgctctataacacctctgagtcgcaccagcgtatcgccattgccgccagctctatgtggaagaaaaacctcggcgtcgaggcgaagctacagaaccaggagtggaagacgatgctggataccatgcatacgcataacttcgacgccgtccgctacgcgtggattgccgactacgacgatgccgccaccttcctcaatactttccgtaccggtgatagcgagaacaccagtcagtacagcaaccctgcttacgatgaggccctgcgcaacgcggcgaaagcctccgacgtggcgacccggggcaaatactatcagcaggcggaagatctgctggcgcaggatgttcccgccattccggtctatcactatgtacgtacccatctggtgaaaccttgggtagggggcttcacgccggataagctggggtattactacaccaaagacatgtacattaaaaaacacccatccgccagcggcgatgggcgttga

SEQ ID NO: 135357 - DNA, 183 bp, Enterobacter cloacae
atggcgcggacgctgtcactgcgcatcattgccgagggcgtcgaaaccgaggcccaacgggattatcttaatcgccagaatattcatctgctgcagggctactatttctggaagccgatgccctacgtcgcgctggtcatgctcctgctgagcaaaccgaaggcgcggattgtcgaagaataa

SEQ ID NO: 135358 - DNA, 918 bp, Enterobacter cloacae
atgatggtcaataagcggccggtgctgatctatcagacgcgcttagcgccgatcagggtgattgtcacgatcagcgacatccatctgcgcgatgcgctatatagcgataccgatgacaacgggctggcactctgggtgcagaaccaaatgattgccagatatggcgatgttaagccgctggctgcggacccacaccaggaggtatttacctcgcccgcctattcgtttcgtattgcctatcccgagtcgcttttttttagtctcgcccgcctggtgaataatgtctccggcctgctgatctttattttctcggtttcgctgctgttttatttcctgatgcgtaaatatcttaatgtttacacctctgaagaggaaaagttgcgctacgccatcacccagggttatatcgttccctactatcagccgctggtgaacgggaaaaccggggagatatacggcgtggaaattctcgcccgctggcaaaacagcacgacgccatcgcgctcgcccgcggaatttattccgctggccgaacgtaccggcttaattattcccctaacacgcagcctgatggcgcaggtcaacgcgcagatgagaccactctttagtaaactaccggatgggtttcatattggcctgaatatcagcgtgtcacatattaacgcgccgacgtttatcgatgactgcctgcactatcagcgcggctttgagggtaaagcggtgaagctgatgctggagatcacggagcaggagccgctgttgctcaacggggcggttgtggacaagctcaatacgttacactcccgcggattttccatcgcgctggacgactttggcaccggctattccgggctttcctgtctccacggctggttttcgactatatcaaaatcgatcagagttttgtcggccggataa

SEQ ID NO: 135359 - DNA, 189 bp, Enterobacter cloacae
ttgccagttaatgacgaacacgcccgcaagaaataccatcagcgccagggaaaaggcaatcactcgcagccggtggatgaagagacggcgttgtttcttggcgatcgcaccgtcagccagccggcgtggcagcccggcgcgatggtgcgactgacggtcagcggcaaggcgcgggtatttagcggctaa

SEQ ID NO: 135360 - DNA, 966 bp, Enterobacter cloacae
atgtctgattatcaaatgtttgaggcggtcgttcgcgatgttgaacagatcacccctcttgtgaagcgttttacgctggtgtcgccgaccggcgccccgctgccggcattcagcggcggcagccatattatcgtccagatgcaggatggcgagcagcgctacagtaacgcctattcgctgatgagctcgccgctggatacctccagctggcagattgcggtgcgtcttgagtcgccttccaaaggcggctcgcgttttatgcaccagcgggtgcgcccgggcgataccctgacggtgtccacgcccaacaatctgttcgccatcgaaccacaggcgcgaaaacatctgctgatcgccggcggcatcggcattacgccattcttatcgcatattccggaactggaacagcggcaggccgactggcagctgcattactgttttcacgacgccgacagtaatgctttcgtcgatgcgctcagcgctgcgccatggcgcgatcgggtcaatgttcatgtatcagcgctcggcagccgtctcgacctaccgcgcctgttcgccgacctcgagccaggaacccacgtgtatacctgcggcccagcggcgcttaacgaggcggtgaaagccgccgccgaacgccatcaggtgcccgccagccagctgcactttgagcagtttatccttgaggataaaagcggagaggcatttaccctggtgctggcgcgttccggacgcgaatttaccgtgccgcaggatatgaccattttgcaggtgatcgagaataacaaagcggcgaaggtcgaatgcctgtgccgagaaggggtgtgcggcacctgcgaaacgatgattctggagggggaagccgaccaccgcgatcagtattacagcgaggaagagaaagccagccagcagagtatgctgatctgctgctcgcgcgccaaaggcggccggttagtgctggatttgtaa

SEQ ID NO: 135361 - DNA, 1449 bp, Enterobacter cloacae
atgcaactcaacgatatgacactgtttcgccagcaggcgatgatcgatggccagtggcgcgatgcgcccaacggcgacgtgattgcggtcaccaacccggccaacggcgagcagctcggcagcgtgccgaaaatgggcgccgatgaaacccgcgaagcgattgaagccgccaatcgcgccctacccgcctggcgcgccctgaccgccaaagagcgggcgaacattctgcgccgctggttcgatcttatgatggagaatcaggacgatctcgctcgcctgatgaccctcgagcagggaaaaccgctggcggaagccaaaggcgaaatcagctacgccgcctcctttattgagtggttcgccgaagaaggtaagcgcatctacggcgacaccattccgggccaccaggccgacaagcgcctgctggtgattaagcagcccatcggcgttaccgccgccatcaccccgtggaacttcccggcggcgatgatcacccggaaggccggcccggcgctggccgcgggttgtacgatggtgattaagccggctaacgaaacgccgtttaccgcgctggcgatggctgagctggcgaatcaggccgggatcccgcagggcgtcattaacgtcgttaccggccagtcgcgagagattggcgcggtgttcaccggcgatgagcgggtgcgtaagctctcctttaccggttcgaccgaagttggccgcgtgctgatgcgccagtgcgcggaatccatcaaaaagctctctttagagctcggcggtaacgcgccgtttatcgtctttgacgacgccgatatcgataaagcggtcgagggcgcgctgatcgccaagttccgtaacgccgggcaaacctgcgtctgcgtcaaccgcttctatattcatcgcgccatctacgaccaattctgcgataaattcgtcgctcgcgtcgccgccctgaaagtgggcgatggcagcgagtccgatgtacagattggcccgctgatcaacgccgacgccgggcgcaaagtgcagtccctgctcgacgacgccctgagccgcggcgccacgctgttaactggcggtaaagcgcatccgctgggcggtaatttcttcacccctacggtgatcggcgacgtacagccggggtcattgctgctgcaggaagagatcttcggcccggtggccgctttggtgaaatttgacgatgagcagcaggtcatcgagcaggcgaataacaccatctacggcctcgcctcctatttttacagtaacgatgccgcccgtatctggcgcgtctccgagcagctggaatacggcatggtcggtatcaataccgggctaatttccaacgaagtcgcaccgtttggcggggtaaagcagtccggtcttggccgcgaagggtcggaacacggaatcgaagattacctggagatgaagtatctctgccaggggttgtaa

SEQ ID NO: 135362 - DNA, 1224 bp, Enterobacter cloacae
  misc_feature (6)..(15): n is a, c, g, or t
ttgagnnnnnnnnnnattgagatttacccggacgcccgcattgcgctgctggaaaaagaggccggcccggcctgccatcagactggccacaacagcggcgtgatccacgccggggtgtactacacgcccggcagcctcaaggcgcagttttgcctcgccggcaaccgcgccaccaaggccttttgcgagcagaacggcatccgctatgacgtctgcggcaaaatgctggtcgccacctcaccgctggagatggagcggatgcgcgccctgtgggatcgcaccgtcgccaacggcctgcagcgcgagtggctaagcgccggggagctacgcgagcgcgaaccgaacattaccgggctcggcgggatcttcgtcccttccagcggcatcgtcagctaccgcgaagtggcggcggcaatggcgaagaacttcgaagcgaaaggcggaacgatcgtctacaacgccgaagtcagcgccctgaaagaacatgccagcggcgtggtgatccgcacccgccagggcggagaatatgaggcctcgacgctgatcgcctgttcgggcttgatggccgatcggctggtaaaaatgctcggcgtcgatcccgggtttatcatttgtccgttccgcggcgagtatttccagctggcgccgcagcacaatcagatcgtcaaccatttgatctatccgctccccgatccggcgatgccgttcctcggcgtccatctgacccgcatgatcgacggcagcgtcaccgtcggccccaacgccgtgctggctctgaagcgcgaaggctaccgcaagcgcgatatctcgctggccgataccctggagatcctcacctcgcccggcatccgccgggtactgcaaaacaacctgcgctccggactgggcgaaatgaagaattcgctgtgcagaagcggctatctgcggctggtgcaaaaatactgcccgagcctgacgctgagcgatttacgcccgtggccggccggcgtgcgggcgcaggccgtgtcgccgcagggcaagctgatcgacgattttctcttcgttaccaccgcgcgttcgatacatacctgcaatgcgccatcgccagcggccacctccgctatcccgatcggcgcgcatatcgtcagcaaggtgcagaccctgctggccagccagagcaatcctggacgcacgctgcgtgcggcacgtagcgtggagacactacacgccgcttttacccgttaa

SEQ ID NO: 135363 - DNA, 978 bp, Enterobacter cloacae
atgaacgccctgaccgcagtaaaaccgacacccgcgccggtagcccagcaataccctggcttttctttcaccccttccgcccagtcgccgcgcctgctggagctcaccttttccgccgaaacgaccacgcagttcctgcagcaggtcgcgcagtggccggtgcaggcgctggagtacaaatctttcttacgcttccaggtcggcaagatcctcgacgatctgtgtggcaatcagctgcagccgttgctgatcaaaacattgctcgatcgcgcggaaggcgcgctgcttatcaacggcgaagggatcgatcacgtcagccaggccgaggagatggtcaagctggccaccgccgtcgcccacctgattggtcgttccaacttcgacgccatgagcggtcagtattacgcccgcttcgtggtgaaaaatgtcgataactcagacagctacctgcgccagccgcaccgggtgatggagctgcacaacgacggcacctacgtcgaagagcaaaccgactacgtattaatgatgaagatcgacgagcagaacatgcagggcggcaattccctgctgctgcatctcgacgactgggagcatctcgacgaattcttccgcgacccgctggcccgccgcccgatgcgctgggccgcgccgccgagcaaaaacgtcagcaaggatgttttccacccggtgttcgacgtcgattcgctgggccgcccggtaatgcgctatatcgaccagttcgtccagccgaaagatttcgaagaaggcacctggctgagccgcctctccgacgcgctggagaccagcaaaaacatcctttccataccggtgccggtgggcaaatttctgctcattaacaacctgttctggctgcacggccgcgaccgctttacgccgcacccggacctgcgccgcgagctgatgcgccagcgcggctactttgcgtattccacgaatcattaccagactcatcaataa

SEQ ID NO: 135364 - DNA, 258 bp, Enterobacter cloacae
atgaatttatcccgtcaggaacaacggaccttacacgttctcgccaaaggtggccgtattgcgcacgtccgcgatacctccggccgcattaccgccgttgaatgctacacccgcgaagggctgttgctgagcgactgcacccttgcggtcttcaaaaagctcaaaaccaaaaagctgattaagtcggtgaacggccagccgtaccggatcaacacgaccggtttgaataacgttcgcgcgcaagcggacaaccgctga

SEQ ID NO: 135365 - DNA, 750 bp, Enterobacter cloacae
atgatcgatatccctcgcatttttaccatcagtgaaagcgagcaccgtatccataacccttttaccccagaaaagtacgccacgctgggacgggcgctgcgaatggcgccgggcaccaccattctcgacctcggcagcggctccggcgagatgctctgtagctgggcgcgcgatcatcagatcgtcggcaccggcgtagacatgagcctgctgttcagtcagcaggcggccgcccgggcagaggagctcggggtaagcgaccgggtaacctttgtgcaccaggatgccagcggatatgtcgccagccagccgtgcgatattgccgcctgcgtgggggccacgtggatcggcggcggagtggcaggcacaatcgagctgctgaagcagagccttaccccaggcggcatgttgcttatcggcgagccatggtggcgcaaacgtccggccacggcagaagaggcggttgcctgcggcgcgcagtcacccgatgacttcctgacgctaccggcgctagtcgcccactttggcgaactgggctatgacgtggtggagatggtgctggccgaccaggagggctgggatcgttatgaagcggcgaaatggctgacaatgcgccgctggctggaggccaatccgcacgatgacttcgcaccggaggttcgccagcagttgaccaccgcgccgctgcaccatgtcacctggacccgggaatatctcggctggggcgtgtttgtcctgatggcgcgttaa

SEQ ID NO: 135366 - DNA, 465 bp, Enterobacter cloacae
gtggaaacgttagttattctggccgtagtcgtatgggtacttttcaaactggtacaaaaggttacgagcaaactctatcctccagactcggtgaaggtacaggagaagcccgacacaacgccagcgacggatgcctggggaaattaccctaaagctgaagggcatgtcgttttattcgagcagtaccggcatgagcaggcgctgcggcagcaagctgctaaagaggctgatacgttctaccgctcaagggagtggcggcgtttacgttaccaggccttccagcgctacggcaataaatgttgcgtatgcgggcgcggcgccagtgacgggatggtgatgcacgttgatcatattaaaccgcgttctctttacccgcatttagccctcgatattgccaatctgcaaatcatgtgcaacgagtgcaacgtcagtaagggcaacagagatgaggtcgagtggcaataa

SEQ ID NO: 135367 - DNA, 735 bp, Enterobacter cloacae
atgcgcagttacaggcagtggttagttttcagtaaggctttgttagcgctattgttgctggcaggcatcactccggcgccgtttgctgcggttaacgttgatcgaacccggatcgtcttcgctgctaacgatgttgtccagtcgctgacgctcacaaacgatagcgtgacgccgatgctgttacaggtctggaccgatgccggagagacggcctcttcaccagacagtagccgcacgccgctggtggtcttgccccctgtctttaaaatgcagccggatgagttgagaacgcttcgtgtgatgctgagctcgcgccgtagtttacccggggatcgggaaagccttttctggcttaatatttaccagatcccccccgagcagaatgcaacagacagcgtcactcgcaaattagtgttacccctgcgattacggttaaaggtatttattcgtccgcacggcttaaaggcccccaccagcagcgatgagcggaaattacgcttcagtatcgcttcgcagggcatcacgataaccaatccgaccccgtggtatatgagcctggctgtcatgccgataaagggaataagtttcggtaacatcatgctcgcgccctatgagcagcgcgatgtcgcgctttcgaatatgccagcggtggggtcaacagtagactatgcggtgattaacgattcgggaaactggcggacctataccgcaaccattatggataaagaaatttga

SEQ ID NO: 135368 - DNA, 1335 bp, Enterobacter cloacae
atgtgtcatcttcgccgaacgctgctgtttgcagctggcctgcttttcagcaccgcgccctgggctaactgcgttaaggtcacggataatagtttcctttctgaggctgcgattaaagcgggttataccgcgcgctactggcgcggcgcctatgatgacaatatcggtcatcttggtctgccgtcagtcattagcgttagcgccaataacaagttccagccttcaggtactgtgcttgccagcgcagtggctaatttccttaccgccggcgttcagacaccctactcggcaaaacaggtgctttaccgctgtgatttgaaggatgccgggcaactgtacgaattatattctaccaatgccgataacccttttgttggaggacgccgggcgaaagaagttgaaggggcctactatgacgcggaacgtaacgtcgcggtacggatgactaacctgagtactggcgaatactatagccgctactggaagcagcgccagcttactgcggatagttggtttcaggacgatcacgcaatctatattcccgcaggcgcgtttagtaatgtcctgtatgagatgattaaaatcgccgcctcggatcagtatatttattcggacagaatcaacaaagacctctatacccagccgcgcggttatatcgcctttaaagggccgggcttaataacatccgctattcagccaggtatggatcatgcttcaagctattatggttggcctgcttattggcccggtgcatggagtagctataatcaggttacctatattcgcggcgcagcttgcaccattgaagattatcctgcgacagtgctgctccccaccatatcagcagaagcgcttacttctggcgaaagcagcgaagcgcctttcagtataacgcttgagtgcgaagccggcgcgatgtcttcaactcaccccacaacccaggtagctaatgtcgccatgggctttttggtcaaccaacctgcggctgttgccgccgcgcgccgcctgggcctgacgaccaccggtggcggattaacctggttactggatacgcattatggcgaaaagggcgtggcttccggagtaggaatacggatttacgatgagcgcggtgcgccgcttaacctgttaccagacaaaacgagtacgggaacgggcaatgcccgtggctggtatgggtataaggagctcacggtacaaaccggcaaaaaagatcatggttcggtggaaatctggcacggtgattttacggcctcccttgaggcgcttggaggacaaacggtaacggtagggagcgtgaatgcgcagttacaggcagtggttagttttcagtaa

SEQ ID NO: 135369 - DNA, 2556 bp, Enterobacter cloacae
atgtcgctgaaggttaaattctcacgccaaaatatcttcgttatcttagccgtagcctgcgttggccaggctttcggtgaagaatattatttcgacccctctctattgcagggaacagcttacggacaaggtatggcgagcgttaacggacccgacacccccgccggagagtatctggttgacgttatcgtcaatggaacgctgataaaatccggcgtaaaaatccgctttaatccagtcaatggcggacagcgcaccgagccctgccttccgttatcgctgatgcaggccgctcaggttaaatcgctcccggacaacgcgctgcaaaatagctgccgtccgctaagggactgggtatcccgcggtgaatggcaatttgatagcgcgacgctacagctccggcttacgctgccgatgagcgagctgatgcacaggccgcgcggctatatcccgccttcgcagtgggacagcggcgcgctggcgctgtttttacgccataacaccaactggacccacacagacaacaccagccagcacttccgctaccactatttgtggagcggcatcaacgttggcagcaatattggcctgtggcagctccgccatcaggggaatctgcgctatgccgacagtaaccaaagcggtagcgcctggcattataatcgcgtgcgcacctgggtacagcggccactcaccgcaatcgacagcatcatggcatttggcgataactataccgactccagtttattcggcagcctgtcattcaatggtattaaactcgccacggatgagcgcatgtggccgcagggcaaacgcggctatgcgccggaggtgcatggcgtggcgtcaagcagcgcgcgggtggtcatcaaacagctaggcaaagttatctatgaaacccatgttccacctggccagttctatatagatgatctttacaacacccgctatcagggggatttgcaggttaaggtgattgaggctaacggaaaggtttctcgttttaccgttccctattccgccgttcccgactcggtgcgccctggtaactggcactacgcttttgctctaggcaaggtccgccaatattaccgcatcgacaaccgttttcttgaggggacgctgcagcacggggtgaataatcatctcacgcttaatcttggatcgcggttggcgcatgattatcaggcctggctggctggcggcgttctggcaacccgtctgggcgcgttcgggatgaatgccacctggtctggcgcacaagtggaacataacgatcggcagcagggctggcgcgcggagttcagctatagcaagaccttttccacaggcactaatctggtactggcggcttatcgctactcaaccggcggattccgcgatttagaagatgtgtttggcgtccggcaacaggagcacaacagcattgtttactactccgataccctacaccaacgccaacgtctttctgcaaccgtcagccagccgttaggtcggttggggacgctcaatcttagcgccagtaccgctgattattacaataaccggtcgcggatcacgcaactgcagctgggctatagcaaccagtggcgaaaagtgagttatggattcaaccttgccaggcaacgctccacctgggacgatggccgcttctaccacagcgttaacgaaccgcaggatctgaaccagcggcaaaaatataccgagacgacgctatcgttcactttatccattccctttaactggggcgacaatccgacctccgtggcaatgaattataaccagtcgcgcgcgaaccgatcctcaaccttgtcgatgaacggaacccgtggcgagcagaacgaactctcctggtcggtctacggcggctatgatcgctatcgcaatggggatgaagggacagcaacgacttttggcggcaacgtccagcaaaacacccgttttggcgcgctgcgcgtgggctacgatcagggaaaagactatcgtcaggtggcgctaggctcctccggaaccgtggtgttgcattccggtggcgtgacgttcggcccctacgccagcgacacgtttgcattaattcacgccgatggcgcacagggcgccgtcgtacagaacggtcagggggcggtaatcgaccgttttgggtatgccattttgccctcgctatctccctatcgtcgcaacaacgtctcactcgatacccggcagatgcgcagcgatgctgagctgaccgggggaagtcaacaggtggttccctatgctggcgcgatcgcacgggtgaacttctcaacgattaccggcaaagcggtgctcatcgcggtgaaaatggcagatggcggcataccgccaatgggcgccgaggtcatgaacagcgaaggggccatcattgggatggtcgggcaaggcgggcaggtgtatgcccggatcagcacaccctctggctcattactggtgcgttggggaaaaggagccaaccgacgttgccgtgtgccttaccagttcgatatgcattctcctgaaaacgtgatttatctcacgactacctgcgagaggaaatag

SEQ ID NO: 135370 - DNA, 759 bp, Enterobacter cloacae
atgaaaaaggatgccccacgttcagggctacgctatctggtgctgctgatagccctgttctttcccgttaccggggcctgggccagcgttaccattgtaggcagtcggattatttatccatcgaccgtcgcctcagtcgatgtacagctaaaaaataacgatgactttccctatatcgtacaaacctggtttgacaatggcgatctgcatattgggccggagaacgcgagcggcattccttttatctctacgccgccagtatttcgaatccaaccgaaatcagggcagattgtccgcgttgtctatagccagcgtaaagcgctgccgcacgatcgtgaatcggttttctggttcaacgcgttgcaggtaccgccagccaatataggtggccgccagcaaaataaagtgctggtgatgcttaggacgcggatcaaactcttctatcggccggaaggcattggttcaccaggtaatctggcgaaaaaactgcacatcaccgtggtgcgtaatgcccgaaaaggcgccggtattgtcatcagcaatccgcaaccctggtatgcctccctcagtaatctgagcgtgaaagtaaatggtacttcacgcgagcttaatgtcgacatggtcccccctttttccagtcgcactttctggataccgggaaacgtcagcgccaattcacttaacggtaccgtcactgtgacggtggttaacgaccagggtgcaaggataagcgagcgttatcatgtcgctgaaggttaa

SEQ ID NO: 135371 - DNA, 537 bp, Enterobacter cloacae
atgttcaagaaaaccacactggctttattaacagcctcactttttatttccaccagcgcgctagccatatctaataatactattacctttcgcggtgaagtttccgatgaaacctgttctgtggcgattaacggcaatcaggcaaaaccggtagttattctgccgacggtgagtgccaaggaattggcgaaaggcggagatgtcgcaggtcaggtgacatttgatattggtctcaccggctgcacgggtaataccgatagagcgaccaaaatctctaccgtcttcgttggtaaccaggtgaccagcaacggtaatcttgggaatacgggagacgcgaccaacgttgaagtacaactccttgataccgcaaataaagttatcaatttgaccaacggcttcaaaggtgaaggcgatctacaactgaagcctggagagacggaagccagcgccacctacactgcgcagtattacgccacaggagcagcatcggctggtacggtcgaagccactctccagtacgccgtttcctacctgtaa

SEQ ID NO: 135372 - DNA, 861 bp, Enterobacter cloacae
atgttagtgactgtgttttgtgaaaagtttgcgaatgttaaggtgggtgaaatcatttcaccctgtgttaatatgacaggcgacagagtaagtgtattgaagaacggattttccatggatgaagagttgttgttaatcgctaaaaaggtgatatttgatagtgccagaatgacattggctaatggtaataagattattaaaatctctgagtcggagacaaacctacttcttgccttccatcgcggtatatataaaaaagaagatatcattgatttcgtctggaagaatcgtgcgggttgtgtttcagaatcgagttattacaagcttattaatcaaatgcggaataatttttcgctcgttggtttgaaagcggacgatattgttacccgtccacgaattggtgtttcgttgtcactgccattagaaccgttaaaaaaacaacgttcggaagccggcgaacagaccagcgatacagcgcggggtaaagacagtcgacagactcatctcgcgaagggtaaaaaatttaccgccaaaatacgtcttctggtgctgacaatgttgttgatgctgttaacggctatagcgatgctatttcaacatgcacctgtgcaaaataaacacaaaagcaccttcaggatgcttggtgataaggatggctatatcttcttcaaaatggcgagcgataaagtgacatttaaggaggtggtttcggcctataacaccctgacgctaccgctatgtcgccagaacggacattatctttattacctccgggagccgaacatgaatctttttttgcagtgcctgaatcctgttgaaacggcggtaccaaaatgcattaccatcaaagagcgttactaa

SEQ ID NO: 135373 - DNA, 318 bp, Enterobacter cloacae
gtgctggacttgaaatccaatcggattgctattcattacgccgtgcaggatcaacagcgggagcagcggttattctttcaggacatcaccatcagtgcgcctaaccgcattggcccgaaaacctacactttccggattgaagccgtacacaaatttgattcggatacgacgggggagatgttttcctggctgcgtctcctgcaaccggcaaccgtgaatgagctgacgataaacaaagtcggtcagcgaacctatcttttttcactaaaccggcagatctataatttttgcacaaccagcggtagcaccaaggcataa

SEQ ID NO: 135374 - DNA, 1563 bp, Enterobacter cloacae
gtgaagctaaaactatcgtatataatttgtgcagtgctggtgccgctggtcatgatgattacgttagcactgctggtcagtgtcctgcagtttaaacaggatgtcgccctgagtgcgaaaaccttattacgttttagtgaagatgtctcaactgcttcgtggcgggtcaccgggcaagccgtaaaattagcggacaggccctgcgctgaaattttgtcggagcttaaccgtacccgcgcctttactccttatattcgtgatattggtttgctggaaaagggcaatctgctctgttcctttgttagcagagagcaggcgcatccttttcctctgccaccaggtaaaacgctcccaacgccgctacctgccaggtgggttcgctcatttagctggatggccggtggacctggcaggcccgcggtggtttacacacagcaagtcgcggcggataaagcggcgtttgttatcgtcgattctcggtatgtccaggagctgatggatgtactctcagaggagagagaggccgttttcagcctgagatttggcaaaggcgatgccattatcagtcaaccagcacagtatgatcgaatagtgatgacccagaattacgtcactgatgacggaaagatttctcttaccgtcgctgcgcctcttggcacattgacggcagtttggatgaaatctctgctcatttttatccctctctcgttttgcttctcatttttgaccctggtactttaccggcattggtcgaaaatgcggatgtccatggcgcgagaaattatccgcggtataaaaaatgcgcagttcacggtgcattatcaaccagtatttaacgtcaaccgcggtaattgtggtggggtagaggcattaatgcgttggcctcttcccgatggtcgttttattacacccgacattttcatcaccgccgcagaaaacgaaggtatgatcgttccgctttcgcggcatctgtttaagctcatcgccgaggatgtcgaaaggtggcaggtcgccgaaggcttttatatcagtgttaatatttcgcctgaacacttggtgcatgagagctttattgaagacgttgagttgttacaggcaagattaggcaatctgcgtctgatgctggagctcaccgaacgcagcctcattgtacaaccagcacttgtgtcagataagctgatacggctacgtgagaaaggcatattgatagcgatagacgattttggtaccggctactgttcgctttcttacctccagcagctacccgttgattatctgaaaatcgatcgtacttttgtcgatacgattgataccagcggtagcgacgtgcccattctggataccattatcatgcttagccataaactcggtcttaatatcgttgcggaaggcgtgagttcagagcatcaattgagctatattctcgatcataacgtaggatttatacagggctatctttacgcaaagcctatgtgttcatctgattttacgcgctggcttgatacgcgtgccaatgagcaaaatgacaggattaaatgcaaaaaatgttcaataaatcagtaa

SEQ ID NO: 135375 - DNA, 735 bp, Enterobacter cloacae
atgagtaagaaaaaatacctaattgataagaaagtcattcttgattgcgaaaagatgacgctgtcgtgcgatcgcgaaagcttgagaatttctgaatccgaatgcaatttgcttattgctttccatgaagggttatttaagaaggatgacttaattgcctgggtatggggacgaaaaggcgttgtggtttccagtgcgagctattataaattaatcaaccagttacgcggttcatttgaaaaggtcggccttcccccttcagcggtattaacgcgtcctaaggtcggcgtaacgctctcggtatccatcgaatcattgcctgatgcttcaacacccgcaatgcaaaatatcgccagcgataccgttgcgccagttgcagacgcgtcgccagaaccaacgcaaatttctcagtttaccatcaggaaagaatgtttttttttaatcggcgcaacgttattcttgctggtaatgatttatatataccacaacagtaagccagattatttttctgaattgggaacctataacggatataccttttacggtgttacagaggataaccgtactcttgaggatgcggtgggggctttttccgagttgagcccgcaagtctataagcaaaatggcaattttatttattatattcgtgtccctaataccaatatttttgttcagtgtctgaatcaactgaatgtttcggagcccaaatgcatcactatcaaagaacggtactga

SEQ ID NO: 135376 - DNA, 489 bp, Enterobacter cloacae
atgcatcactatcaaagaacggtactgaacagcattacgctgcttatcctggcggtatccttcgcgttactgattttacatgtacgtcaacaacgctaccctttatcagatttgaacgcttttttatgtactaccaggacggtaacctcagttcaaccggataattttcacgctgatggcaatatcgtccttgatttcaaaaataaacgcattacgcttcaatatgacatcatcaccgcacagcagataaaaaaagtgttgtatcgcgatgtatatataaaaaacctgaagatgccgggggccggaatttatacatttgatgttgattcggtaaaggtgttttctactgatactgccggtgattttttagcacattttcgcttgctgcaccccggtgccgctaatgaaataagagtcaccagagtcggtaatagcacctatttgtactcaataaatcgtcagatatataacgtttgtaccttgcagtga

SEQ ID NO: 135377 - DNA, 267 bp, Enterobacter cloacae
atggcatcaggttgggcaggcgacggcgccgtacaggatcagatcgacagcactattgacgatgcggttgctcgcgcccgccgcgagcttccacgtggcgaaagcaacaaattttgtgatgaatgcggagagccgattccggaggcccggcgacaggccatcccaggggtcagatactgcgtgaagtgccagcaggagaaagatttacataacaatacattttcaggatataatcgtcgcggttccaaggatagccagctacgctga

SEQ ID NO: 135378 - DNA, 261 bp, Enterobacter cloacae
atgaaaatcacctcgctgctgttcgccgcggcgctcaccgctcatgccaccgcggcctctcccctgccaccgccacccgtactgccctatgccgggccgctccgccctgtcggcaccgtctccgccttcggcgccagcaccctggacgacctggcggccgccctcgcggataaggcccaccgtcatggggcgatagcctggcggatcaatgccgccagcagcggtaaccggctgtacggttcagctataatttatcaataa

SEQ ID NO: 135379 - DNA, 615 bp, Enterobacter cloacae
atgtacttttatcaaccttcgcagggccacggcctgccgcatgacccgctgaacgcgataatcgggcctcgcccgataggctggatcgcctcgcaggacgccgagggccagcgtaatctggcgccatacagcttttttaactgctttaactatcggccgccgatcattggtttcgccagcagcggctggaaagacagcgtgcgaaatatcgtcgaaacaaaggagttcgtctggaacctggcgacgcgaccgctggccatggcgatgaatgaaacgtcagcctcgattccgcaccatgaggacgaattcgtgcgcgccggcctcaccgccgccgccagccgcctggtcagcgctccccgggtcgcggagagtccggtgaactttgagtgccgtctgtcgcagtgtattcaactcaccaccgccgacggcaaccctgtcgatacgtggctggtgctcggtgaagtggtcgccgtgcatatcgatgaatcactgctggacaacggtatctatcaaaccgcccgggcccagccgatcctgcgcgccggtggcccgagcgcctattacggtattgatgacagcctgcgctttgacatgatccgccctgacgcccgctaa

SEQ ID NO: 135380 - DNA, 915 bp, Enterobacter cloacae
atgaaagcccagaaaccggggttacacccgcgtaaccgccaccatcaacgctacgacctgcccgcgctctgccaggcccatcctgacctgcagggctacattacgctcaatccgctgggtgagcagaccattgattttgccaatccgcaggcggtgaaggcgttgaataaagcgctgctggcgcatttctacgcggtcaaacactgggacattcctgacggctttctctgtccgccggtgcctgggcgggccgactatattcatcatctggcggatctgctggccggggatagcggcgaggtgccgaaggatgccacgatccttgatattggcaccggcgctaacctcatctatcccctgatcggcgctcacgagtatggctggcgctttaccggcagtgaaatcaacccgcaggcgttcgccagcgcgcaggcgattatcaatggcaacccgggcttgacccggcagatccgcctgcgccggcaaaaagagagccaggctatctttcacggcgtgatccataaaaacgagacctacgacgccacgctgtgtaatccgccgttccatgactccgcagagagcgcccgggcggggggcgagcgcaagcgccgcaacctcggacttggcgccgaaagtggcctcaattttggcggtcagcagcaggagctgtggtgcgaagggggcgaagtagcctttatctcgcagatgatccgcgaaagccaggccttcgcccgccaggtgaaatggtttacctcgctggtgtcgcgcggcgataatctgccgccgctctaccgcctgctgaccgaggtcggcgcagtgaaagtggtgaaaaaggagatggcccaggggcaaaagcaaagtcgctttatcgcctggagctttatggacgacgccaaacgccgtcgtccattctaa

SEQ ID NO: 135381 - DNA, 2196 bp, Enterobacter cloacae
atgccgtggatcctgcttttgctcgctgcactgtttactgccccgctttccgccgccaccctccccggcgtgccgacggctaacactgataaaaacagcgccagcgaacccgatgtggaacagaaaagagcggcttatgccgcactggccgatgtgctggccaacgactccgcccgtcaggagctcattgaccagctgcgtaaagcagccgccacgccgccgcccgacagcaccccgacgctgacgccaccggcggtcaaagaagagaccacggtactggagaacgtcacccagataagccgggaatatggcgaacagctctcatcacgcttttcccagctgtggcgcaatatcaccggctcaccgcataagccctttaatccgcaaacctttaccagcgcggcctggcattttttactgctggccgggctggtgtttgccttctggtggctggtacgcctcgcggcgctgccgctgtatcgcaaaatgggcgaatggggacggcataaaaaccgcgatcgcggtaactggctccagctgcccctgaccatcgccggggcgtttatcatcgacctgctgctgctggcgctaaccctgtttgtcggtcagctgctaagcgatcgcctgaatgggaataaccctaccatcgccttccagcagagccttttcctcaacgccttcgcgctgatcgagttttttaaagctattctgcggctcattttctgcccgcgcattcctgccctgcggccctttaacctcagcgacgaggccgcgtcatactggagcctgcgcctgagcgcgctcagcagcctgattggttacggtctgatcgtcgcggtgccgattatttccaatcaggtgaatgttcaggttggcgcgctggctaacgtcgtcatcatgttgtgcattacgctgtgggcgctgtacctgatttttcataacaaagcggtgattactcaagggttgatccacctggccgaccactcactcgctttctttagcctgtttatccgcgccttcgcgctggtctggcactggctggcctgcgcctactttgtggtgctttttttcttttccctgttcgacccgggcaacagcctgaaattcatgatgggcgccaccctgcaaagcctggcgattatcggcggcgcggcgctggtgtctggcatcctgtcgcgctggatagccaaaaccatcaccctgtcgcccgccacccagcgcaactaccctgaactgcaaaagcggctaaatggctggatctccgcctcgctgaaggcggcgcgcattctcaccgtctgtgtcgccattatgctgctgttgagcgcctggggcctgtttgacttccgggaatggctgcacaacgatgccgggcaaaaaacggtggatgtgctgatccgcatcgccctgatcctcttcttctccgccatcggctggacggttctggccagcctgattgaaaaccggctggcatcggatattcatggccgtccgctgcccagcgcgcgggcccggacgctgctgacgctgtttcgcaacgcgctggcggtggtgatcagcaccatcacggtgatgatcctgctctcggaaattggggtaaacattgcgccgctgctggcgggcgccggggcgttagggctggccatttcgtttggtgcgcaaaccctggtcaaagacattatcactggcatatttatccagtttgagaacgggatgaacaccggcgacctggtcaccatcggtcctttgaccggcaccgtggaacgaatgtcgattcgctccgtgggggtacgtcaggataccggcgcctatcacataattccctggtcctcgatcaccacctttgccaacttcgtgcgcggcattggctcggttgtggctaactatgacgttgaccgccatgaggatctggataaagccagccaggcgctgaaggcggcggtggacgatctgctagcccaggaggagatccgcggtctgatcattggcgaaccgtcgttcgccgggctggtggggctgagcaataccgcctttacgctacgcgtcagcttcaccaccctgccgctgaagcagtggacggtgcgttttgccctcgacactcaggtgaaaaagcacttcgatcgcgccggggttcgcgcgccggtacagacctggcagcagctgccgatgccgggcgccgacagcccggccgccgagtag

SEQ ID NO: 135382 - DNA, 723 bp, Enterobacter cloacae
gtgattgaatttaaaaacgtctccaagcactttggtccgacccaggtgctacacgatatctctctgaaaattaatcagggtgaagtggtggtcattatcggcccttccggttccggtaaatcaacgatgctgcgctgcatcaataagctggaagagatcaccagcggcgatctgattgtcgatggtctgaaggtcaacgacccgaaggtggacgaacgtctgattcgtcaggaagccgggatggttttccagcagttttatctgttcccgcacctcacggcgctggaaaacgtgatgtttggcccgctgcgggtacgcggcgccagcaagcaggcggcagagaagcaggcgaaagagctgctggcgaaagtcggtctggctgagcgcgcgcatcactatccgtccgaactctccggcggccagcaacagcgtgtggccatcgcccgcgcgctggcggtgaagccgaagatgatgctgtttgatgaaccgacctccgcgctcgacccggagctgcgccatgaagtgctcaaggtgatgcaggacctggcggaagagggcatgacgatggtgattgtgacccacgaaatcggctttgccgaaaaagtggcctcgcgactaatctttatcgacaaaggacgaattgctgaagacggcaatccccaggagctggtgaagaacccgcccagcccgcgcctgcgtgaattcctgcaacacgtcgcctga

SEQ ID NO: 135383 - DNA, 660 bp, Enterobacter cloacae
atgcagtttgactggagtgccatctggcctgccattccgattttgctggaaggcgccaaaatgacgctgtggatttccgtcctcggcctggccggcggtctgataattggtctggtggccggtttcgcccgctgcttcggcggctggatcgccaaccacatcgcgctggtctttattgaaatcattcgcggcaccccgattgtggtgcaggttatgttcatctactttgcgctgccgatggcctttagcgatctgcgcatcgaccccttctccgcggcggtagtgaccatcatgataaactcgggcgcctatatcgcggaaatcacccgcggcgcggtgctctccatacataaaggcttccgcgaagcgggcctggcgcttggcctgtcgcgtcgcgaaaccattcgccacgtgatcctgccgctggcgctgcgccgcatgctgccgccgctgggcaaccagtggatcatcagcatcaaggatacctcgctgttcatcgtcatcggcgtcgccgaactgacccgtcagggacaggagatcatcgcgggcaacttccgcgcgctggaaatctggagcgctgtagccgtgatctacctgattatcaccctggtcctgagctttattctgcgtcgtcttgaaagaaggatgaaaatcctgtga

SEQ ID NO: 135384 - DNA, 747 bp, Enterobacter cloacae
atgaagtctgtatttaaagtttcactggctgcactgaccctggcttttgcggtttcttcccatgccgctaataagaccctggttgtcgccaccgatacggcgttcgtcccgttcgaatttaagcaaggcgataagtatgtgggttttgacgttgacctgtgggcggctatcgccaaagagctgaagctcgactacaccctgaagccaatggacttcagcggcattatcccggcgctgcaaaccaaaaatatcgatctggcgctggcggggatcaccattaccgacgagcgtaaaaaagcgatcgacttctccgacggctactacaaaagcggcctgctggtgatggtcaacgctaataataacgacatcaaagatgtcaaagatctgaacggtaaagtggtcgcggtgaagagcggcaccggctccgttgactacgcgaaagccaatatcaaaaccaaagatctgcgtcagttcccgaacatcgataacgcctatatggagctgggaaccggtcgcgcggatgccgtgctgcacgatacgccgaatattctgtacttcatcaaaaccgcgggcaacggtaagttcaaagcggtaggcgaatcactggaagcgcaaaactacggtatcgccttcccgaaaggcagcgacgagctgcgtgagaaagtgaacggtgcgctgaaaacgctgcgcgacaatggtacctataacgaaatttataaaaaatggttcggcactgaacccaaataa

SEQ ID NO: 135385 - DNA, 504 bp, Enterobacter cloacae
atgagtaccgcaaaactggttaaatcaaaagcgtctaatctggtctatacccgcaacgatgtcgctgacagcgaaaagaaagcgaccattgagctgttgaatcgccaggtgatccagttcattgacctgtcacttatcaccaagcaggcacactggaatatgcgcggtgcgaactttatcgccgtgcacgaaatgctggatggcttccgtaccgcgctgaccgaacatctggacaccatggccgagcgcgcggtgcagctgggcggcgtcgccctgggtaccactcaggtcattaacagcaaaaccccgctgcagagctacccgctggacatccatcacgttcaggatcacctgaaagccctggctgaccgctacgcggtagtggcgaacgatgtgcgtaaggcgatcgacgaagcaaaagacgaagacactgcagatatcttcaccgcggcttcccgcgatctggataaattcctgtggttcattgaagccaacatcgagtaa

SEQ ID NO: 135386 - DNA, 513 bp, Enterobacter cloacae
atgaataaaattgcacgtctttcagcactggccgttgttctggctgcatccgtaggtaccactgcatttgctgcaacttctaccgtaaccggcggttacgcgcagagcgacatgcagggtaaagcgaacaaagctggcggtttcaacctgaaataccgttacgagcaagataacaacccgctgggcgttatcggttccttcacctacaccgagaaggataacaccagcaacggtacttacaacaaaggtcagtactacggcatcaccgctggtccggcttaccgtctgaacgactgggcaagcatctacggcgtagtgggtgttggttacggtaaattccagaacaacaactaccctcataaatccgatatgagcgactacggtttctcttacggtgctggtctgcagttcaacccgatcgaaaacgttgctctggacttctcctacgagcagtctcgtattcgtaacgttgacgtcggcacctggattgctggcgtgggttaccgcttctaa

SEQ ID NO: 135387 - DNA, 1581 bp, Enterobacter cloacae
atgaatgtcaccaccctgaaagatacgctggtcgcccgccgactggcactgaacccatggacgggattctactttttacagtcgctgttaattaacctggcgctgggctatgaatttagcctgctttataccgtggcatttacctgtgtgttacatctgctgtggcgcgcctttccgcgcgtccagaaagcggtggtcggcgcctattccctgctggcggctctgtactatccctttggccaggcctacggtgcccccaacttcaacactctgctggcgctgcacgccaccaacgtggaagagtctacggaaatcctgaccatcttcccgtggtacaactatctgctggcggtcttcatcttcgctctcggggtcattgcggttcgccgtaggatcgttgagccatcacgctggggaaaaatggatacgctgggcctgttgttcagcatcgggatcttctttctccagccggtgcaaaaccttgcctggggcggtgtattcaaggtgattgacaccggttatccggcctttcgttttgtcaaagacgtggtggtgaataacaacgaggtgctggacgaacaggcccggatggcgcagctggctggcatgaaagacagctggcacgtgttggcggtaaagccaaaataccatctctatgtggtggtgatcggtgaaagcgcgcgccgcgatgccctcggcgctttcggtggccattgggacaacacgccgtttgccagctcggtaaacggttatctgtttaacaactacatcgccgccagcggctcaacgcagaaatcgctcggcctgacgcttaaccgggtggtcgatggcaaaccacagtatcaggataactttgtcaccctcgccaaccgcgccggtttccagacctggtggttctccaaccaggggcaaattggcgagtacgacaccgctatcgccagcatcgccaaacgggcggatgaagtacagttcctgaaaaacggcgatttcgaagccaataaaaacacccaggacgagcagttgctgaagctgaccgagcaggtgctctcaacccagcgtacccagccgcagctgattgtcctgcacctgatgggctctcacccacaggcctgcgatcggaccaagggcaaatacacggttttcgttcagtcgaaagagacctcatgctacctctacagcatgacgcagaccgattcgctgctggctaagctttatcatcagttgcaaaattccggtgacactttttccctgacctatttttccgatcatggtctggcgttcaaggagcggggcaaagaggtgcagtatctggcgcatgacgataagttccagcagaacttccaggtgccgtttatggtgctatccagcgatgacaaagcgcataaagtgattaaggcgcagcgttcggcgaatgatttcctcagtttcttctcccagtggaccgggatccaggcgacggaaatcaccccacgctatcggtttatctctgagcaaaaggccggtccggtgtacatcaccaacttccagctgcagaaggtggactacgctcacctcggtaccgatgagttcacagtcaattaa

SEQ ID NO: 135388 - DNA, 126 bp, Enterobacter cloacae
atgaatgaattcaagaggtgcataaacgtgtttagccattcaccctttaaagtacgattaatgctgatcggtatgctgtgcgagatgatcaacggtaaaccgcagcagggcaaacccaattcctaa

SEQ ID NO: 135389 - DNA, 474 bp, Enterobacter cloacae
atgaaccgtcgcgcaggtaagccaataacaaaaaaagtgacgcagttagtgaatgttgaagagcacgtggaagggtttcgccaggtgcgggaagcgcatcgccgcgagctgatcgatgactatgtggagctgatctccgatctgatcaacgaagtgggcgaggcgcgccaggtggatatggccgcgcgtcttggcgtttcgcaacctacggtcgctaaaatgctcaaacgcctggccagcgtcggtcttattgaacagatcccctggcgcgggatcttcttaaccccggaaggtgagaagctagcccaggagagccgcgagcgccatcaaatcgtggagaacttcctgctggcgatcggcgtcagcccggagattgcccgacgtgatgcggaagggatggagcatcacgtgagcgaagagacgctggcgatgttcctgaaatttacccaaacacagggatctcaggaagcatga

SEQ ID NO: 135390 - DNA, 1113 bp, Enterobacter cloacae
atgactcttcccttcgtccagtcgctgctgcgcgatcgttttctccatttgctgctgattatcgcctgcgtgctcagcgccatcgtgccgtttgtcccggcaagctggccggcggccattgactggcataccatcgtcacgcttagcggcctgatgttgttgactaaggggatcgaactgagcggctattttgacgtgctgggccgaaaaatggcccgccgctttgtgactgagcgccagctggccatctttatggtgctggcggcggcgctgttgtctacctttcttaccaacgacgttgcgctgtttattgtggtgccgttgacgctgacgctaaaaaaatggtgcgccatcccggtgaaccggctgattattttcgaagcgttggcggtgaacgccggttcgctgctgacgccgatcggcaacccgcagaatattttgctgtggggacgatccggcctctctttcttcgggtttatcggtcagatgctgcctctggcagcggcgatgatgctgaccctgctggcgctgtgctggttctgttttccggcgaagcggctcagttaccagagcagcgacagggcgccgtcatggcaacccaagctcgtctggagctgtctgggactgtatgtggtgtttctgacggcgctggagatgaatcaggccctgtgggggctggcgctggtgctgctgggcttcctggtgctggcccgggcggtgatcgtccatgtcgactggtcgctgttgctggtgtttatggtgatgtttattgacgtccatctgctgacccagcttccggcgctgcaccaggtgctgagcggggtggggaccctctccggcggtggactgtggcttactgctattggcctgtcgcaggtgatcagtaatgtgccctcgactattctgttgctcaactatgtcccgccgtcgatactgctcgcatgggcggttaacgtgggcggctttggcctgctgccgggctcgctggccaatattatcgccctgcgtatggccagcgatcggcgcatctggtggcgcttccatctctactccattccaatgctgctatgggcggcactcagcggctactggctcttcaaactcagcgcctga

SEQ ID NO: 135391 - DNA, 1377 bp, Enterobacter cloacae
atgaagaacagactaccggcagattttttatggggaaattccgtctccagcatgcagacggagggggcgtggaacgagggtggcaaggggatgtcggtgtatgatatccgtcaaccggcggagttcgcctccgactggaaggtggcgaccgactcttatcatcgttatcgggaagatttcgatttgatgcaggatctgggcatgaactgctaccgttttcagatcgcctggagccgggtgtgccctgacggagatggcgaattcaatgaacaggggattgccttctaccatcaatttatagatgaactgatcgcccgcggcattgagccgatgatctgcctgtaccacttcgatatgccgctgtcgctggcggagcgctacaacggttttaccgaccgccgggtgatggacgcttttatccgctacggccagaagatgatcgcctgctatggcgacaaggtgaaatactggctcacctttaatgagcagaatctgtaccattcgccggaagcgtttctgatttccggctatctgcagggggagaagaccctgcgcgaactgtatctgatccagcatcatgtgatgatggcgcacgtccatctgactcactatctgcaccagacgaagccgcagtgtctgatgggcggaatgctggctcacgctctggtctatccggctacctgcaaaccacgcgatatcctctgcgcccagcagctggatgagttcttaaaccagaacctgctgcgcgcctacgcgggtgagggttatagcccggaggtgatgcattttgtcgccgcggaagggttcgatgatatctatcgtccggaggatctcgccctgatggcgacggtgagggtcgattatctggcgttcagctattacgccagccgcacattgaacagcgacgcgatcccgccgggaacggcggtcaacaactatatgctgtttggcaaccaggataacccgttcctgaaagcgacggaatggaactggcagattgatccgctgggcttccggacgatcatcactcgttactataacgattggcgcctgccggtgttcccgattgaaaacggcatcggggtgattgagtcctgggacggcgaacatcccattgccgatgattaccgcattgcttaccatcgcgaccatatcaacgccatgaaagcggccatctttgaggatggggcgcaggtgatcggctatctcggctggggattaatcgatatcctgagctcacagggcgatatgcgtaagcgctacggcgtggtgtacgtcaatcgcgaaaaccatgacctcaaggacctgcggcgggtgccgaagaagagctatgcatggctgaagcaggtgttccgcagcaacggcgaagcgatgtaa

SEQ ID NO: 135392 - DNA, 717 bp, Enterobacter cloacae
atgacggcgaagtatctgcaaatcgcgcgggaaataaaaaaacgcatcatcagccagcagtatcctgccagcgcgccgctacccgaccagtttgcgctggcggcggagttcagcaccagccggatgaccatccagcaggcgatgcgccagttaatcgtcgaagggctgatctatacccgaaaagggcagggcacctttgtgcggaaaaatttccttcagctgtcgcagtgggagctgcccggcagcgactatttcggcgccaccaaaacctgggagcatcttggcgaggtgcaaagcgaagtggtgcgctttgcggtgcgctttcccagcgacaaggagcaaagttcgctgcttatcgacgccgatgccccggtgtatgactttgttcgcctgcggctgctcaacggcgagccggtatcgctggatctgacggtcatgccggtggggctggtgccggggttaaccaaaagccatctggaaggttccgtgtttcgctatgtgcaggagacgctggggctgaagctgatgggatcttaccgcgtggtgcgggcgatgaagcccggggaactggataaacagcatcttcactgcgaaccgaccgatccggtgctggaggtggagcaggttatctatctggaggatggcacgccgctggagtacgcccactgccattatcgctacgatcacggcgggattattctggtgaataacggctag

SEQ ID NO: 135393 - DNA, 990 bp, Enterobacter cloacae
atgcgctcccatctactgtctcaatcattaacaaaggcctgtgtggcgttgatttcgcacacgacattaaagactatgaaattatctacactcttagcggcagccttcgccatcgtaggcttttgcaatacagcgtctgctgtcacctatcctttgccaaccgatggcagccgtttggttggtcagaatcaggtcattaccattccggatgataacaaacagccgctggaatacttcgcggcgaaatatcagatggggctttccaacatgctggaagccaacccgggggtggatacttacctgccgaagggcggtagcgtcctgaacatccctcagcagctgattctgccggataccgtgcatgaagggatcattatcaacagcgcggaaatgcgtctgtactactacccgaaaggcaccaataccgtgatcgttctgccgatcggcatcggccagttaggtaaagatacgccgatcaactggaccaccaaagtcgaacgcaagaaggccggcccgacctggacaccgaccgccaaaatgcatgctgaatacgccgctgccggcaacccgctgcccgccgtcgtaccggccggtccggataacccgatggggctgtacgcgctgtatatcggccgtctgtacgccatccacggcaccaacgctaacttcggtatcggcctgcgcgtgagccacggctgcgtgcgtctgcgtaacgatgacatcaaattcctgtttgagaacgtgccggtcggcacccgcgtacagtttatcgatgagccggtaaaagcgaccaccgagccggacggcagccgttacatcgaggtgcacaacccgctgtcgaccaccgaagcgcagttccagggcggcgagatcgtgccgatcaccctgactcagccggtacaggcagttaccagccagtctgatgtcgatcagaacgtggttgagcaggctatccagaaccgctccggtatgccggtgcgtctgaactaa

SEQ ID NO: 135394 - DNA, 786 bp, Enterobacter cloacae
atgaccagcagcctatcgcgacacccggcttttttatccctgcagggcggcatcaattttcgcgacctgggcggccagcttgccgccgacggacgccgcgtccgcagcggcaagctattgcgatccggcgcgctaaaccggttaacggcggaggatctcaaccacctcgatacttttccgctcagccgggtgctcgactatcgcgaccccggagaggtagcccgtactccggacaagcttagcccgcttacccattatcttaacgcgccggccaatccgccggtgagcgaggttaatgcgaaggtcaccgagctgaatgccgccacccttaacgcgctgaacggcgagcagtttatgctgcaactctatcgtcagctgccgtttaacaacccggcctatcgccagctcgccgcctggctgaccacgccttttgaaggcgctttactgcaacactgcgcggtcggcaaagatcgcaccggcgtcggctgcgcgttaacgctgttcgccgtcggctgcgacagcgaaacggtgatggaggagtatctccttacccacggcatgctgacgcaggtggaggcctggatgttggagctgctcggcaacgacctcactgcccaggggcgccaaagcctggcggatattctgacggtaaaagagtcctatctcgccgccgcgctgtcggctattcaccagcgctatggcaccgtcgacgcctggctggcggcagagtaccagcttacggcgccggttcgcgccgcgctgcaggcccggctgctggaagagtaa

SEQ ID NO: 135395 - DNA, 1641 bp, Enterobacter cloacae
  misc_feature (1107)..(1116): n is a, c, g, or t
gtgctagtatccagcaacgttaccatgcagtttggcagtaagccgctgttcgaaaatatctccgttaaatttggcggcggcaaccgttatggtctgatcggcgccaacggcagcggtaaatcgacctttatgaagatcctcggcggcgatctcgaaccgacgctgggcaacgtttctctcgacccgaacgagcgcatcggtaagctgcgtcaggatcagtttgcctttgaagcgttcaccgtgctggatacggtcatcatgggccacggcgagctgtgggaagtgaagcaggagcgcgatcgcatctacgccctcgctgagatgagcgaagaagatggctacaaagtggccgacctggaagtcaaatatggcgaaatggacggctactcggcggaagcgcgcgccggcgaactgctgctcggcgtcggcattccggttgaacagcattatggcccgatgagcgaagtcgcgccgggctggaagctgcgcgtcctgctggcgcaggcgctgttttccaatccggatatcctgctgctcgatgaaccgaccaacaacctggacatcgacaccattcgctggctggagcagacgctgaacgatcgcgacagcaccatgattatcatttcgcacgaccgtcacttcctgaacatggtctgcacccacatggcggatctcgactacggcgagctgcgcgtgtatccgggcaactacgacgaatacatgaccgcggccacccaggcgcgtgagcgtctgctggcggacaacgccaagaaaaaagcgcagattgcggacctgcagtccttcgttagccgcttcagcgccaacgcctctaaatcgcgtcaggccacctcgcgcgcgcgccagattgacaaaatcaagctggaagaggttaaagcctccagccgtcagaacccatttatccgcttcgagcaggataagaaactgttccgtaacgcgctggaagtggaagcccttaccaaaggctttgatgaaggtccgctgttcaaaaacgtcaacctgctgctggaagtgggcgaaaagatcgccattctgggcgccaacggcgtgggtaaatccacccacgccgttggcgcccagaatggcgannnnnnnnnnggtaaatccaccatgctgaaaaccctggtaggcgaactgcagccggacaacggcagcgtgaaatggtctgaaaacgcgcaaatcggctactacgcgcaggaccatgagtacgagttcgaaaacgacctgacggtcttcgaatggatgagccagtggaagcaggaaggcgacgacgaacaggcagtacgcagcatcctcggccgtctgctgtttagccaggacgatatcaaaaagccggcgaaggtgctttccggtggcgagaaagggcgcatgctgttcggtaagctgatgatgcagaagccaaacatcctggtgatggacgaaccgaccaaccacctggatatggagtcgattgaatcgctgaacatggcgctggagatgtatcagggcaccctgatctttgtctcccacgaccgtgagtttgtcagctcgctggcgacccgcgtcctggagatcactccggaccgcgtgatcgacttcagcggcaactacgaagactacctgcgcagcaaaggtatcgagtaa

SEQ ID NO: 135396 - DNA, 2364 bp, Enterobacter cloacae
atgaagacgctgaaacactggagtttgcatcaacagctggagcatcacgttgaactgacggtcgatggccagcacaccctgtgcctgtacgtactggaagagaatttgttccgcgtcctgctaaaacgccagggccagctggcgctggatcgcacctggagcatcgctccacagcaggatgtgccgtgggaaggccgcgcccgggatgacctcagcggttttagtctcccggcctggcagctggcccaggagggcgatacgctgactatcgccacccgccagctgcgcgtcatcgttcaccagccgctgtggctggagtggagctatcgcgacgaggccggcgaatggcagccgcttgccaatgaccgtccgaccagcgcctacctggcgaatgcccacggcgacggcgtcgcccattatctgagccgccgcaaagacgagcgtttctacggcctgggcgaaaaggccggcgacctgcagcgcaccggtaaacgctatgagatgcgtaacctcgatgccatgggctacaacgccgtcagcactgacccgctgtataaacatattccgttcaccatcacccagcgtagcgatatcagctacggcctgttctatgacaacctgagcagctgctggctggatctggggaacgagatcgacaactaccacaccgcctatcgccgctggcaggcggaagccggcgacatcgattattacctgtttaccggtaagcaggtgctggatgtgaccaaagccttcgttcgcctgaccggtaaaacgctgtttggacccaaatggagcctcggctacagcggctccaccatgcactataccgacgcgccggatgcgcaaaatcagctgatgaactttatccgcctgtgcgagcagcacgcgatcccctgcgattcgttccagctctcttccggctatacctcaatcaacggcaagcgctacgtctttaactggaactacgacaaggtgccgcagcccaaagtgatgagccagtcgtttcacgatgccgggctgaagctggccgccaatatcaaaccgtgcctgctgcaggatcacccgcgctacggcgaggtggcggagcgcggtctcttcattcgcgattcgcaaactgacgctccggagcgttccagcttctgggatgatgaagggtcgcatctcgatttcaccaatccgcaaaccgtggcctggtggcaggaaggcgtgaccacccagctactggagatgggcatcgattcgacctggaacgataataacgaatacgaagtatgggacggcgaagcccgctgctacggctttggccgcgaaatcgccatcaaacatattcgcccggtgatgccgctgttgatgatgcgcgcctcgctggaagcccagcagcgctttgcgccgcaaaagcgcccatatctgatctcacgctccggctgcgccgggatgcagcgctacgtccagacctggagcggcgacaaccgcaccaactgggatacgctgcgctataacatccgcatgggcctggggatgagcctttccgggctgtttaacgtcggccacgacgtcggcggtttctccggcgataaacccgagccggaactgtttgtgcgctgggtacaaaatggcgtcatgcatccgcgctttaccattcactcgtggaatgacgaccagacggtaaacgaagcatggatgtatccggccatcactccggcgatccgctcagccattgagctgcgctaccgcctgctgccctatctgtacactctgctatggcaggcgcatgctgatgatgagccgatgctccgcccgaccttcctcgatcaccagcacgatgcgcagaccttcgccgaatgcgatgacttcctgctgggccgcgacctgctggtggccagcgtggtcgagcctggcgcccgccagcgtgaagtatggctgccagataatcaggccggttggtacgatttctacagccatcagtggttcgccggcggccagtgggtgacgctggacgcgccgctggaaaaactgccgctgttggtccgcgccggcgctggtctgccgcttagtgaacgtatcagccatgtcgatgcgcaaaaagacgatcgtcgcgaactgcagctgttcccgctgaaaggtaccggctcaacccgcggtctgctgtttgaagacgacggcgaaagctggggctataaacagggggatgcgctatggctggagtgggaaatgacctgcagcgccaacagcataaacctggatatcaacgcccgcggcaactatcgcccggcgtggaaagcgctgaagctgtcattaccggtaggagaaaagcgtaagctgctggtgaatggcgttgaaggaacggagtggaggttctga

SEQ ID NO: 135397 - DNA, 1305 bp, Enterobacter cloacae
  misc_feature (392)..(401): n is a, c, g, or t
atgagtcaaggcctcaacaatgatatcgccgtcagcaaaacgcgccgggtagtgaaaaacctgcgctggtgggtgctggtcctgtttttacttggcgttaccgtcaactacatcacacgcaactcgctgggaattatcgcgccggaactaaaagcgaccctcggcattactaccgaacaatactcgtggatcgtcggcgcgtttcagctggcttacacgattttccagccgctgtgcggctggcttatcgacgtcatcggcctgaagcttggctttatgatctgcgccaccctgtgggcgctggcctgtatcgcccacgccggggccggtagctggctgcacctggctattttgcgcttctttatgggtggggccgaggcggccgctactcnnnnnnnnnncgccaaaaccatcggcgaatggtttccgaaatctgaacgcccgattgccgccggctgggctggcgttgggttctccatcggcgcgatgctggccccgccgatcatctacttcgcccacgcctccttcggctggcaaggggcgtttatgtttaccggcgcgctggcgctactgtgggtagtactatggtgggccttctatcagaccccggaaaagcaccgcaatctcagcaaaagcgagctggagtacatcaaacaggataacgaagccccgccggtaaaacagcccttctttaccgcgctcaaaaccgtctcgaaaaataaacgtttctacgggatcgccattcccgcctttatggccgagcccgcctgggcggtgctgagtttctgggtgccgctgtacctgtcgaaagagcacggcatggatttgaagcagatcgccatgtttgcctggctgccgtttctcgccgccgatctcggcagcgtggtcagcggctacctcacccgcctgtatgttcgctggttcggctgtacgcgagtgaactcggtgatcgccagctcggtaaccggcgcgttcctgatgctctccctggccctcgtcgccatcacccgcgatccctatatcaccatcatcctgatctccattggcggcttcggccatcagatcatctcctgcatgctcagcgcgctggtggtggagtctttcgacaagggacaaatggcgacggtcaacggtatgcgcggctccgcagcgtggatcgccagcttcttgttctcgttattaatcggggtgaccgccgacaaaatcggcttcaacccgctatttatcgccatgggtttctttgacctgattggcgccgttttcctggtggcatttattgctgaacgtcgcgccaagcgcgcctga

SEQ ID NO: 135398 - DNA, 1245 bp, Enterobacter cloacae
atgttggaccaattcaggctagggcagaaaaatcgtctggcaaagcgctatttatgcaagttttttcatgaaatgagcgagatcgcatatttgacagcggaatttgcttgtaacgtgtgctttggcgattatgaaaattctttcatttttcaatcggagctggatcacaaaatggataaaaagctgcgcgtcgccgaaattgccgcccgcaccgggctatcgcccagcaccgtttcacgcgtcctggccgggaaagcgaataccagcgacaaggcgcgccgggcggtgctggagtgcgcccgcgagctgggtgtcatgcagggactggccgccgggcgtctgctgctcaatcatctgctggtgtttgccccgcagcgcgcattcgatgagcgatcggatatcttctactaccgggtgatccagagcatcaataacgcgctggcggcgcatgaagtgcgcctgcgctactgcgcgctggatgagaacgacagcgacgccaacctgtttcttgcccgcatgaatgaacctgagacccaggccgcggtgctgctggggatcgacgatccgcatattcatggcctggcggcggatctgggcaaaccctgcgtattgatcaactgtcgggatgaagggatgcggctgccgtccatcgctcccgatcatcggctgatcggccagtgcgcggcccgctatctgtttgatatggggcatcgggcggtgatgaacgtgatgtgcctacgccgctataccatggagctgcggctgggggggattcaggaggcgtggcgcgcgcgtaatctgcgctttaccgccagccgggatcttatcagcgtcgccaactttagcgccagagagacggaagagcaggtgggcgcctggcttgacggcttacagggcaggccgttgcccaccgccttcctggtgggcggcgattttatggccgccggcaccgtcagcgcattgcaaaagcgtggcctgcgggtgccgcaggatgtctcggtgatgagcattgacggatttaatctggcggcgattcaggaggtgccgctgaccgcggtgcatgtgccgcgggatgagctgggcagcgaggcggtgcatctcctgcagcagcgcctgctgcgcccggaggcgccgcacggctcgctactgctgcatggcacgctggtggtacgcgattcggtacggcggatccggccgggcaaaggccataccgccgtcgagccgcaggggctgtatgacgattag

SEQ ID NO: 135399 - DNA, 1266 bp, Enterobacter cloacae
atggctgctctcccgacccacgaaacacttcccgccgatcacaaagcggcgattcgccagatgaaacaggccctgcgggcgcaaattggcgacgtccaggcggtgttcgataagctctcagcgcgcatcagcgagcggctgcaggagattgagacactgaaagccgcaggccaggaggtctggccaaccattccgttccgcgatatcgccgaaggaacagtgagcgatgagcagcgcgcggccattaagcgccggggctgcgcggtgattaaaggccacttcccacgcgaacaggcgctggcgtgggataccgcgatgctggaatatctggatcgcaaccatttcgacgatgtttacaaagggcctggcgacagcttcttcggttcgctggaggcttcgcgcccggagatctacccgatctactggtcgccctcgcaaatgcaggcgcggcagagcgatgaaatggcggcagtgcaatcttttctcaaccgcctgtggcgttttgaacagaatggcaaacgctggttcgatccggacgtcagcgtgatctatcccgaccgcatccgccgccgcccgccgggaaccacttcgaaggggctgggggcgcataccgattccggcgcgctggagcgctggctgcttcccgcctatcagcaggttttcgccaacgtttttaatggcaatatcgacgcctacgacccgtgggacgccgcgcaccgtaccgaagtggaagagtataccgtcgacaacaccaccaaatgctcggtgttccgcaccttccagggctggaccgcgctttcggacatgatcccgggtcaggggctgctgcacgtggtgccgatcccggaggcgatggcttatgtgctgctgcgccccctgctcgacgatgtgccggaagatgaactgtgcggcgtcgcgccgggcagagtgctgccgatctctgagcagtggcacccgctcttgattaaagcgttaagctcgattccagcgctgaatgccggggactccgtctggtggcactgcgacatcattcactcggtggcgccggtggaaaatcagcagggctggggaaatgtgatgtacattccggccgcgccgatgtgcgagaagaacctcgcctacgcgcagaaagtaaaaatcgccctggaaaaaggcgcctcgccgggggatttcccgcgcgaggactatgaagccagctggcaggggcgcttcaccctggaggatctgaatatccacggcaaacgggcgctgggtatgctggtctaa

SEQ ID NO: 135400 - DNA, 816 bp, Enterobacter cloacae
atgaccgttaaagttatcgtcaccgatatggacggaacttttctcaatgacgccaagcagtacgaccgcccgcgtttcctcgcccagtttgcgcagctcaggcagcaaggtattgaattcgttgtcgccagcggcaaccagtactatcagctgatctccttcttcccggagatccgcgagcagatttcattcgtcgcagaaaacggcgctctggtttatgaacatggcaagcagctgttccacggcgaactgacccgccacgaatcacaagtggtgattggcgaattgctcaaagatccgcagctcaattttgtcgcctgcggcctgcagagcgcctacgtcagcgataaagctccggacgcctttgttgagctgatgtcgaagcactaccatcgcctacagcgggtgagcgactatcacgccatcgacgatacgctgtttaaattctctctcaacctgccggacagcgagatcccacagctgattgataaactgcacgtgtcgctcgacggcatcatgaagccggtcaccagcggctttggctttgtcgatttgattatccctggcctgcataaagccaacggcatcagccgtttgctcaagcgctgggatctttcgccgcagcaatgcgtcgccatcggcgacagcggcaatgacgccgaaatgctgaagctggtgaaatacgctttcgccatgggtaacgctgccgacagcatcaaggccatcgccggctacgctaccgacgataataaccatgacggcgcgctgaacgttatccaggccgtcctcgataacaccccgcccttcaacgcctga

SEQ ID NO: 135401 - DNA, 2433 bp, Enterobacter cloacae
atgactaccctgaagctcaacaccctcagcgcccgtatccaggcccataaaatggcgctggtgcatatcgtcaagccgccggtctgtaccgagcgcgcccgccactatacggagatgtatcagcggcatctcgataaaccgatcccggtgcgccgcgcgctggcgctggctcaccacctggcggagcgcaccatctggatcaagcacgatgagctgatcgtcggtaaccaggccagcgaagtgcgcgccgcgcctattttcccggaatacaccgtcagctggattgagaaagagatcgacgatctcgccgaccgccccggcgccggcttctcggtcagcgaggagaataaacgcgtattgcatgaagtgtgcccatggtggcgcggccagaccgtacaggaccgctgctacggtatgttcaccgatgagcaaaaggcgctgctcgccaccggcattattaaggcggaaggcaatatgacctccggggatgctcacctcgcggtcaactaccccttgctgctggagaaagggctcgacggaatgcgtgcgaaagtcgccgaacgccgctcgcgtatcaatttgacggtactggaagacctgcatggcgagcagttcctgaaagcgattgatatcgtgctggaagcggtcagcgatcacagcaaacgcttcgccgcgctggcgcgcgagatggcgacagcagaatcccgcgaatcacgccgccacgaactgctgacgattgccgaaaactgcgacgtcatcgcccatgagccgccgaaaaccttctggcaggcgctgcagctgtgctacttcattcagcttatcctgcagattgaatccaatggccattcggtatccttcggccgtatggaccagtacctctacccgtactaccgccgcgacgttgagttgcaacagttgctggatcgcgaacaggccattgagctgctgcacagctgctggctgaagctgctggaggtcaataagatccgttccggctcacactccaaagcctctgccggcagcccgctataccagaacgtcaccatcggcggccagaatctggtggatggtaagccgcaggacgcggtcaacccgctgtcgtatgcgatcctggaatcctgcggtcgcctgcgttctacccagccgaacctcagcgtgcgctaccacgccgggatgagcaacgacttcctcgacgcctgcgtccaggtgatccgctgcggtttcggcatgccggcgtttaacaacgatgaaatcgtcatcccggaattcattaagctgggcattgagccgcaggacgcctacgattacgcggctatcggctgtattgaaaccgcggtcggcggtaagtggggctaccgctgtaccggcatgagctttattaacttcgcgcgggtgatgctggcgacgctggaaggcggccgcgatgccaccagcggtcaggtgttcctgccgcaggagcacgccctgtcgaaaggcaacttcgctaacttcgatcaggtgctggccgactgggaccgccagattcgttactacacccgtaaatccatcgagattgagtacgtggtcgataccatgctggaagagaacgtccacgatattctctgctcggcgctggtcgatgactgcatcgaacgggcgaaaagcattaagcaaggcggcgcgaagtatgactgggtttccggcctgcaggtgggtatcgccaacctcggcaacagcctcgcggcggtgaaaaaactggtcttcgatcagggcgccatcggccagcaggagctggcgaaggcgctggcggaagatttcgacggtctgacccacgagcagctgcgccagcggttgatcaacggcgcgccgaagtatggtaacgatgatgacagcgtcgacgagttgctggcgcgggcctaccagacctatatcgacgagctgaagcagtatcacaatccgcgctatggccgcggcccgattggcggcaattattacgctggcacctcctctatttccgctaacgtcccgttcggcgcgcagaccatggcgacgccggatggccgtaaagcgcataccccgctggcggagggggccagcccggcctccggtaccgaccatctgggtccgacggcggttatcagttcggtgggcaagctgccgaccggggcgatcctcggcggcgttctgcttaatcagaagctgaatccgtcaacgctggagaacgagtccgataagcagaagctgatggtgctgctgcgcactttcttcgaggtgcacaaaggctggcatatccagtacaacatcgtgtcgcgcgacacgctgctggaagccaagaaacatcctgaccagtaccgcgatttagtggtccgcgtcgctggatactcggcgttcttcaccgccctgtcgccggatacccaggacgatatcatcgcccgtaccgaacatacgctgtaa

SEQ ID NO: 135402 - DNA, 900 bp, Enterobacter cloacae
atgatcttcaacatccagcgctattccacccatgacggcccagggatccgcaccgtcgtcttcctgaaaggctgctcgctgggctgccgctggtgccagaacccggagagccgcgcccgtagcgaagatctgctgtatgactcgcggctgtgcctggccggctgcgagctgtgccagcaggcggcgccggcggttatcacccgcaccctcgatggcctgatcattcaccggcaaaacgttaacgacagccatatcgccgcgctgcgcgactgctgccccaccaccgcgctcacggtgtgcggcgaggagaagagcgtcgaggagatcatggcgacggtgctgcgtgataaaccattctacgatcgcagcggcggcggcatcactctttccggcggcgaaccctttatgaacccaacgctggcgcaagcgctgttcgaagccagtcatcaggcaggcattcacactgccgtggaaacctgcctgcacgtgccgtggaaatacattgaaccggcttcaccctttgtcgacctgtttctcgccgatctgaagcatgttgacgaggccgtttttctgcagtggaccgacggcagcgcccgccgggtgctggataacctgcagcgtctggcgcaggcggggaaaaaaatgattattcgcgtgccgttgatccagggattcaacgccagcgaagccgacattgccgcgatcaccgattttgccgccgatcgcctgcaggtcagcgagatccattacctgccgtaccacacgctgggaatgaacaaataccagttactcagtcagccctacaccgcaccggacaaaccgctggatgctcctgagctgctcgccttcgcgcaggattatgcgcaaagcaaggggctaacggcgatattacgaggataa

SEQ ID NO: 135403 - DNA, 756 bp, Enterobacter cloacae
atgaccgttgagctgagcgatgaagagatgctgcgctataaccggcagatcgtcttgcgcggttttgattttgacggccaggagcggttaaaagccgctcgcgtgctggtggtcggcctcggcgggctcggctgcgccgccgcgcagtatctggccgccgccggggtcgggcaactcaccctgctcgatttcgacactgtctcgctctccaacctgcagcgccagacgctgcacagcgacgccaccctcggccagccgaaggtggattccgcccgcgaggcgctggcgcgcattaacccgcacgtccgtctggtcccgctcaatgccttgctggatgaggcggcgctggcggcgcagattgccgatcacgatctggtgctcgactgcaccgacaacgtcgccattcgcaaccagcttaacgtcggctgctttcagcacaaaaccccactggtctccggagcggcgatccgtatggaggggcaaatcagcgtctttacctatcaggatggcgaaccctgctaccgctgcctgagccgtctgttcggcgaaaatgccctcacctgcgtcgaagccggggtaatggccccgctggtaggcaccatcggttcgctgcaggcgatggaggcgattaagctgctgagcggctacggcacccctgccagcggaaaaatcgtcatctacgatgccatgacctgccagtttcgcgaaatgaggctgatgcgtcacccgcagtgcgaggtatgcggctcgcactga

SEQ ID NO: 135404 - DNA, 1173 bp, Enterobacter cloacae
atggattttaccgccggactgatgccgctcgacacagccctcgcccagatgctcgatcgtattacgccgctgaacgcgacggaaactgtaccgctgttgcaggccttctcgcgtgtgaccgcccatgacatcgtctccccgctggatgtgcccggctttgataacgcggcgatggatggctatgccgtccggctgaacgaccttcgcgacggcgcggcgctgccggtcgccggtaaggccttcgccggccagccgttcaacgacgcctggccggcgggcacctgtatccgcatcatgaccggcgcgccggtgccggaaggctgcgatgcggtggtgatgcaggaagagactgaacagaccgaggccggcgtgcgctttatcgcgccggtaaaagccgggcagcatattcgccgccgcggagaagatattgcccacggcgcggtggtcttcccggcggggacacccctgacggtggccgagctgccggtgctggcctcgctcggcattgccgaggtcgaggtggtgcgcaaggtacgcgtcgcggtcttctcaaccggcgatgagctgcagctgccgggtcaaccgctcggcgacggccagatttacgataccaaccgcctggcagtgcacctgatgctgcagcagttgggctacgaggtcattaacctcggcattattcctgacgacccggcgaagcttcgtgacgcttttatcgacgccgaccagcaggccgatgtggtcattagctccggcggcgtctcggtgggtgaagccgatgggaaacccttcgccttcggcaagctcagcagcagctggttctgcggcctgccgggtaacccggtgtccgccaccgtcaccttctgtcagctggtgcaacccctgctggcgaaactctcgggcaagcacggcccgcttcaggcgccccgcctgcgggtccgcgccgccacgcgcctgaaaaagtcgcctggccgcctcgattttcagcgcggtattctgcagcgcaacccggacggcgaactggtggtgaacaccaccggccatcagggctcgcacattttcagctccttcagcctcggcaactgctttatcgtgctggagcgtgagcgcggccatgttgaagcaggcgaatgggtcgaggtcgaacccttcagtcacctgtttggggggctgtaa

SEQ ID NO: 135405 - DNA, 942 bp, Enterobacter cloacae
atgggcaaggcggttatagcaattcacggcggcgcaggggcgatttctcgcgcgcaaatgacgccggagcgggagcgagagtatgtggcggcgctgtcgactatcgtcgaaagcgggcagaaaatgttggccgcgggcgccagcgcgctggatgccgtgaccgaggccgttcggctgctggaggagtgtccgttgttcaacgccggaatgggctcggtatttacccgcgatcaaacccacgagctggacgcctgcgtaatggacggctacagcctgcaggcgggcgcggtagccggggtcaaacatttgcgtaatccggtgctggcggcgcgtctggtgctggagaagagtccgcacgtattactgatcggcgagggggcggaaaattttgccatctcccacgggatggcgcgcgtggataacgatctcttttccactcctgaaaggctgctgcagctgcaggaggcgaaagcgggcggggagattatcctcgaccaccacgccgctcccctcgacgaacgccagaaaatgggcaccgtcggcgcggtggcgctcgatctggccggcaatctggcggcggcgacctccaccggcggcatgaccaacaaactgcccggacgcgtcggcgacagcccgctgccgggcgcggggtgttatgccaataatgccagcgtggcggtctcctgtaccggcaccggcgaagtctttatgcgcaccctggcggcctacgatatcgccgccctgatggagtatgggcagctcagtctctattccgcctgcgagcgggtggtgatggagaaactgccggctctcggcggcagcggcgggctgatagccgtcgatcgcgaaggcaacgtcgttttaccgtttaacagtgaaggcatgtaccgcgcctggtgctatgccggcgatacgccgaccattggcatttatcgcgaatag

SEQ ID NO: 135406 - DNA, 1860 bp, Enterobacter cloacae
gtgtcgcaaactcacgaaaccgatacctgcgaagtgctggtggtgcgcaacctgaacgtggcgttccgccagcaggatgcgccggaggtgcaggccgtgcgtcagctttccttcagcctgcgccgcggcgagacgctggcgatagtgggtgagtccggttcgggaaaatcggtgaccgcgctggcgctgatgcgtctgctagaggcggccagcagcgaggtgaacagcgaggggctgtggttgcggcggcgtaaccggcaggtgatcgcgctcaatgagcaaacggacgctgagatgcgccgggtgcgcggcgcggatctggccatgatttttcaggagccgatgacctcgctgaatccggtttttaccatcggcgagcagattgccgaatccctgcgcctgcaccaggggctggggcgcgaagaggcgctgcgcgcggcgaaaaagatgctcgatcaggtgcgtattccccaggcggaagagatgctctcgcgctatccgcaccagctctccggcggcatgcgccagagggtgatgatcgccatggcgctctcctgtcggccggcggtgttgatagccgatgagccaaccacggcgctggatgtcaccatccaggcgcaaattctgcaactcattgccgtcctgcaaaaggagatggcgatgggggtgatctttatcacccacgatatgggcgtcgtggccgatatcgccgatcgggtgctggtgatgtatcgcggtgaggcggtagagaccggcagcgttgaggagatctttcgttcgccgcagcacccgtatacgcagtcgctgctggcggcggtcccgcggctgggggagatgcgtggccaggatctgccgcgccgttttccgctgccgggccagccgctggcggagagcgaaacgcccgatacggtagtcgccggcgagccgatcctgcaggtgcgtgacctggtggcccgttttccggtgcgcggcgggctgctcaatcgcgtgacgcgcgaagtgcatgcggtggagaaggtcagttttgatctctggccgggagagaccctgtcgctggtgggcgagtccggctgcggcaagtcgaccaccggccgggcgctgctgaggctggtagagacccagggaggcaccattaccttcgacggtcagcggatcgataccctcgccggcggcaagctgcaggctctgcggcgcaatattcagtttatttttcaggatccttacgcctcgcttgatccgcgtcagacggtcggcgattcgattatggagccgctgcgggtgcatggcctgctgcgtggggaagcagcgcgtgagcgggtcgcctggctgctgaagcgcgtggggttgcagccggagcatgcctggcgctatccccatgccttttccggcggccagcggcagcggatctgcattgcccgcgcgctggcgctgaatccgaaggtggtgatagccgacgagtcggtgtcggccctggatgtctccattcgggcgcagattatcaatctgatgctcgacctgcagcgcgagatgggcatcgcgtttctgtttatttcccatgatatggcggtggtggagcgcatcagccaccgcgtggcggtgatgtatcgcggtcgcattgtcgaaataggcccgcgccgcgcggtgtttgaaaacccgcagcacccctatacccgtaagctcatggccgccgtaccggtggccgacccgggccaccgtcatccgcagcgggtcctgctgtctgatgacgtcccgggcaatatttataagcggggcgaggagatcgccagcgtgccgttgcagcaggtcgggccgggccacttcgtcgcccgcgaatccgccgatgtgctgggcagaacataa

SEQ ID NO: 135407 - DNA, 1542 bp, Enterobacter cloacae
atgacacaacctgtttcacgcaaatggtggctggcgctgagtatcgcggcggccctggcgagcgctcccgcctttgccgccaaagatgtggtggtggcggtcgggtctaacttcacgaccctcgacccctatgatgccaacgataccctgtcgcaggcggtggcgaagtccttttatcaaggcctgttcggccttgataaagagatgaagctgcaaaacgttcttgctgagagctataccgtgtcaccggacggcctggtgtacaccattaagctccacagcggggtgaaattccaggatggcactgactttaacgccgaggcggtaaaggctaacctcgatcgcgcgagtaacccggaaaaccatctcaagcgctataacctatataaaaatatcgccagtaccgaggcggtcgatccgaccacggtcaaaattaccctgaagcagcccttctcggcgtttattaacattctcgcccatccggcgacagcgatgatttcgccggcggcgctgaaaaaatatggtaaggatatcggcttccacccggtgggcaccgggccgtataagctcgacacctggaaccagacggattttgtgaaggtcagcaagttcgatgggtactggcagccggggctgccaaagctggattctatcacctggcgtccggtggtggataataatacccgggcggcgatgctgcagaccggcgaggcgcagttcgccttcccgatcccttacgaacaggcgccgctgctggcgaaaaacagtaaactggagctggtggccagcccgtcgatcatgcagcgctacatcagcatgaacgtgacgcagaagccgttcgataatccgaaggtacgggaagccatcaactatgcgattaaccgtcaggcgctggtgaaggtagcgttcgccggatacgccaccccggcgaccggagtggtgccgccgtcgatcgcctatgcccagacctacaccgcctggccatacgatccggcgaaagcgcgccagctgctgaaagaggcgggctaccctaacggtttcagcaccacgctgtggtcatcgcataatcacagcaccgcgcagaaagtactgcagttcacccagcagcagctggcgcaggtggggattaaggcgcaggtgacggcgatggacgctggtcagcgggcggcggaagtggaaggtaaagggcagaaagagagcggggtacggatgttctataccggctggtccgcctccaccggtgaagccgactgggcgctgtcgccgctgttcgcctcgcaaaactggccgccgacgctgtttaataccgcgttttacagcaacccgcaggtggataacgcgctgagcgaggcgctgaaaaccaccgatccgcaagagaaaaccaaactctataaagaggcgcaggatattatctggaaagagtcgccgtgggtgccgctggtggtcgagaaactggtctccgcccacagcaagaacctcaccggtttctatatccagccggataccggctttagcttcgaacaggcggacctgacgccgtga

SEQ ID NO: 135408 - DNA, 852 bp, Enterobacter cloacae
atggctaccaatctgcaggacgggaatacaccttgtctggcagctacaccttctgatccacgtcccaccgtgctggtgtttgattccggcgtcggtgggttgtcggtttataatgagattcggcagctgctgccgaatctgcattacatctatgctttcgataacgttgccttcccctatggcgagaagagcgaggagtttatcgttgagcgcgttgtggaaatcgtcaccgctgtccagcagcgttatcccctggcgctggcggtgatcgcctgcaataccgccagtaccgtctccctgcctgccctgcgtgaaaagttcgctttccccgtcgttggcgtggtgccggcgatcaagcccgccgcccgtttaacggcgaacggcattgttggcctgctggcgacgcgcggtaccgtaaagcgtccttatacccgtgagctgatcgaccgctttgccaatgaatgtcggattgaaatgctggggtcggcggagctggtggagctggcggaagcgaagctgcacggcgagcctgtgccgttagaagagctgcgccgtatcctgcgcccatggctgcggatgcaggagccgccggatacggtggtgctgggctgcacccactttcctcttttacaggaggagctgcagcgcgttctgccggaaggcacgcggctgatcgattccggcgcggcgattgcccgacgcaccgcctggctgttagagcatgaagcgccggatgcgaagtccagcgacgagaataaagcattctgcatggcgctgacggcagaaacagaacagcttttacccgttctgcgtcgctatggcttctcgacgctggaaaaattaccgctctaa

SEQ ID NO: 135409 - DNA, 1839 bp, Enterobacter cloacae
atgattaaaaaagcttcgctgatgacggccttatccgtcacggcattttccggctgggcgcaggatagcaattcagatacgttggtggtgacagcaaaccgttttcaacagccggtcaataccgtgctggcgccgaccgacattgtgacgcgcgatgacatcgaccgctggcagtccaaagatttaaacgatgtcatgcgtcgtcttcccggcgttgatattgcccgcaacggcggcatggggcagagcgcttcgctgtatgttcgggggacggaggctcgtcacgtgctggtgctgatcgacggtgtgccgatggcgcgtccggggatctccaacggcgtagatatcagtcagatccctatctcactggtccagcgggtggaatacatccgcggcccgcgctccgcggtgtacggctccggagcgatcggcggggtggtgaacatcatcaccatgaccgacgctgagcgttcgcagatcaacgccggcgcgggtacgaacggctatcagtcctatgacggcgcctttaacaagcggtttggcgatacgttggttaccgctgctggcgcctatcagaccaccaaagggtttaacgtccaaccgaattcctcttacagcggcgacagcgatcgcgacggctaccgcaataaaatgctgtggggcggggtacagcatcagttcgatgacaacttctcggggttcttccgcggctatggttattccgccaacgctgactatgaccagggtaactggggctacgcaggtggaaacgatgaagatcaatcctatacccaatcctgggataccggtctgcactaccactccggaatttactcctcccagctgattgctaactatcagcgcatcaaagattacaactacagcagcgacgctggccgctatgccgcgggcaccaccctggatgatatggaacagcgctatatccagtggggaaataatgttgtggtaggccatggggcagtgagcggcggcgttgactggaaacaagagaagctgaaatccagcggaacgaccagtaccgacgtgtataagcgtgacaccaccggtctttatctgacgggacagcagcagattgacagcgtgacgctggaagcttccggccgtgaggatcatgacgagcagtttggctggcacggtacctggcagacggccgcaggctgggaatttatcgacggttatcggacaacgctctcgtacggcacaggattcctcgccccctccctcgggcagcagtacggtgcagaacgctttggcatcgcctctaacccgaatctgaagccagaggagtcgaagcaatgggaagcgggccttgaagggttaacggggccggtcgactggcacctctccgcgtatcgctatgagattcaaaacctcatcgattacgacaacaacgcctattacaacgtcaagtcggcgacgattaaggggctggagtggacggggaatataaccaccgggccggtggagcaccatctgacgctgcagtatgttgaccctcgcgatgatgaaaccaataagatcctctatcgccgggcgaagcagcaggtgaaatacgagctgaacggccaggtctacgatctggggtgggatgtgacgtatcactacatcggcaagcgttacgattatgactacgacaactcgcgtaccgtcaatatgggtgggttgagcctctgggatgtcggtttatcgtatcccgtcacctcacacctgacagttcgtggtaaaatagccaacctgttcgataaagattacgagacagtttatggctaccaatctgcaggacgggaatacaccttgtctggcagctacaccttctga

SEQ ID NO: 135410 - DNA, 1101 bp, Enterobacter cloacae
atgacccccgaacaccttcctaccgaacaatacgaagcgcagctggcagaaaaagtcgtccgtttgcaaaccatgatggcgccttttgccgcgccggttccggaagtgtttcgttcgccggtcagccactaccgtatgcgcgccgagttccgtctgtggcacgatggcgacgatctgtatcatattattttcgatcagcagacccggtcgcggattcgcgttgacagcttcccggccgccagcgcgctgatcaatcagctgatgaccgccatgctggagggcgtacgcaacaatcccgtgctacgccagaagctgttccagattgactatctgaccaccctcagcaaccaggcggtcgtttcgctgctgtatcataaaaagctggacgatgcctggcgagagcaagcggaggcgctgcgtgacaccctgcgagcccaggggctcaatgtgcatctgattgggcgggcgaccaaaactaaaatcgagctcgatcaggattatatagatgaacgcctgccggttggcgggcgggagatgatctaccgtcaggtggaaaacagctttacccaaccgaacgcggccatgaacattcagatgctggagtgggcactggatgtcaccaaaggggcgactggcgacctgctggaattgtactgcggcaacggtaacttctcgctggcgctggcacgtaatttcgatcgcgtattggccaccgaaatcgccaaaccgtcggtggcggcggcgcagtacaacatcgccgctaaccatatcgacaacgtgcagattatccgcatggcggcggaagagtttactcaggcgatgaacggggtgcggcagttcaaccggctgcagggtatcgatctgcatagctatcagtgcgaaaccatcttcgtcgatccaccgcgcagcgggctggacagcgagacggaaaaaatggtgcaggcctatccgcgtattttgtacatttcgtgcaacccggaaacgctgtgtcgcaatctggaaacgctaagccagacgcacaacgttacccggctggcgctgttcgaccagttcccgtatacccatcacatggagtgcggcgtcctgctgacccgcaaatag

SEQ ID NO: 135411 - DNA, 360 bp, Enterobacter cloacae
atgaaacactcagttcaagataaaggtacgctgctgctggcgctgattgccgggttatccattaatggcgcctttgcggcgctgttcagttcgatagttccgttttccgtcttccccattttatccctgctgctgacggtctactgtctgcatcagcgctatcagaatcgcagtatgcccgttgggctaccgggcctggccgccgccttttttattctcggggtgctgttgtacagcaccgtcgtgcgtgcggagtacccggatatcggttctaacttcttcccggccgttctgtccgtcgcgatggtcttctggatcggctacaagatgcgtaaccgcaaagataccgcagccgagtaa

SEQ ID NO: 135412 - DNA, 636 bp, Enterobacter cloacae
gtgatgggcgtaagagcacaacaaaaagaaaaaacccgccgttcgctggtggaagcggcattcagccaacttagcgctgagcggagtttcgccagcctgagcttgcgtgaagtggcccgggaagcagggatcgcgccgacgtccttttatcgtcattttcgcgacgtcgatgagctgggcctgacgatggtcgatgagagcggactgatgctgcgccagctgatgcgccaggcgcgccagcggatagccaaaggcggcagcgtgatccgcacctcggtctccacctttatggaatttatcggtaacaacccgaacgccttccgcctgctgctgcgcgagcgctcgggaacttctgcggcgtttcgcgccgccgtcgcacgcgagatccagcactttattgcggaactcgccgactatttagaactcgaaaaccatatgccgcgcgcctttaccgaagcgcaggctgaagctatggtcaccatcgtttttagcgctggcgcggaagcgctggatgtcggccctgagcagcgccggcagctggaggaacggttggtactgcagcttcgaatgatctcgaaaggcgcgtattactggtatcgccgtgaacaagaaaaaatgtcacatcattccgaataa

SEQ ID NO: 135413 - DNA, 1401 bp, Enterobacter cloacae
atgtcacactcttgggattatgatgcaatagtgattggttccggtcctggcggggaaggcgccgccatgggactggtgaaacagggagcacgcgttgccgtcatcgagcgctaccataatgtcggcggcggttgcacccactggggcaccatcccgtcgaaagccctccgccatgccgtcagccgtattatcgagtttaaccaaaaccccctctacagcgaccactcccgccttcttcgctcttctttcgccgacatccttaaccatgccgacagcgtcatcaaccagcagactcatatgcgccagggattctatgagcgcaaccactgtgaaattctgcagggcaatgcccacttcgtggatgagcatactctggcgctggagtgccatgacggcacggtcgagactgtgaccgcggagaaattcgttatcgcctgcggatcgcgcccctaccatccggcggatgtcgatttccaccacccgcgcatctatgacagcgattcgattctcagcctgcagcatgagccgcgccatgtgatcatttacggcgccggggtgatcggttgtgaatatgcgtcgatcttccgcggcatggaggtgaaggtcgatctgatcaacacccgcgatcgtctgctggccttcctcgatcaggagatgtcagactcgctctcttatcacttctggaacagcggcgtggttattcgccacaacgaggagtatgagaaaattgaaggggtggatgacggggtgatcatgcacctgaagtccggcaaaaagctgaaggccgattgcctgctgtacgctaacggccgcaccggcaacaccgacaccctggcgctggaaaatatcggtctgcagaccgacagccgcggtcagctgaaggtcaacagcatgtatcagaccgccctcccgcacatctatgcggttggcgatgtcatcggctatccaagcctggcttctgccgcttacgatcagggacgcattgccgcccaggcgctggtgaaaggcgaagcctcagcgcatctgattgaagatatcccgaccgggatctataccattccggaaatcagctccgtcgggaaaaccgagcagcagctgacggcgatgaaagtgccgtatgaggtgggccgcgcccagtttaaacacctggcgcgggcgcaaatcgtcggtatgagcgttggtacgctgaagatcctgttccatcgtgaaaccaaggagatccttggcattcactgctttggcgagcgcgcggccgaaattattcatatcggccaggcgatcatggagcagaaaggcggtggcaacaccattgagtacttcgtcaacaccacctttaactacccgaccatggcggaagcgtaccgggttgccgcgctgaacggcttaaaccgcctgttttaa

SEQ ID NO: 135414 - DNA, 918 bp, Enterobacter cloacae
atgaatattcgcgatcttgaatacctggtagcgctcgccgaacaccgccacttccggcgggcggctgactcatgccatgtgagccaaccgacgctcagcggacagatccgcaagctggaggatgagcttggcgtcatgctgctggagcgcaccagccgtaaggttctgtttacccaggcggggctgttgctggtggatcaggcgcgtaccgtgttacgcgaagtaaaagtgctcaaggaaatggcaagccaacaaggggaaaccatgtccgggccgctgcatatcggcctgatcccgacaattggcccgtacctgctgccgcacatcattccgatgctgcatcagaccttcccgaagctggaaatgtatctgcacgaagcgcagacccatcagctgctggctcagctcgacagcggtaagctcgactgcgccatcctggcgctggtcaaagagagcgaggcctttatcgaggtgccgctgttcgatgagccgatgatgttggctatctatgaagatcatccgtgggcgaaccgcgatcgggtgccgatgtcggatctggccggtgaaaagctgctgatgctggaggatggccactgcctgcgcgatcaggcgatgggcttctgctttgaagcgggggcggatgaggatacccacttccgcgcgaccagcctggaaacgctgcgcaatatggtggcggcaggcagcggcattaccctgctgccggcgctggcggtgccgcaggagagaaaacgcgatggcgtagtctacctgccgtgcattaagccagagccaagacgcaccatcggtctggtttatcgtccaggctccccgctgcgcagccgctatgaacatctggcggaggccatccgcggcacgatggatggccatttcgacaaggcgttaaaacaggcggtttaa

SEQ ID NO: 135415 - DNA, 1374 bp, Enterobacter cloacae
atggcactttggggcgggcgttttacacaggcagcagatcaacggttcaaacagttcaacgactcgttgcgcttcgactatcgtctggcggagcaggatatcgttggctctgtcgcctggtcgaaagcgctggtaacggtcggcgttctgagtgccgctgaacagcagcagctggaagaagcgctgaacgtgctgctggaagaggtgcgcgccaatccgcagcaaatcctcgccagcgatgccgaagatattcacagctgggtggaaggcaagctgatcgataaagtgggccagctgggcaagaaactgcacaccgggcgcagccgtaacgaccaggtcgccaccgatcttaaactgtggtgcaaagataccgttgtcgaactgctctcggcgaaccgccagctgcagagcgcgctggtggagaccgcccagcagaatcaggacgcggtaatgccggggtacacccacctgcagcgcgcccagccggtgacgttcgcgcactggtgtctggcctacgttgaaatgctggcgcgtgacgaaagccgtctgcaggacgcgctgaagcgcctcgacgtcagcccgctgggctgcggcgcgctggcggggacggcgtatgagatcgaccgcgagcagctggccggctggctgggctttgcctccgccacccgcaacagcctcgacagcgtgtccgatcgcgatcatgtgctggagctgctttccgatgcggctatcggtatggtgcatctgtcgcgctttgcggaagatctgattttctttaactccggcgaggcgaacttcgtcgagctttccgaccgcgtgacctccggctcctcgctgatgccgcagaagaaaaacccggacgccctggagcttatccgtggcaaatgcggccgcgtgcagggtgcgctgaccggcatgatgatgacgctgaaaggactgccgctggcctacaacaaagacatgcaggaagataaagaggggcttttcgacgccctggatacctggctcgactgcctgcatatggcggccctggtgctggacggcattcaggtaaaacgcccgcgctgtgcggaagcggcgcagcagggctatgccaacgccactgagctggcggattatctggtggcgaaaggcgtaccgttccgcgaggcgcaccatattgtcggtgaagcggtagtggaagccattgcgcaagggaaaccgctggaagcgctgaccctggccgatctgcagaaattcagcccggtgattgcggacgatgtgtatccgatcctgtcgctgcagtcctgcctcgagaaacgcgcagcgaaaggcggcgtctcgccgcagcaggtagcccaggctatcaacgaggcgaaggctcgtttaagctaa

SEQ ID NO: 135416 - DNA, 774 bp, Enterobacter cloacae
atgaacccattaattatcaaacttggcggcgtattactcgatagcgaagaagcgctggagcgcctgtttaccgcgctggttaactaccgtgaagcgcaccagcgtccgctgattatcgtccacggcggcggctgcgtggtggatgagctgatgaagcagctcaacctgccggtgcagaagaaaaatggcctgcgcgttacgccggctgagcaaatcgacatcatcaccggcgcgctggcgggaaccgccaacaagacgctgctggcgtgggcgaaaaaacatggtatttcctcggtaggcctgttcctcggcgatggcgatagcgtgaaggtcacgcaactggatgctgagctgggccatgtcgggctggcgcagccgggctccccggcactgatcaacaccctgttggccggcggttacctgccggtggtgagctctatcggggtgaccgatgaaggccagctgatgaacgtcaacgctgaccaggcggcgacagcgctggcggccaccctgggggcggatctgatcctgttgtctgacgttagcggtatcctcgacggtaaagggcagcgcattgccgagatgaccgccgagaaagcggaacagctgatcgagcaggggattatcaccgacggcatgattgttaaagtgaatgcggcccttgacgccgcacgtgctctgggccgtccggtggatatcgcctcctggcgtcacgccgagcagctgccggcgttatttaacggcacgccgatcggcacacgtattctggcttaa

SEQ ID NO: 135417 - DNA, 1005 bp, Enterobacter cloacae
atgttaaatacgctgattgtgggtgccagtggttatgccggcgcagagctggtgacctatatcaatcgtcatccgcatatgaacataaccgctttgacggtctccgcgcaaagcaatgatgcgggaaaattaatttccgacctgcatccgcagctcaaaggcattgtcgatatgccgctgcagccgatgtccgatatcagcgaattcagcgctggcgtggacgtggtgtttctcgccaccgcgcacgaagtgagtcacgatctggcgccgcagtttcttgccgctggctgcgtggtgttcgatctctccggtgccttccgcgttaacgatggggcgttctacgaaaaatattacggtttcactcatcagcatcccgacctgctcaaacaggcggtgtatggtctggcggagtggagcgcggatgcgcttaaagacgcgcagttaatcgcagtgccaggctgctatccgacggcggcgcagctgtcgctgaagccgctgattgaggccaatctgctggatctcaaccagtggccggtaatcaacgctaccagcggggtgagcggcgcgggtcgtaaggccgcgatcggcaacagcttctgtgaagttagcctgcagccgtacggcatatttaaccatcgccatcagccggagattgccagccacctcggggcaaaggtaatttttaccccgcacctgggtaattttaagcgcggcatcctggaaaccattacctgccgcctgaagccgggcgtcggccatgcgcagatcgcggcggtttaccagcaggcttacgccgataaaccactggtacgtttatatgataaaggcgtgcccgctttgaaaagcgtcgaaggcctgccattctgtgatatcggttttgccgtgcaggacgatcatctcatcgtcgtcgcggcagaggataacctgctgaaaggcgccgcagcgcaggcggtgcagtgcgcgaatattcgtttcggcttcgctgagacgcagtctcttatttaa

SEQ ID NO: 135418 - DNA, 1152 bp, Enterobacter cloacae
atgaaaaacaatttaccgccctttatcgagatttaccgcgcgttgatcgccacaccgtccatcagcgcgaccgaagaggctctcgatcaaagcaatgagtctttaatcaatttgctggcaggctggttccgcgatctcggcttcaatgttgagatacagccggtgccggatacgcgccataaattcaacctgctggccagcaccggacacggcgccggcggcctgctgctcgccgggcataccgataccgtgccgttcgatgatggccgctggacgcgcgacccgttcaccctcaccgaacacgataacaagctctacggcctcggcacggccgatatgaaaggcttcttcgcctttattctcgacgccctgcgcgatgtcgacgtcaccacgttgaaaaagccgctgtatattctggccaccgccgacgaagagaccagcatggccggcgcgcgctactttgccgaaaccacccggctgcgcccggactgcgccatcatcggcgagcccacctccctgcagccgatccgcgcccacaaaggccatatgtccaacgcgatccgtattcagggccagtccggccactccagcgatccggcgcgcggggtcaacgcgattgagctgatgcacgacgccatcggccggattatgcagttgcgcgatctgctaaaagagcgctatcacttcgaggcgtttacggtcccttacccaaccctcaacctgggcgctatccatggcggcgatgcctcaaaccgtatctgcgcctgctgtgaactgcatatggatatccgcccgctgccggggatgaccctaaacgatcttaatggtctgttgggcgaggcgctggccccggtcagcgaacgctggccgggccgcctgacggtctctgagctgcatccgccgatccccggctacgagtgcccgccggaccataagctggtgcaggtggtcgagaaactgcttggcgcgcagaccgacgtggtgaattactgcaccgaagcgccgtttatccagacgctgtgtccgacgctggttctcggcccgggctccatcaatcaggcccatcagcctgacgagtatctggagacgcgctttatcaagccgacccgggagctgattagccaggtggttcatcacttctgctggcactaa

SEQ ID NO: 135419 - DNA, 2652 bp, Enterobacter cloacae
atgaacgaacaatattccgcattgcgtagtaatgtcagtatgctcggcaaggtgctgggcgataccatcaaggatgcattgggagaaaatattcttgatcgtgtcgaaactatccgtaagttgtccaaatcttcacgcgccggcaacgaagctaaccgccaggagctgctgaccacgctgcagaatttgtcaaacgacgaactgctgccggtggcccgtgccttcagccagtttctgaatctggccaacaccgctgagcagtaccacagcatttcggccaatggcgaagcggccagcaatccggaagtcattgcgcgtaccctgagaaagctcaaagaccaacccaatctcaacgaagagaccatcaaacaagcggtggaatcgctgtctctggagctggtgttaaccgcccacccgaccgagatcacccgccggacgctgatccataaaatggtggaagtgaacaactgccttaagcagttggacaacaaagatatcgctgactacgagcaccatcagctaatgcgccgtctgcgccagcttatcgcccagtcgtggcataccgatgaaattcgtaagcaccgcccttccccggtcgatgaagccaaatggggcttcgcggtggtggaaaacagcctgtgggaaggggtgcctaactatctgcgcgagctgaacgaacagctggaagccaaccttggctatcagctgccggtggacttcgtcccggtgcgtttcacctcgtggatgggcggcgaccgcgacggcaacccgaacgtgactgccgacatcacccgccacgtgctgctgctcagccgctggaaagcgaccgacctgttcctcaaagacgtgcaggtgctgatctccgagctgtcgatggtggagtgtaccgacgagctgcgcgccctggctggcgccgagggcgctcaggaaccgtaccgttatctgatgaaaaaactgcgctctcagctgatggagacccaggcctggctggaagcgcgcctgaaaggccagaagctgccgaaaccggcgggactgatcactcagaacgagcagctgtgggagccgctgtacgcctgctataaatcgctgcaggcctgcggcatgggcattatcgccaacggcgagctgctcgacaccctgcgccgcgtgaagtctttcggcgtaccgctggtgcgtattgatattcgtcaggaaagcacccgccataccgaagcgctgggtgaaatgacccgttacctcgggatcggcgactacgaaagctggtcggaagccgacaaacaggctttcctgatccgcgaactgaattccaaacgtccgctgctgccgcgccagtgggagccaagcgaagagacgcgtgaagttctcgacacctgcaaggtgatcgccgaggcgccgcgcggatcgatcgccgcctacgtgatctcgatggcgaaaacgccgtccgatgtgctggcggttcatctcctgctgaaagaagccgggattggctttgctctgccggtggccccgctgttcgaaacgctggatgacctcaacaacgccaacgacgtcatgacccagctgctgaatatcgactggtaccgcggctttatccagggcaagcagatggtcatgatcggctactctgactccgctaaagatgccggcgtgatggccgcctcctgggcgcagtaccaggcgcaggacgcgctgatcaaaacctgcgaaaaagccggtattgaactgacgctgttccacggtcgcggcggctctatcggccgcggcggcgcgccggctcacgccgcgctgctctcgcagccgccgggaagcctgaaaggcggcctgcgcgttaccgagcagggcgagatgatccgctttaagtacggcctgccggaagtcaccatcagcagcctgtcgctgtataccagcgccattctggaagccaacctgctgccgccgccggagccgaaagcagaatggcgcgacatcatggccgagctgtccgacgtgtcgtgcaagatgtatcgcggctacgtgcgtgaaaacaaagatttcgtcccttacttccgctctgcgaccccggagcaggagctgggcaaactgccgctgggttcgcgtccggcaaaacgtcgtccaaccggcggcgtcgagtcgctgcgcgccattccgtggatcttcgcctggacccagaaccgcctaatgctgccagcctggctgggcgctggcgctgcgctgcagaaagtggtcgaaggtggaaaacagagtgaactggaagccatgtgtcgcgactggccgttcttctctacccgcctcggcatgctggagatggtttactcgaaggccgacctgtggctggcggagtactacgatcagcgcctggtgaagccggagctgtgggcgctgggttccgagctgcgcaagctgctggctgccgatatcaacgtcgtgctggccatcgccaacgactcccatctgatggccgacctgccgtggatcgccgagtctatccagctgcgtaatatctataccgacccgctgaacgtcctgcaggcggaactgctgcaccgttcacgccaggctgaagaagagggcaaggacccggatccgcgcgttgaacaagcgctgatggtcaccatcgccggcgtcgccgccggtatgcgtaacaccggttaa

SEQ ID NO: 135420 - DNA, 651 bp, Enterobacter cloacae
atgaccagaaagatccccctgctggccttaggattcggcatggctttagccagcgcccaggcgttcgcccacggcaaccatagccatggcccggcgttaaccgaagtggagcgtcaggccagcgaaggcatttttgcggataaagatgtgcaggaccgcgcgctgagcgactgggaaggcgtctggcagtcggtgaacccgtatctgctcaacggcgatctcgatccggtgctggagcagaaggcgaaaaagcccggcggcaagagcgtggaggagtatcgcgcctattataagaagggctacgccaccgatgtggagcagattggcattgaagatgacgtgattgagttccacgttggccagaccgtcaatagctgcaaataccgctattcaggctataaaattctgcattacgcctccggtaagaagggcgtgcgttatctgttcgagtgccagcagggcgatgccaacgcgccgaaatttgtgcaattcagcgaccatatcattggcccgcgtaaatcacagcatttccatattttcatgggcaatgaatcacaggaggcgttgctgaaagagatggataactggccgacctattatccgtatgcgctgcataaagaacagatcgttgatgagatgctgcaccactag

SEQ ID NO: 135421 - DNA, 987 bp, Enterobacter cloacae
atggcgacaaattgttacgatataacatatcttatctgggaggcaagagcgacaggcaagcgcttttaccgctggaataatgtccggtatgatgaaaagggtgatgcgctgaacggaagaatgatggacaacgatatcaatcagcttattgatgcattgctaaaaaagcagaccagcctcggccgggtttatttcgccggcgagacgcgctcgcctgctgagccggtggtgcaggtggattttccccgtctgaatatcctcctcgatgggaagttgcgcgaccaggcgctcggcgataacgcccctcccctcgaagccaacgacgtgctctatattcctggcgatagctggaactgcccgcagtggcaagcgccttgcctgctgttaagcatcctgttcgctaagcagcagctggagtgctcgctgcagcactggaatggcaaggcgataactgttgtcgacaagcggcaggcgctgcgccgcgggccgcgcgtcggatcatttctgctgcaggcgctcaatgaactccggatgcaaccgcaggagcagcaaaccgcccgcagcatcgtcgtcagcctgctcagccactgccatgatcttctcggcagccaggcgcaaacctcctcgcgcagccaggcgttgtttgaagcgatccgccaatatatggacatccattatgcggaaccgctgagccgggaatcggtggcccaggcgttctacctctctcccaactatctttcccatctgttccagaaatgtgggccaatgggcttcaatgaatatctaaaccatattcgtctcgaacaggcccgtatgctgctgaagggccacgatatgaaagtgaaagacatcgcccacgcctgcggcttcgccgacagcaactacttctgccgcctgttccgcaaaactacggaacgctcgccgtctgaataccgccgccagtaccatagccagctgacggaaaaagcatccccggtaaaaaactag

SEQ ID NO: 135422 - DNA, 663 bp, Enterobacter cloacae
atggaactctatctggataccgccaacgtcgccgaagtggaacgcctggcccgcatctacccgctggccggggtaaccaccaacccgagcattatcgccgccggtaaagtcccggtctgggatgtgctgccgcgcctgcaaaaagccgtcggtccggagggcaccctcttcgcgcagaccatgagccgcgacgcgcagggcatggtggaagaggccaaacgtctgagcaatgccgtgccgggcattgtggtcaaaatcccggtcaccgccgaagggctcgccgctatcaaactgctgaagaaagaaggcatcccgacccttggcaccgccgtctacagcgcttcgcaaggcctgctggccgcgctggccggcgcaaagtacgtcgcgccttacgttaaccgcgtcgacgcccagggcggggacggcatccgcatggtgcaggagctgcaatccctgctggaaatgcatgcgcccgagagcaaagttctggcggcaagcttcaaaacgccacgccaggcgctggattgtctgctggctggctgcgaagcaatcacccttccactagatgtagcgcaacaaatgctcggcacccctgcggtagagtcagccatagagaagtttgaacaggactggaataacgcctttggcacgctgaatctgtaa

SEQ ID NO: 135423 - DNA, 540 bp, Enterobacter cloacae
atggatcgcattattcaatcaccaggcaaatatatccagggcgcaggcgccatcaagcgcctcggcgactatctgaaaccgctggccgagcgctggctggtagtcggtgataagttcgtcctggggtttgcggaagagatgctgcgtaaaagcctggccgacgctggcctggcggccgaaatcgcgccgtttggcggtgagtgttcgcataatgaaatcaaccgcctacgcgatatcgccggcaacgcgaactgcaccgccgtgctggggatcggcggtggcaaaaccctggataccgcgaaagcgctggcccactttatgaatgtgccggtggcgatcgcccccaccatcgcctccaccgatgcgccgtgcagcgcgctgtcggtgatatacaccgacgaaggggaattcgacagctacctgatgctgccgcgcaaccccaacatggtcattgtcgatacgcagatcgttgccggcgcgccggcaacgatctgcgtatcgacaatgaccatgttggggttgcgcggcagcatcaggtag

SEQ ID NO: 135424 - DNA, 540 bp, Enterobacter cloacae; identical to SEQ ID NO: 135423

SEQ ID NO: 135425 - DNA, 663 bp, Enterobacter cloacae; identical to SEQ ID NO: 135422

SEQ ID NO: 135426 - DNA, 987 bp, Enterobacter cloacae; identical to SEQ ID NO: 135421

SEQ ID NO: 135427 - DNA, 651 bp, Enterobacter cloacae; identical to SEQ ID NO: 135420

SEQ ID NO: 135428 - DNA, 2652 bp, Enterobacter cloacae; identical to SEQ ID NO: 135419

SEQ ID NO: 135429 - DNA, 1152 bp, Enterobacter cloacae; identical to SEQ ID NO: 135418

SEQ ID NO: 135430 - DNA, 1005 bp, Enterobacter cloacae; identical to SEQ ID NO: 135417

SEQ ID NO: 135431 - DNA, 774 bp, Enterobacter cloacae; identical to SEQ ID NO: 135416

SEQ ID NO: 135432 - DNA, 1374 bp, Enterobacter cloacae; identical to SEQ ID NO: 135415

SEQ ID NO: 135433 - DNA, 918 bp, Enterobacter cloacae; identical to SEQ ID NO: 135414

SEQ ID NO: 135434 - DNA, 1401 bp, Enterobacter cloacae; identical to SEQ ID NO: 135413

SEQ ID NO: 135435 - DNA, 636 bp, Enterobacter cloacae; identical to SEQ ID NO: 135412

SEQ ID NO: 135436 - DNA, 360 bp, Enterobacter cloacae; identical to SEQ ID NO: 135411

SEQ ID NO: 135437 - DNA, 1101 bp, Enterobacter cloacae; identical to SEQ ID NO: 135410

SEQ ID NO: 135438 - DNA, 1839 bp, Enterobacter cloacae; identical to SEQ ID NO: 135409

SEQ ID NO: 135439 - DNA, 852 bp, Enterobacter cloacae; identical to SEQ ID NO: 135408

SEQ ID NO: 135440 - DNA, 804 bp, Enterobacter cloacae
atggcaatccctgcatttggtcttggcaccttccgtctgaaagatgatgttgttatcgcatccgtaaaaaccgcgctggagctgggctatcgtgctatcgacaccgcgcaaatctatgacaacgaagccgcggtgggtcaggctatcgccgaaagcggcgtgccgcgtgatgagctgttcatcactaccaaaatctggatcgagaacctgagcaaagacaaactcatcgccagcctgcaagaaagtctgcagaagctgcgcacggactatgttgacctgacgctcatccactggccgtcaccgaacgatgcggttgccgttgaagagtttatggcagccctgatggaagcgaagaagctgggtctgacccgtcagattggtatctccaacttcactattccactgatggagcgcgcgattgccgccgttggcgctgaaaacattgcgaccaaccagattgaactctcgccgtatctgcaaaaccgtaaagtcgtcgactgggcacgtgagcacggcatccacatcacctcttacatgacgctggcttatggtaaggcgctgaaagatgaagtgattgcccgtatcgcggcgaaacataatgcgactccggcgcaggttatcctggcatgggcgatgggcgaggggtacgcggtgatcccgtcctcgacgaagcgtgataacctggccagcaacctgaaggcgctggatctgcagttggatgatgaagatcgacaggcgatcgctgcgctggattgcaacgatcggctggtgagcccggaaggtctggcgccgcagtgggattaa

SEQ ID NO: 135441 - DNA, 906 bp, Enterobacter cloacae
atgagagccacatcagaggagatcgccatctttgtggcggtggtggaaagcgggagtttcagccgggcggccgagcagctcggacaggccaactccgccgtcagccgggcggtcaaaaagctggaatcaaagctaggcgtaagcctgctcaatcggaccacccgccagctcagcctgacagaagaaggcgagcgctactttcgccggatgcaggtggtcttgcaggaaatggcggcggcagagaacgatctgctggagacgcgcacgacgccgcggggcctgctgcgggtagatgccgcgacgccggtgatgctgcattttctcatgccgctggtgaagccatttcgcgagcgctacccggaaatgacgctgtcgctcgtctcgtctgagacgtttatcaatctgattgaacggaaagtggatgtggccattcgggccgggaccttaacggattccagcctgcgcgcccgaccgctgtttaccagctatcgtaagatcgtcgcctcgcccgactatgtcgcgcgctacggtatgccgcagcatccatccgatctgaaacagcatcactgcctcggcttcaccgagccggtatcgctgaatacctggccggtctcctgttgcgatggccagctgttagagatcgaagcggcggtgtcatccaatagcggcgaaacgctcaagcagctgtgcctgaccggcaacggtattgcctgcctgtcggattacatggtggataaagagattgccagcggagagtttgtcgagctactggccgataagcgcttaccggtggaaatgcctttcagtgccgtctattacagcgaccgggcggtcagcactcgcatcagggcatttattgattttctgagcgaccacgtaaaacagctcccgaaggagctgtcgtaa

SEQ ID NO: 135442 - DNA, 1191 bp, Enterobacter cloacae
atgccactggcgctatttgccttaaccatcggtgccttcgcaattggcaccactgaatttgtgattgtcggcctggtcccgaccattgctcagcaactctctatctctctgccttcggcgggactgctggtctctatctacgcgctgggcgtggcgatcggcgccccggtactgacggcgttgaccgggcgtatgccgcgtaaacagctgctgctggcgctgatggtgctgtttacggcgggtaacatactggcctggcaggcccctggctatgaaacgctgatcctggcgcgactgctgaccggcctggcacacggcgtgttcttttctatcggctcgacaatcgccaccagcctggtggcaaaagagaaagcagcctcggccatcgccattatgttcggtggcctgacggtcgcgctggtgaccggcgttccctttggcacctttattggccagcatttcggctggcgggaaaccttcctctcggtatcgattctcggggtgattgcgctaatcagcagtctgcttctggtgccgaataatattccgggccgcgccagcgccagcctgcgcgatcagcttaaagtattaacccatccgcgcctgctgatgatctacgccattaccgcgctgggctatggcggcgtgtttaccgcttttaccttcctggcgccgatgatgcaggagctggccggcttcagcccgtcagcggtgagctggatcctgctgggctatggtgtctcggtggctataggtaacgtgtggggcggcaaactggccgataagcatggcgccgtctccgcgctgaagtttatcttcgctgcgctggttgtgctgctgctggtcttccagctgaccgccagcgttcactatgccgcgctggcgacagtgctggtgatgggcgttttcgccttcggcaacgtgccgggtctgcaggtctatgtggtgcaaaaagcagagcagtataccccgggggctgtcgacatcgcttccggcctgaatattgccgccttcaatataggtatcgcgctggggtcgatcgtcggcggacagacggtcgaacggtacggtctggcgcagacgccgtggattggcgcgatgattgtgctggtcgctttgctgttggtggtcctgagcggacgtttagataaattgccacgccgttcggcagcgctttctcccgaaggctaa

SEQ ID NO: 135443 - DNA, 807 bp, Enterobacter cloacae
atgcccaaattgcgaaagaacacctacgccatgcgctatgtcgccggacaacctgcggagagaatattgcctccgggggcgtttgcgggcgtgagtccggtttatcccgccggtacgccattaagcagcgatgagaagatccgcgtgctggtatggaatatcttcaagcagcagcgcgcagagtggcagtcggtcctcaaaaatttcggcaaagatgcgcatttggtcctgttgcaggaggcgcaaactaccccagaactggtccggttcgcgacttcaaactatctggccgccgatcaggtgccggcgctggtattgccgcagcatccttccggcgtaatgacgctggcctccgcgcaccccatctattgctgtccgctgcgcgagcgcgagcctattttgcgattgccgaaatcggcgttagtgaccgtttatccgctgccggatgcgcggttgttgatggtagtcaatatccatgccgtcaactttagccttggcgtcgacgtctacagcaaacagctgctgccaattggcgatcagatcgcccatcacagcgggccggtgatcatggccggcgacttcaatgcctggagccggccgcggatgaatgcgctgtaccgctttgcgcgtgagatgtcgttacgcgaagttcgtttctcagacgatcagcgccgccgcgcgtttggtcgtcccctcgattttgtgttctaccgtgggttaagcgtgcacgatgcttccgtgctggtgacccgcgcctccgaccacaacccgctactagtcgaattcagtcccggcaagcctgattaa

SEQ ID NO: 135444 - DNA, 771 bp, Enterobacter cloacae
atgacaacacgctctcaccatgacaacgtcgaaaagcagttcggctcccaggccagcgcctatctgaccagcgccgtacacgcctctggtcgcgatctgcagcggctggcggaacggctggctgattttcctcaggcgaaagtgctggatatgggctgcggggcagggcacgccagttttaccgcggcgggacaggttgccgaggtgaccgcctatgatttatcgagccagatgctggaggtcgttgccgccgcggcaaaggagaaaggttttagcaatatcgtgacccagcaggggtacgccgaaacgctgccgttcgctgatgtcagctttgatgtggtgattagccgctactccgctcaccactggcatgacgttggccaggcgctgcgtgaggtgaaacgtgttctcaagccgggcggggtgattatcgtgatggacgtgatgtcgccgggtcatccggtacgtgatgtctggctgcagacggtggaagccctgcgcgacacctcgcatgtgcgtaattattccagcggcgagtggttgacgctggcgactgaagcggggctggtggttaaccagttgttgaccgatcgcctgccgctggagttcagttcatgggtggcgcggatgcgtactcctgagccgctggtggaggcgattcgcttatatcagcagagcgcttcggcggaggtcaaagcgtacttcgagttacaggaggacggatcgtttaccagcgataccattctgttcgaagcgcataaagcggtttaa

SEQ ID NO: 135445 - DNA, 1368 bp, Enterobacter cloacae
atgaaggcacgagcgatattactcgcctctgtcctgctggtggggtgccaggcgtctaagcacgatggcaccgtcgaacagcgagcacagagcctttctgcggctggtcaaggggaagcaggcaagttcacaagtcaagcgcgctggttagatgatggaaccttctacgcgcaagaccaggatctgtggacttccataggcgacgagctaaagatgggaataccggataatccccggattcgcgaacagaaacagaagtacttaagaaataagagctatctccacgatgtaactttacgggcagagccgtatatgtactggatagccgggcaggttaagaaacgtaacatgccaatggaactggtattactacccatagtggagagcgcttttgacccacacgcgacgtctggcgccaatgccgcaggcatttggcagatcattccgagcacagggcgcaattatggtttaaaacagacccgcagttacgatgcgcgtcgtgatgtcgtcgcgtctactaccgcggcgctggacatgatgcaacgtctgaacaaaatgttcgacggcgactggttgttaacggtcgcagcctataacagcggcgaaggccgggtcatgaaggcagtaaaagcgaaccgttcgcgtggcaaacccaccgatttctggtcgctgtctctgccgcatgaaacgaaaatctacgtcccgaaaatgctggcattgagcgacattctcaaaaacagcaaacgttacggcgtaaagctgcctacggctgatgaaagccgtgcgctggcgcgcgttcgcctcgacagtccggttgatatttctcagctcgcggacatggccggtatgccggtcagcaagctgaagacgttcaatgcgggcgtaaaagggtcaacgctgggcgcgagcgggccaaagtacgtcatggtgccgcagaagcacgccgcacagctgcgtgaatcgctggcctctggcgacattgccgccgtgcagccgacgcagctcgcggacaatacgccgctgaccagccgtagctataaggtgcgttccggcgacaccatttccgggatagcttcccgtcttggtgtgacgacccgcgatctgcagcagtggaataacctgcgcggctctggattaaaggttgggcagaatctggttattggcgcaggcagcagcgcccagcgtctggcgaacaacagcgatagcatcacctatcgcgttcgtaaaggcgattcgctgtcgagcatcgccaaacgtcacggcgttaatatacgtgacgtgatgcgctggaacagcgataccgacaacctgcgcccaggcgatcagctaacgttgtttgtgaaaaacagcgatcgaccagagtcctga

SEQ ID NO: 135446 - DNA, 756 bp, Enterobacter cloacae
atgaatcttatcagtattcccgcgtttcaggacaactacatctgggttctcagtgagaataacggccgctgcatcatcgtagatccaggcgaagccgcgccggttctggcggccatcgaggaaaaccagtggcagcccgaggctattttactgacccatcatcatcaggatcacgtcagcggcgtaaaacaattacgtgagaaattcccttctatagtggtttacgggccggcggaaacccaggataaaggcgtcactcaggtggtaggcgatggcgatcggctgtcaattctcgggcacgatttttccattttctctacgccaggtcacacattaggacatatctgttactacagcgaaccttatctgttctgtggcgatacgatgttttccggcggctgcggaaggctgttcgaaggtacagcagagcagatgtatcaatcatttatgaaaattaatgcccttcctgaagaaaccctcatatgttgcgcacatgaatatacgttagcgaatacgaagtttgcattgagtatcctgccagatgatagggacataaacgattactatcataaagttaatgagttacgtgcaaaaaaacaaaaaacactacccgtaactctgaaaaatgagcggcgtataaatgtatttttacgcgtaaatgatattgatttaattgataaaattaacaaagaaacaaatttgcaacactctgtggcgcgatttgcatggttaaggtcaaagaaagatgacttctga

SEQ ID NO: 135447 - DNA, 723 bp, Enterobacter cloacae
atgaagccggcaaggatacctcacacagtgacagcgcctgagcattggtccagtatgccgtggggcgaatactatcgcgaaacgctggagcagcagatgaaaccgtggctggctaaattatatggctttcatctgcttaagattggcaatctgagcgcggaaatcaataccgaagcttgcgccatctcgcaccaggtgaatgtctcgctggcgggaaatccaatgcaggtccgggctgacccgctgcatttaccctttgccgaaaagtccgttgacgcctgcctgctggcgcacaccctgccgtggtgtagcgatccgcatcgtctgctgcgggaagccgatcgtgtactgatcgatgatggctggatgatcctgaccgggtttaatccggtcagcctgatggggttgcgtaagctggtgccggtcctgcgcaaaggaacgccttataatagccgtatgtttacgctgatgcgccagctggactggctggcgctgctcaactttgaagtgctgcactatggacgttaccaggttttgccctggtcgcgccatggcggcaaattgttgagcacccatctgccggcgctgggctgtttgcaattgattgtcgcccgcaaacggaccattccgctgacgctcaatccgatgaaatccggcaaagcgaaaactcagctgcggccggcggtgggcgccacccggcagtggcgcaaagggcagaattaa

SEQ ID NO: 135448 - DNA, 468 bp, Enterobacter cloacae
atgctcaaacaggtagaaattttcaccgacggctcttgcctgggtaatccaggacctggcggctacggcgccatcatgcgctaccgccagcacgaaaaaaccttcagcgctggctaccgtctgaccaccaataaccgcatggaactgatggcggcaattgttgccctggaagcgttaaaagagcattgcgaagtggtgctcagcactgacagccagtatgttcgtcaggggatcacccagtggatccacaactggaaaaagcgcggctggaaaacggcagagaaaaagccggtgaaaaatgtcgacctctggcagcggctggacgccgcgcttggccagcataaaattaaatgggaatgggtaaagggccacgccggccatcctgaaaatgaacgctgcgacgagctggcgcgcgcggcggcctcccaccccacactggacgatgtcggctacctgcctgagagttaa

SEQ ID NO: 135449 - DNA, 741 bp, Enterobacter cloacae
atgaccgctatgagcactgcaattacgcgccagattgttctcgataccgaaaccaccggtatgaaccagatcggggcacactacgaaggacacaagatcattgagatcggcgccgtggaggtgatcaaccgccgcctgaccggtaacaattttcacgtctatctgaagcccgatcggctggtggatcctgaagcattcggcgtacacgggatcgctgatgagttcctgctggataaacctacctttgccgacgtggctgatgagtttatggattacatccgcggcgcggagctggtgatccataacgcctcgttcgatatcggctttatggattatgaattcagtaagctaaaccgcggcatcggaaaaaccgagaccttttgtaaaatcaccgacagtttggcgctggcgcggaaaatgtttcctggcaagcgcaacagcctcgatgcgctatgttcgcgttacgaaatagacaacagcaagcgtacgctgcacggggcgttgctcgatgcccagatccttgccgatgtctatttgatgatgaccggcggccagacttcgatggcgttctctatggaaggcgaaagccagcagcaggcgggagagatgggaattcagcgcgtcgtccgcgccggcagtcagttacgcgtggtttatgcctcagatgaagaactggcgaaccatgaatcccgcctcgacctggtacaaaagaaaggcggaagctgcctgtggcgtgcctga

SEQ ID NO: 135450 - DNA, 882 bp, Enterobacter cloacae
atggatctgcgacgcttcatcaccttcaaaactgttgtcgaagaaggttcctttctgcgcgcggcgcagaaactatgctgcactcagtccaccgtgacttttcatatccagcagctggagcaggagcttgccattccgctgtttgagaaaatcggccggcggatgtgtctcaccgccgccggtaagaaggtcctgccgcatgtctacgacctgactaaagtgatggcctcgattcgtcaggcggcacgccaggacgatgagcccggcggcgaacttcgcgtcgccactggcgaaacgctgctggcgtataaaatgccgcgggtgctgcagcgttttaagcaacgcgctccgaaagtgcgcctgtcgctgcagtcgctcaactgctacagcatccgcgatgcgttgcttgccgacgaggtcgatttgggggtgttttaccgggtgggtaacgatgacgcgctcacgataatggagcttggccagcagtcgctgacgctggtcgcatcggtcgagcaggcgccggtagacttcatgcgcccgcggcagcatatcccgctgagctttatcatcaacgaaccccagtgcgtgttccggcagatttttgaaagcaccctgcgccagcgcgaaattactctggagaacaccattgagctgtggagtattgagagtatcaagcagtgcgtggcgggaaatctgggagtgagttttctgccacgctttgcggtggaggacgagctcaagcgcgggacgctggttgagctgccattcagcgagacgccgttgacgatccatgcgctctgcgcccaccatgccgggaaggctatcagtccggcgatgcgggtatttatgcagtgcatgcaggaggaacaagaggcgcgctga

SEQ ID NO: 135451 - DNA, 591 bp, Enterobacter cloacae
gtgacacctaccctgattagcgcctttttaacttacactttgatcaccgccctgacacccgggcccaacaatatcctggcgctgagcagcgtcacctcccatggtctacgccgcagcctgcgggtgctggccgggatgagcgtcgggtttattatcactatgctgatttgcgcggctttaaccttttcgctggttgaactcgactcacgctttaccctggtattgggatggattggcgcggcgtacatcctgtggctggcctggcagattgccaaaagcaaaccggcgacagggatgccgagtgtagaaccggtaggcttttgggcgagtctggggctgcagttcgtcaacgttaaaattattctgtatggcatcaccgcgctctctacctttgttctgcccgttactcgcgagcctgtttggcttatcagcgtgagtctgctgctggcggcgattggcgcgctgggaaatctgtgctgggcgctggcggggcatctgtttcagcgcctgtttttgctgtacgggcggcaactgaactggatgctggcagcgttattggtctactgtgctgtgcggatcgtggtggaataa

SEQ ID NO: 135452 - DNA, 771 bp, Enterobacter cloacae
gtgcctggcctgaaaatttcgctgttgcaacaaccgctggtctggatggacggccctgccaacctgcgccattttgatcgccaactggaaggaatcaccgggcgcgatgtgattgttttaccagagatgtttaccaccggctttgccatggaagcggcaaaacagtctttacccgaggccgacgtggtggagtggatgcatgcccgggctgcgcaatcccaggcgctgattgccggcagcgctgcgctgcaaactgaacacggcgctgttaaccgcttcctgctggtcgagcctgacggtacggtgcaccattatgataaacggcacctgttccgtatggccgatgaacatcatcactatgaggccggaaaccagcgcgtggtctttgaatggcgtggatggcggatcctgccgctggtctgttacgacctgcgctttccggtatggtcgcgtaatcagaacgactatgatttggcgctgtatgtcgccaactggccggcgccgcgctcgctgcactggcagtcgctgctgatcgcccgcgcgattgaaaaccaggcctatgtcgccggctgtaaccgggttggcactgacggcaacggccatcattaccgcggcgatagtcggattatcaatccccagggggagattatcgccaccgccgatccgcatcaggccactcgtcttgatgccgagctgtcgctgagcgcccttcaggaatatcgtgaaaaattccccgcctggcgcgatgccgatcctttcacgatcggctaa

SEQ ID NO: 135453 - DNA, 2445 bp, Enterobacter cloacae
atgatgattttgagtattgttgcaaccgtcgttttactcggcgcgctcttctatcaccgggtcagcctgctgctcagcagcgtgattttgctcgcctggaccgcggcgctcggcgcggccggagtgtggaatatctggctgctgctgccgctggcgatcatactgttgccgtttaactttgcgcctatgcgtaaatccatgatttccgcaccggcgtttcgcacattccgcaaggtgatgccgccgatgtcgcgcacggaaaaagaagccatcgacgccggcaccacctggtgggaaggcgatctgtttcgcggcaatcctgactggcaaaagttacataactatccgcagccgcggctgactgccgaagagcaagctttcctcgacggcccagttgaagaagcctgccggatggctaacgacttcgccatcacccacgaaatggccgatctgccgccggagctgtgggcctatctgaaagagcaccgcttcttcgcgatgattattaagaaagagtatggcggacttgagttctccgcttacgctcaggcacgagtactgcagaaactctctggcgtctccggcatcctggcgatcaccgtcggcgtcccgaactcgctgggcccgggcgaactgctgcagcattacggtaccgaagaacagaagaatcattatctgccgcgtctggcacgcggcctggaaatcccttgcttcgctctcaccagcccggaagcgggctctgacgccggcgccatcccggataccggcgtggtgtgcatgggcgactggcagggtcaacaggtgctggggatgcgcctgacctggaacaaacgttatatcacgctggcgcctatcgccaccgtgctggggctggctttcaaactctctgacccggatcgtttgctgggcggagaagaagagctgggtatcacctgcgcgctgatccccacctccaccccgggcgtggaaatcggccgtcgccacttcccgctgaatgtgccgttccagaacggtccaacccgcggcaaagatatcttcgtgcctatcgattacatcatcggcggcccaagcatggccggtcagggctggcgcatgttggttgaatgtctatcggtcggccgcggtattactctgccgtccaacgccaccggtggtctgaaatccgttgccatggcgactggcgcttacgcccatattcgccgccagttcaaaatctccatcggcaaaatggaagggattgaagaggcgctggcgcgtatcgccggtaacgcctatgtgatggacgctgcggcgtcgctgatcacctacggcatcatgctcggcgagaaacctgcagtgctgtccgctatcgtgaaatatcactgcacccaccgcggccagcgctccattatcgacgcgatggatattaccggcgggaaaggcattatgctgggcgaaggcaacttcctcgcccgggcctatcagggcgcgcctatcgccatcaccgtggaaggcgcaaacattttgacccgcagcatgatgatcttcggtcagggggcgattcgctgccatccgtacgtactggaggagatggccgccgcgcagaataatgacctgaacgcctatgacaagctgctgttcaaacacatcggccatgtcggcagtaataaagtgcggagtttctggctgggcctgaccggcgggcgcaccagcagcgcgccgactcgtgacgccacccgtcgctactatcagcaaatgaatcgtctgagcgccaacctggcactgctgtcagacgtctcaatggcggtgctcggcggcagcctcaagcgacgcgaacgtatctccgcccgtctgggagatgtgttaagccagctgtacctggcctcggcggtgctgaaacgctatgacgatgaaggacgcaatgaagccgatctgccgctggttcactggggggtacaggacgcgctgcaccaggccgagcaagccattgacgatctgttggacaatttcccgaaccgtctggtggcaggcgtaatgcgcctggtcatcttcccgaccggccgtcatcatcatgcgccgtcggataggctggaccaccaggtcgccaaaattctgcaggtgcccagcgccacgcgctcccgcatcggtcgcggtcagtatctgacgccgagcgagcataacccggtaggcctgctggaagaggccctgctggaagtgatggcggccgatcctatccaccagcggatctgcaaagagttgggtaaaaatctgccgttcacccgtctggatgagctggcccacaacgcgctggccaaaggattaatcagtcaggatgaggccgccattcttacccgtgcagagcatagccgtctgcgcagcattaacgtcgacgactttgcgccagaggagctggcgacaaagccggtaaagctgccggaaaaagttcgtaaagttgaagctgcataa

SEQ ID NO: 135454 - DNA, 582 bp, Enterobacter cloacae
atgtaccaggatcttattcgtaacgaactgaacgaagccgcggaaacgctggctaactttctgcaggacgaagctaatatccatgctatccagcgtgccgctgtcctgctggcggatagctttaaggcgggtgggaaagtgctgtcctgcggtaacggcggttcccattgcgatgcgatgcattttgcggaagagctgaccggacgttatcgcgaaaaccgcccgggttacccggccatcgcgatctccgacgtcagccacctctcctgcgtgagcaatgattttggctatgagtatgtgttctcccgctacgttgaatccgttggccgcgcaggcgatgtgctgctcggtatctccacgtctggcaactccggcaacgtgattaaggccattgaggccgcgcgggcgcaggggatgaaagtgatcaccctgaccggtaaagacggcggtaaaatggccggtagcgctgatgttgaaattcgcgtgccgcactttggctacgccgaccgcatccaggagatccatatcaaagtgatccacattctgattatgctgatcgaaaaagagatggcgaaaggctaa

SEQ ID NO: 135455 - DNA, 768 bp, Enterobacter cloacae
atgtgcgaactgctcgggatgagcgccaatgtgccaaccgatatctgttttagctttaccgggctggtgcagcgcggcggcgggacggggccgcataaagacggctggggcattaccttctatgaaggtaaaggctgtcgcacattcaaggatccccagccgagctttcagtcgccgatcgcgaaactggttcaggattaccccattaagtcctgttccgtcgtcgcccatattcgtcaggccaaccgcgggagggtggccctggagaacacccatcccttcacccgcgaactgtgggggcgcaactggacctatgcgcacaatgggcagctaaaaggctataagtcgctgaaaaccggtaattttcatccggtaggtgaaaccgacagtgaaaaagcgttttgctggttgctgcaccgtttaaccgagcgctatccgcgcacgccgggcaatatgctgggcgttttcaagtatatcgccaccctcgcgggtgaactacgtgagaaaggggtgttcaacatgctgctgtcggacgggcgctacgtaatggcgttctgctcgaccaatctgcactggatcacccggcgagcgccgttcggcgtggcaaaactgctggaccaggatgtggagatcgactttcaacgcgagaccacacccaacgatgtggtcacggttatcgccacgcagccgctgacggccaatgaaacctggcataagatcatgccaggcgagtgggcgttattttgtctcggggagcgtgtagtttga

SEQ ID NO: 135456 - DNA, 741 bp, Enterobacter cloacae
atgcgcaaaatcgcattatttattgcgatgcttctgttgccgtgcgtgtcatttgccgggctgctcagcagcaacagcccgacaacgccggtaagcaaagaatataagcagcaattaatgggttcaccggtttacattgagatctttaaagaagagcgcatgctcgacctttacgtcaaaatgggtgaaacctaccagctcctcgacagctaccggatctgcaactactccggtggcctcggtccgaaacagcgccagggcgatttcaagagtccggaagggttctataacgtcacccgcagccagctcaaacccgacagccgcttctataaagcgattaacatcggcttcccgaacgcctacgatcgcgcccatggttatgaagggaaatacctgatgatccacggcgactgcgtctcagtcggctgctatgccatgaccgacagcggtatcgatgagatcttccagttcgtgaccggcgccttagtcttcggccagccaagcgtgcaggtgagtatctatccgttccgcatgaccaacgccaacatggaacgccacaaatactcctactacgcggatttctggaaacagctcaagcctggctatgactatttccagcagacccacaaaccgccggtcgtatcagtgaccgacggccgctatgtggtgagcaagccgctcagccacgaggttgtccagccgcagctggcctcaaactacacgctccccgagacaaaataa

SEQ ID NO: 135457 - DNA, 1344 bp, Enterobacter cloacae
atgattaaaatcacgaaagggctggatttgcccatagctggcatgccattacagcagatttctcccgcgccagcggtgaagcgcgtcgcgctactcggcgaagagtacgttggcatgcgtcccgcgatggcggttaaagaaggcgatcgggtcaaaaaaggtcagatcctgttcgaagataaaaagatccctggcgtctgctttaccgccccggcgagcgggatcgtcagcgcgatccaccgcggcgaacggcgcgtgttgcagtcggtggtgattgatatcgagggcaatgacgcggtggcgtttacccgttacgccgcggacgcgctggccgaactgccgcgcgacaccgtacagcagcagctgctggcgtcgggccaatggacggcgctgcgtacccgaccgttcagcaaaacgccgctcccggggagcacgcccgccgctatctttgttaacgccatggacaccaatccgctggcggcggagccgcagccgattattctggccgaacgtgccgccttcgacgccggtcttaccgtgctcacgcgcttgaccgacgggaaagtgcacgtctgccagcccagcggcggcaagctgggcggtcatcctctcggccaggtctgtttcaatcagttcagcgggccgcacccggcggggctgccgggaacgcatattcactttctggagccggtgagcctgaataagcaggtctggcacctcaattatcaggacgcgatcgccattggtaagcttttcctcgacggggagctctactgcgaacggataattgcgctcggcggcccgcaggtaacatctccgcggctggtcaaaacgacgctcggcgccagcctggaggatctgctggcaggtgagttgcaggagggggaaaacagggtcatttccggctcggtgcttagcggcgcccgcgcccatggccctcacgccttcctggggcgcttccatctgcaggtgagcgtggtcaaagaagggcgggaaaaagagctcttcggctgggtgatgccgggcaaagagaaattctcgattacccgcaccacgctgggccatttcttcaagcgcaagcgctttcatttttccaccgataccaacggcggcgagcgggcgatggtgccgatcggcaactacgagcgggtgatgcctctggatatcctgccgaccatactgctgcgcgatctgctggccggagacaccgacagcgctcaggcgctgggctgtctggagctggatgaagaagatctggcgctgtgcacctatgtttgccctggaaagtatgaatatggcccggcgctgcgcagcgtgttaacccggattgagcaggaaggataa

SEQ ID NO: 135458 - DNA, 1239 bp, Enterobacter cloacae
atgggcttaaagcacctgattgagaaacttgagccgcatttcacgcatggcggcaagctggaaaaatattacccgctgtatgaggcggcggcgaccatcttctacacgccgggccaggtaacccgcggcgcggcgcacgtgcgcgacgccatcgacctgaagcggatgatgatcctcgtgtggtttgccgtattcccggcgatgttctggggcatgtacaacgttgggctgcagaccattccggcgctgcacaagctatacggcgccgaacagctgcagcaggcgatcgccaacaactggcactacagcgtcgcccagtggttaggcgtcagcttcagtgccgacgccggctggctgagcatgatggccctgggcgcggtatttttcctgcctatctacctcaccgtctttatcgtcggcggcttctgggaggtgctgttcgcgattgtgcgcaagcatgagattaacgaaggttttttcgttacctctattctcttcgcgttgattgtgccgcccacgctgccgctgtggcaggcggcgctggggatctccttcggcgtggtgatcgccaaagagattttcggcggcaccgggcgcaacttcctcaacccggcgctggcggggcgcgcgttcctgttcttcgcctatccggcgcagatttccggcgatctcgtatggaccgcggcggacggtttctccggcgccacgccgctctcccagtgggccagcggcggcggtgaagcgctggtgaacgtggcgactggcgtgccggtgagctggatggacgccttcctcggcaatattcccggctcaattggcgaagtgtcaacgctgatgatcttcatcggcggggcgatcatcctctttggccgcgtcgcgtcctggcgcatcgtcgccggggtaatgatcggcatgatcgccaccgccaccctgtttaacgttatcggctccgacaccaacccgatgttcgctatgccatggtactggcatctggtgctcggcggtttcgccttcgggatgatgtttatggcgacggacccggtatccgcctcgtttaccgataaagggaaatggagttacggcgtgctgatcggcgtgatgtgcgtgctgatccgcgtggtgaacccggcttatccggaagggatgatgctggcgatcctcttcgccaacctcttcgcaccgctgttcgattatctggtggtgcaggccaatattaagcggaggaagtcgcgtggctga

SEQ ID NO: 135459 - DNA, 801 bp, Enterobacter cloacae
gtggctgagaagaaaagtaacgatagcatcggcaaaacgctgctggtggtgctggtgctttgtctggtctgctccatcgtggtggcgggctcggccgtggggctgaaatcccgccagcaggcgcagcgggcgttggataagcagcgcaatatcctggcagtgtcagggctgatgcaccccggtatggatgcggatgcggatgcggtagcggacaccttcgcggcgcgcattaccccgcgactggtgaatctggccaccggcgaactgctggagaaagacccgggtaaatttaatcaggctcaggcgctgaaggatccgcagcagagtatggccctggatgccagtcaggatccggctggtataaagcgacgcagtaatctggcggaaatttacctggtgcgcgacgcgcagcagaagattgagcaggtggtgctgcccatttatggcaacggcctgtggtcgatgatgtatgcctttgtggcgctggacgtcgatggccgcacggtaaaaggcattacttactacgatcagggcgaaacgccggggctgggcggcgaggtggaaaaccccaactggcgccagcagtttgtcggcaagcaggtgctggatgacaacggcatgccggcgctgaaggtggtgaaaggcggcgcgcgcgcaggcgatctccacgcggttgacggtttatccggcgccacgctgacgtccaatggcgtacagcatagctttgatttctggatgggcgaactgggctttggtccgttcctgaaaaaggttcgtgagggagagctgaataatggctga

SEQ ID NO: 135460 - DNA, 639 bp, Enterobacter cloacae
atggctgaacagagcgatatgaaagaggtgaagcgcgtgctggtggggccgctcatcgccaataaccccatcgccctgcaggtgctgggcgtctgctccgcactggcggtaaccaccaaactggaaaccgccttcgtgatgaccattgcggtgaccctggtgacggcgttctccagcatgtttatctcgatgatccgccaccatattcccaatagcgtgcgcatcatcgtgcagatggcgatcatcgcctcgctggtgatcgtggtggatcagctgctgcgggctttcgcctatgagacctccaaacagctgtcggtattcgtcgggcttatcatcaccaactgcatcgtgatgggccgcgccgaagcctacgccatgaagtcgccgccgctggcgagctttatggatggtattggcaacggtctcggctatggcgcgatcctaattatcgtcggcttcctgcgcgagcttatcggtagcggcaagctgttcggtatcacggtgctggaaacggtgcagaacggcggctggtatcagccgaacggcctgttcctgctggcgccgagcgcgttcttcattatcggtttgctgatctgggccctgcgtagctggaagcctgagcagcaggaaaaggagtaa

SEQ ID NO: 135461 - DNA, 597 bp, Enterobacter cloacae
atggctcattacatcagcctgtttgtccgcgcggtgttcgttgagaacatggcgctggccttcttcctcgggatgtgcacctttcttgcggtgtcgaaaaaggtctccaccgccttcggcctcggcgtcgcggtgacggtagtgctggggcttgccgtgccaatcaataacctggtctataacctggtgctgcgcgacggcgcgctggttgagggggtggatctcagctttcttaacttcatcacctttatcggagtgatcgccgcgctggtgcagatcctcgagatgatcctcgataagtattttccggcactgtacaacgcgctgggcatcttcctgccgctgattgcggttaactgtgcgattttcggcggcgtgtcgttcatggtgcagcgcgattacaacttcccggagtccatcgtctacggcttcggctccggcattggctggatgctggcgatcgtggcgatggcggggatccgcgaaaaaatgaagtacgccaacgtgcctgccggtttgcgcgggttagggatcacctttatcaccaccggactaatggcgctgggctttatgtccttctccggcgtgcagctataa

SEQ ID NO: 135462 - DNA, 1224 bp, Enterobacter cloacae
atggaaattattcttggcgtcgtgatgttcacgctgattgtgctggtgctgtcggggcttatcctggcagcgcgctcaaagctggtgaacgcgggcgacgtggttattgagatcaataacgaagcggataaacagatccgcacccctgcgggtgacaaactgctgaacacgctgtccagcaacgggatcttcgtctcctccgcctgcggcggcggcggctcctgcggccagtgtcgggtaactgttaaagagggcggcggggatatcctgccgaccgagctttcgcatattaccaagcgggatgccaaagccggttgccgtctggcctgtcaggtggcggtgaagcagaacatgaagattgaactgccggaagagattttcggcgtcaaaaaatgggagtgtgaagttatctctaacgataacaaagccactttcattaaagagctcaagctgcggatcccggagggggaggtggtgccgtttcgcgccgggggctatattcagattgaatgcccgccgcataaagtggcctatgcagattttgatgttcccgatgaataccgttcagactgggataagttcaacctgtttcgctatgtctctgaggtgaaagagccgaccctgcgcgcctactcaatggctaactatccggaagagaagggcatcattatgctcaatgtgcgcatcgcgacgccgccgccgaaggtcccggatgcgccgccggggatcatgtcatcctatatctggtcgctgaagccgggcgataaggtgacgatttccgggccgtttggcgagttctttgctaaagaaaccgacgccgagatggtgtttatcggcggcggcgccgggatggcgccgatgcgttcgcatattttcgaccagctcaagcgcctgcacagcacgcgcaaaatcagcttctggtacggcgcccgttcgctgcgcgaaatgttctacgatgaggagtttgaacagctggcgcgcgacaatccaaactttaccttccacgtcgcgctctccgatccgctgccggaagataactggaccgggcataccggctttatccataacgttctgtacgagaactatctacgcgatcacccggcgccggaagactgcgagttctacatgtgtgggccgccggtaatgaacgccgcggtaattaagatgctcaaagatctgggcgtcgaggacgagaatattctcctcgacgactttggaggctga

SEQ ID NO: 135463 - DNA, 216 bp, Enterobacter cloacae
atgctgacggtatttatcgcgacctttgtgatttttgcgctggtgatcttcggcatgtcgctgggctacctggtgaagcgcaagagcatccagggcagctgcggtgggatctccgcgctggggctggagaaagtctgcgattgtccggaaccgtgcgacgcgcgtaaaaagcgcctcgcccgcgaggcgcagcgtcagcagcggcgtattttgtaa

SEQ ID NO: 135464 - DNA, 861 bp, Enterobacter cloacae
atgaagaaaatacttaccgcgctttgcctgctggccacagccggcgcctgggccgctccacagctgatagcccaccgcggcggcaccggcgatgcgccggaaaataccctgccggccattaagctggcgctggagaataacgccgaagccatctgggtcacggtgcagttaagccgcgacggcgtaccggtgctctaccggtcaagcgatctttccgcattgaccaatagcgagggcaaagtttccagtttgaccgccgccgagctggcgaaagtcgacgccggctggaaatggggggatgacagccacccgtggcgcggtaagcaggccaccattccgaccttgcaaagcgttttacagcaatggccgcacacatttttctatattgatatcaaatctccggatgccgatccgaccgtgatgggccagcgcctgcttgaagtgttaaaaaccaccgatagcctcgatcgcgtgcgggtctattccaccgaagaccgctatatcgccgccctgccgccagccatccctcgctttgtcactcgcagtgaaacccgcaccaggcttgccaatatttcgctcagccatcagtgccagccagcgagtcaacgcgatggtgagcagtggtatggactggagctgaagcgcaaagtcgaggtggtggagaaattcacccttggcgaagggatctccccggcgacgctcacctgggataaagaggcaatggattgcttccgctcgcaggataaagcgcacattatcttcttcggcatcaacagtgcggaagactaccgcacggcgatagaactgggcgccgacggggtgatggtggattctccggcgcaggcgaaaagctggcagtaa

SEQ ID NO: 135465 - DNA, 1056 bp, Enterobacter cloacae
atgcgtaaaattatccatgtcgatatggactgtttctttgcggcggtggagatgcgcgacaacccagcgttgcgcgatatccccctcgcgataggcggcagtcgggtacagcgtggcgtgattagtaccgcgaactatcctgcgcgtaagtttggcgtgcgcagcgccatgccgacggcgacggcgctcaagctgtgcccgcatctcacgctgcttcccggccgctttgatgcctacaaagaagcctcgaaccatatccgcgaaattttctcccgctatacctcgcgcattgagccgctgtcgctggatgaagcctatcttgacgtcagcgacagcgagcattgtcacgggtcagccaccctgatagcccaggagatccgccagaccatcgaacgggagctgcgcctcaccgcctcggcgggggtggcgccggtgaagtttctcgctaaaatcgcttcagatatgaataaacccaacggccagttcgttatcgccccccatcaggtggcagagtttgtgcgggcgctgccgctggcgaaaatacccggcgtcgggaaggtatcggcagcgaagctggaaaatatgggcctgcgaacctgtggcgatgtgcagaacagcgatctggccatgctgcttaagcgcttcggtaaattcgggcgtattctgtgggagcgcagccacgggattgatgagcgggaaattcataacgatcggcagcgtaaatcggtgggcgtggagcgcaccttagcggaagatatccatgaatggccggagtgcgaagcgattatcgaaaacctctatcccgagctggagaggcgactggcgaaggtcaaacctgatctgctgatcgcccgccagggcattaaactgaaattcaatgatttccagctgaccacccaggagcacgtctggccccggctgaacaaagaggatctgatcgccaccgcgcacaaagcctgggatgagcgccgcggcggacgaggcgtgcgcctggttgggctccacgtgacgttgctcgatccgcagctggaaaggcagcttttattagggatttag

SEQ ID NO: 135466 - DNA, 453 bp, Enterobacter cloacae
atgcatattcgtgcttaccgcgacagcgatttgccactgctctgccagatctttctgcgcgcggtgcgggaaaccgccagtcgggactataccccggggcagatcgcggcctgggcgcaggtggatgagacgcgctggcgacaaaagctggccgactcaatcggcctggtggccgtggtcaacagccagccggttggctttatcaccgccatcgggacgcatatcgatttgctgttcgtctcgccggatcgcgcccgccagggtatcggcggcgcgcttatcgaggcgctctgcgttcagtatccagcgcaaatcctgacggtggacgccagcattaccgcaaagccctgttttacggctcatagttttaaggtggtggctgagcagcgggtggcggcgcgcggggagtggtttattaattaccggatggaaaaacgcgtggcgctaaggtga

SEQ ID NO: 135467 - DNA, 1458 bp, Enterobacter cloacae
gtgtctgaactgtctcaactatccccgcagccgctttgggatatttttgccaagatttgctccatcccgcacccgtcctatcacgaagaacagctcgccgagcacattatgggttgggcaaaagaaaaaggcttacatgcggaacgcgaccaggttggcaacattctgattcgtaaaggcgcgactgccggtatggaaaaccgtaagccggtagcgctgcaggcgcacctcgatatggtgccgcagaaaaataacgacaccgtccacgacttcgttaaagatccgatccagccgtacattgacggcgaatgggtgaaagcgcgcggcaccacgctgggcgcggacaacggtatcggaatggcgtccgcactggcggtactggccgatgatagcgtcgctcacggcccgctggaagtgctgctgaccatgaccgaagaagccggtatggacggcgcgttcggtctgcaggccaactggctacaggccgatatcctgatcaacaccgactccgaagaagaaggcgaaatctatatgggttgcgccggcgggatcgatttcacctctaacctggcgctgacccgcgaagcgattcccgccgggttccagagctttaaagtcaccttaaaagggctgaaaggcggccactccggcggtgatatccaccttggtctgggtaatgccaacaagctgctgtcgcgcttcctcgccggccacgccgatgagctggatctgcgtctggtcgatttcaacggcggcacgttgcgcaacgccatcccgcgtgaagcttacgctactgtcgccgtcgccgcggataaagccgatgcgctgaaagcgctggtgaatacttaccaggcgctgctgaaaaacgagctggaggccaaagagaagaacctggtggtgctcctggaagcggtcgataacgacaaagcggcgctgactcaggcttcccgcgacactttcatccgtctgctgaacgccacgccgaacggggttatccgcaactctgacgtggcgaaaggcgtagtggaaacttcgctgaacgtcggcgtcgtcaccatgaccgatgacaacgtacagatccactgcctgatccgctcgctgatcgacagcggcaaagactacgtggtcagcatgctggattctctgggtaagctggcgggggcgaaaaccgaagccaaaggcgcttaccctggctggcaaccggacgccaattcgccggtgatgcacctggtacgcgagacttaccagcgtctgttcaacaagacgccgaacatccagatcattcacgccggtctggaatgcggtctgttcaaaaaaccgtatccggagatggacatggtctccatcgggccaaccattaccggtccgcactccccggatgagcaggtccatatcgagagcgtcggtcagtactggacgctgctgaccgagctgctgaaagccattccggctaaataa

SEQ ID NO: 135468 - DNA, 459 bp, Enterobacter cloacae
atgagcgaaaaatacgtcgtcacctgggacatgttgcagattcacgcccgcaaactggccagccgtctgctgccggttgagcaatggaaaggcattattgccgttagccgcggcggactggtaccgggagccttactggcgcgtgaactgggcattcgtcatgttgataccgtatgcatctccagctacgaccatgataaccagcgcgagctgaaagtgctgaaacgtgcagaaggcgatggcgaaggctttatcgtcatcgacgatctggtggataccggcggtaccgccgtggcgatccgcgaaatgtatcccaaagcgcactttgtcaccattttcgccaagccggcaggccgcccgctggtggacgattacgttgtggatattccgcaggatacctggattgaacagccgtgggatatgggcgtggtgtttgtaccgcctatcgcaggtcgttaa

SEQ ID NO: 135469 - DNA, 1245 bp, Enterobacter cloacae
atgtcacaggctaacctcagcgaaacgctgtttaaacctcgcttcaaacatcccgaaacttctacgctggtgcgtcggttttctgccggaaaaccccaggcgatgcagtcggcgctgagcggcaatcacgtcgatcactggtaccgtctgatcaaccgtttgatgtggatctggcgcggcgtaactccgcaggagatcctcgatgtgcaagcgcgcattgtgatgagcgaggccgaacgaaccgatcctgagctgttcgataccgtcatcggctatcgcggcggcaactggatcttcgagtgggcgaaagaagccatgcagtggcagcaaaaggccgggcaggaagccgatcctttgctgagcggccgccactggctgcatgcctcgaacctgtatagcattgccgcttatccgcatattaaaggcgatgagctggcggaacaggcgcaggctttagccaaccgggcgtatgaagaagccgcccagcggctgccgggctcgctgcgcgagctggagttcaccatccctggcggctcgtcgataaccggctttttgcatatgccgaaaggcgaggggccgtttccgacggtgctgatgtgcggggggctggactcgctgcagaccgattattacaacctgtatgagaactacttctcaccgctcggcattgccatgctgaccattgatatgccctccatcggcttctcgtcaaaatggacgctaaatcaggacaccagcctgctgcatcagcacgcgctgcgccatctggaaaatgtgccgtggattgaccatacccgggtcgccgctttcggcttccgctttggcgccaatatcgcggtgcgtctgggctatctggagccgcagcggctgaaggctgtagcctgtctgggcccggtcgttcatggtctgctggtggatcccctgcatcaggggcgcgtgccggagatgtatcttgacgtgctggcttcgcggctgggcatgcatgacgcctccgatgaagcgctacgcgtggagctcaaccgctattcgttaaaaacccagggactgctggggcgccgttgcccgacgccgatgctctccggcttctggaaggacgatccgttcagccccgaagaggagtcgcggttaatcacctcgtcatctgccgatggcaaactgctggagatcccgtttaacccggtgtatcgcaattttgatcacgcattgcgacagatcgcccgctggatcaatcatagatttggttaa

SEQ ID NO: 135470 - DNA, 399 bp, Enterobacter cloacae
atgacgttaccgagtggacacctgaaaagtaagttgatcaagaaattcacggcgctggggccttacattcgcgaagagcagtgccatgacaaccgtttctttttcgattgcctggcagtttgcgtcaatgttaagcccgcaccggagaagcgtgaattctggggctggtggatggaaatggaagcacaagagtcacgtttcacctatagctaccagtttggcctgttcaataaggaaggatcatggcaggcggtcgacattgacgacccggaagtgagcgacaggctggaaaaaacgctgcgcgagtttcacgagcgcgcagcagcgctgctgaccacctttaatctgaagctggaaccggccgacgatttcagcgagccggttcgcctgcgagcctga

SEQ ID NO: 135471 - DNA, 693 bp, Enterobacter cloacae
atgaccgccattccccaggcgacggccattgacggataccgttggttaaaaaacgacatcatccgcggggtttaccaccccgatgagaagctgcggatgagcctgctgacgtcgcgctatggcctgggggtcggtccgctgcgcgaggcgctttcgcaactggtggccgagcggctggtaacggtggtcaatcagaaaggctatcgggtggcgcccatgtcggaacaggagcttctcgatatcttcgacgcgcgcgccaacatggaggccatgctggtgcgtctcgccattgaacgcggcggcgacgagtgggaagccgagctgctggcccgcacccatctgctcaacaagctggagtcgtgcgaagcgagtgagcacctactcgatgaatgggaccagcgccatcaggcgtttcacaccgccatcgtcgccggctgcggttcgcagtatctgctgcagatgcgcgaacggctgttcgatctggcggcgcgctaccgcttcatctggctgcgcaccaccgtgctgtcggtggagatgctggaagataagcatgtccagcatcagaccctggtggacgctattctggcgcgcgacgccgaacaggccagcgcgctgatgcgcgagcacttactgactccgatcccgattattcagcaggcgatggctggcaagctgtcgccgcaggcagggtga

SEQ ID NO: 135472 - DNA, 1401 bp, Enterobacter cloacae
atggggcaactgtcgcaatcacaggatttaggggcggggctgaagtcgcgccacgtcacgatgttatctatcgccggggtgatcggcgcgagtttatttgtcggctccagcgtcgccattgccgaggcaggcccggcggtgctgctggcctatctgtttgccgggctgctggtggtgatgattatgcgtatgctggccgaaatggcggtcgccacgccggataccggctccttttccacctacgccgataaagccatcggccgctgggcggggtataccatcggctggctatactggtggttctgggtcctggttattccgctggaagccaatatcgcggcgattatactgcattcgtgggtgccgggcgtcccggtgtggttgttctccctggtcatcactctcgccctcaccggcagtaacctgctgagcgtcaagaactacggcgaattcgagttctggctggcgctgtgcaaagtgatcgctattctggcgtttatcgtactgggcgcggtcgccattaccggcttttatccctatgccgaagtgagcggcatttcgcggctgtgggaccacggcggctttatgccgaatggcttcggcgcggtgctgagcgcgatgctgatcaccatgttctcgtttatgggcgcggagatcgtcaccatcgccgccgccgaatcggataccccggataaacatatcgtgcgcgccaccaactcggtgatctggcgtatctctattttttatctgtgctcgatctttatcgtcgtcgccctcatcccatggaatatgccggggctgaagagcatcggctcctaccgctcggtgctcgagctgctgcatattccctatgccaagctgattatggacggcgtgatcctcctgtcggtcaccagctgtctgaactcggcgctgtataccgcctcgcggatgctctactccctgagccgtcgcggcgatgcgccggccattatgggccggaccaaccgcagcaaaacgccatacgtggcggtgctgctctccaccggcgcggcgttcctcaccgtagtggtgaactactatgcccccgccaaggtgtttaaatttctcatcgacagctctggcgccatcgccctgctggtctatctggtgatcgccgtttcacaactgcggatgcgcaaaatccttcaggcgcaaggcggcgagatccgtctcagaatgtggctctatccatacctgacctggctggtgatcgcctttatcaccttcgtgctggtggtgatgctgtttcgtccggcgcagcagctggaggtgatctctaccggcctgttagctctgggaattatttgtacggtaccgattatgtcacgctggaaaaagctggtattgtggcaaaaactgccgctgcaaaatacgcgttaa

SEQ ID NO: 135473 - DNA, 1284 bp, Enterobacter cloacae
atgaacagcaataaagcaatgatggcgcgtcgcagcgacgcggtcccgcgcggcgtcggccagatccaccctatcttcgccgaacgcgcggagaactgccgggtgtgggacgtggaaggccgggaatatctcgattttgccggcggtatcgcggtgctcaataccggccacctgcatccgcaggttgtcgccgccgtcgaagaccagctgaaaaagctgtcgcatacctgcttccaggtgctggcctatgagccttatctggcgctgtgcgaaaagatgaatcaaaaggtgcccggtgatttcgccaagaaaaccctgctggtcaccaccgggtcggaagcggtggagaacgcggtgaagatcgcccgcgcggcaaccgggcgcagcggcgctatcgccttcaccggcgcctatcacggccgcacccattacaccctgtcgctgaccggcaaagtgaatccttactccgccggtatgggcttaatgccgggccatgtctatcgcgccctctacccgtgcgcgctgcacggcgtcagtgatgacgaggcgatcgccagcatccatcgcatcttcaaaaacgatgccgcgccggaagatatcgccgccatcattattgagccagtgcagggtgaaggcgggttctatgccgcctccccggcctttatgcagcgcctgcgcgccctgtgcgacgagcacggcattatgcttatcgccgatgaggtccagagcggcgcgggccgcaccggtaccctgttcgccatggagcagatgggcgtcgcggcggatatcaccaccttcgccaaatccatcgccggcggtttcccgctggcgggcgtcaccggccgcgcggaggtgatggacgccatcgcccccggcggactgggcggcacctacgccggcaaccccatcgcctgcgccgcagccctggcggtattacagattttcgaacaggagaatctgctggaaaaagccaaccagctcggcgacaccctgcgccagggcctgctggcgatcgctgaagatcatccggagatcggcgacgtgcgcggtctgggggcgatgatcgccattgagctgtttgaagagggcgaccgcagatggtcagcggcaccaggatgcgcagcacgttgtagtacggcccgcgacaaaggcctgatcctgctctcctgcgggccgtactacaacgtgctgcgcatcctggtgccgctgaccatcgaaaaggcgcagatcgagcaggggctcaagatcatcgccgactgctttagcgaggcgaaacaggcatag

SEQ ID NO: 135474 - DNA, 837 bp, Enterobacter cloacae
gtgttcaacgtggtcaccggctccgccggcgcggtcggcggcgaactgaccagcaacccgctggtgcgcaagctctcctttaccggctctaccgagattggccgccagctgatggagcagtgcgcgaaagacatcaaaaaagtctccctggagctgggcggcaacgcgccgtttatcgtctttgacgatgccgacctcgataaagccgtcgagggggcgctggcgtcgaagttccgcaacgccgggcagacctgcgtctgcgccaaccgcctgtacgtccaggacggggtgtatgaccgtttcgccgagaagctgcagcaggcggtggaaaaactgcgcattggcgacggcctgcaggacggcgtcaccaccggcccgctgatcgacgagaaagccgtggccaaagttgaagaacacattgccgatgccatcgccaaaggcgcgaaggtggtcaccggcggcaaaccgcacgccctgggcggcaacttcttccagccgaccatcctggtcaacgttcccgacagcgccaaagtggcgaaagaggagaccttcggcccgctggccccgctgtttcgctttaaagatgaagccgacgtcattgcccaggccaacgataccgagttcggtctcgccgcctatttctacgcccgcgatctgagccgcgtcttccgcgtcggcgaagcgctggagtacggcataatcggcatcaataccggcattatctccaccgaagtcgcgccgttcggcggcgttaaggcctccggcctcggccgcgaagggtcgaagtacggcatcgaagattacttagaaatcaaatatatgtgcattggcctttaa

SEQ ID NO: 135475 - DNA, 357 bp, Enterobacter cloacae
atggcaagaccacccaaaccgcccgcctaccttgatgaaatcgcggcgcagcagtggaaagcaaaggcgaagcagctggcggagcgcggtgatctgacgcctgccgactggaacaaccttgagctgtactgcgtcaattactcgatgtaccgcaaagccgtggaagaccttgccacgcggggattcagcatagtgaacagccagggcggtgagagccgtaacccggcactgagcgcaaaagcggatgccgaaaaaattctcataaaaatgtcgtcgctgctgggctttgatccggtaagccgccgccgcaatccggtggaaacggaagaggaagacgagcttgaccgtctggaatga

SEQ ID NO: 135476 - DNA, 459 bp, Enterobacter cloacae
atgacaacacagacgcagtacgatctcgcacccgctaaccaacccgaatttgaactgaccgtcacgccggtccccgatgaacaacgtctcgatttctggccgcagcactttggcaccattccgcagtggctactcctggagccgcatatcttcgcctggatggagcgtttctgtgcgacctacagcggcggtatctggtcgttatacaccctgagtaacggtggcgcgtttatggcccctgatgctgacagtgatgataaatggcatctgctcaacagcatgaacggcaatgatgcggaaatgagtgcagaagcggcaggcatcgcggtctgcctgattgcgtacagtcaccatgcctgccgtaaagaatgtgacgcgatgaccgcacactattaccgcctgcgggactatgccctgcagcatccagaggcccacgccattctgcgtatcatcgactga

SEQ ID NO: 135477 - DNA, 906 bp, Enterobacter cloacae
atgcctagtcccccttgtaagcggcttgacgacttgagtcaggtccagcgcgaacggctggcctacatcgattttcggctttacttcttcggtgagatcggtcgcccagatctgattgagcgctttggcgttgctccagcaggagcgactcgcgatttggctttgtaccgggagatcgctccgaataacatcacctttgatggtagcgacaagatctatcgtatcgggcaggcgttctctccgttgttcgagcacgcatcgcagcgtgttctgtcggcgctggctctgggctttggcgatggcgtgaatggcccaatgcaggcgttgctaccctgtgaatcccccacagccctgagcatacccaagatggatgtgttggccgtgatttgtcgagccatccactccaagcgccccgtcgccatccgctaccactcgatgagcagcggaaagtccgaacgggtcattgtgccctttgctttggtagataccggcctgcgctggcacgcccgggcctttgatcgcaagagtggagagtttcgggatttcgtcgtcacccgcatcgaagcgccaacattgcttgaagaggttccgcaggccaacgaacgaccggataatgatatccagtggacgcgcatcgttgagttggatttcgtgccgcacccacgtgttgaacgccccgaaatcatcgagatggactacgggatgaccggtggctcgattaggatgtacgttcgtgcagcggtggcaggctatatgttgcagcgctggcgtgttgactgctcacccgatcattgcctaaatggaccggagtaccgtttatggctcaaagatcatctcgcgatctacggcgtgaaaaacgccttactggcaccaggctatagcacctctataaaggctgactcttga

SEQ ID NO: 135478 - DNA, 3279 bp, Enterobacter cloacae
atggaactgatcgacaatatcaatcgcctgctcggagacgacctaaagcagacgctcaaacccggtgctcgcctgaagatcgccgcctcctgcttttcgatgtacgcgtttgaagcgctaaaagcagagctggaaaaaatcgacgagctgcaattcatctttacctcgccgacgttcaccgccaatgaagtaaccgacaagattcgtaaggaacgcaaagaattccacataccgaaggctgaccgcgaacgtagtctgtacggtagtgagttcgaaattcagctgcgcaacaaactgacccagcgcgcaattgcaaaagagtgtgcggactggatgcggcgtaagacaacattcaagtccaatcgcagcaaggctccgatgcagcagtttgcttgtgttcaggccgccgccgcagagactgcctacatgccactgcacggatttacggccgtcgatcttggctaccagcaaggcaatgctgtttcaaacctcgtcaacaaaatggacgagtcgacgtttacggcgacctacctcaatctgtttaaccagatctggcaagatcctgagaagctggaggatgtaacggcgcagatctgcgaccacattgcatccgtctaccaggaaaactcgcctgaaagtatctacttcctgatgctctataacatcttcaatgagtttctggacgacctcaacgaggatgtcctgcccaatgaccgcacgggctatcaagacacgctcatctggaacaaactcttcaattaccagaaagatgctgccactgggatcatcaacaaacttgaaaactacagcggttgcatcctggccgacagcgtgggcttgggcaaaaccttcaccgcacttgccgtcgtaaagtattacgaactgcgcaacaagtcagttctggtgttatgccccaaaaaacttgcgggcaactggctgaactataaccgcaaccttaagaccaacatatttgctcgcgaccggttcagctacgacgtgctttgtcatactgacctcagccgtacgagcggcgagtcgtttggaacaccattgaatcgcatcaactggggcaactacgacctcgtcgtcatcgacgagtcacacaacttccgcaacaatgacgcctacaaagacaaggaaacccgctaccagatactgatgaacaaggtcatcaaggagggcgtgaaaaccaaagtgctgatgctttcggccaccccggtgaacaaccgcttcaatgacctgcgcaaccaattggcactagcctacgaaggcgattcagaaaacctcagcaagaagctgcgtaccagcaagacggtagaagacattttccgtggtgcgcaggccagcttcaatgcatgggcaaagcttccgccggaagagcgcacagcgcgagccatcctggactcgttggacttcgacttcttcgaattgctcgacagcgtcaccatcgcacgctcgcgcaagcatattcaaaccttctacgacaccacggagatcggccaattccccgagcgccgcaagcccttgtcgttccactgtccgctcacgcagcgaacggatgtgatgagtttcaacgaaatcttcgagcaactgtctttgctccggctcgccgtttacgccccgatcagctacatcctgcccagtcggctcaagaagtacgaggagatgtatgacactcaggtcgaaggcaagggcaagcttaagcaagtcgatcgcgaaaagagcctgcaggcattaatgacgaccaacctgctcaagcgcctggaaagttcgattgagtccttccgcttgacgctccagtccctgcgcacgaacctcacaaatacactggacaagatcagctcgttcaatcacaccggtgacctcagcggtattaacggcagaatcaatgacctgaccgagcagttggaaaaccttgacgcagacgacgacttgcccaacattggcgacagcgagatcggcggcaaagtcaaaatcagcctcgccgatatggacctgccttcatgggagcacgagctgaaggtcgatctggaaatcattgatgccttgctgacgtcgatgaataagatcacagctgccgatgatgctaagctgcagcacgtaaaggcactgatcctgaagaagatcacagcacccctgaatcccggtaacaagaaggtactgatcttcaccgccttcgccgacaccgctgactatctgtatgccaatttggctccggaattgctggcaacacataccttgcacagcgcgaaagtcaccggcaagggtgcgccaaaatgcacgctgaagaagagctatgacttccaggaactgctcacccttttctcgcctcactcgaaggagaaagccaccgtgctgccaaatgaggaggcagagatcgatttgttgatcggcaccgattgtatctctgaaggccagaatctgcaggactgcgactatcttatcaactacgacatccactggaatccagtgcgcatcatccagcgcttcggccgagtggatcgcatcggttcacttaatagcagcatccaactggttaactactggccagacatctcactcgacgaatatatcaatctgaaggaacgagttgagagccggatgatgattgctgatgtcacagccactggcgatgacaacgtgctgagtgctcaagccaacgacgtgtcttatcgcaaagagcaattgcgacgtctgcaggaggaggttattgagctggaagacctgaaaaccggagtgtcgatcactgatctcgggctcaatgacttccgaatggacttgctcaactatgtgaaggctaatggcgaattgagcaacgtgccaagcgggatgcacgccgtagtgtctgctaagccggagatgggcctgcgccctggtgtgatcttcacgctgcgcaaccgcaatccgagcgtcaacgtcagtcaacacaaccggctgcacccttactacctcgtctatatcaatcgcgagggtgaagtcattcacgatcacaccgaagtcaaacgtttactggatctggtacgcacttgctgcaagggacaagcccagcctattacagatgcctgtctgctattcaacgaggaaacggccgatggccgcaagatgcaggtgtattcggacctgcttggcaaggccatccgctcaatgattgaagtgaaagaagagaaggatctggacagcctcttctgcggcggtaagaccaccgcgctggtcaataccatcgccgggctggacgacttcgaactgctcaccttccttatcattcaggaggccggatga

SEQ ID NO: 135479 - DNA, 690 bp, Enterobacter cloacae
atgagtcaatctgcgcgatttgagtcgaataccgcgttcatcaattatccgaagcaggctgtctttggtcgtaccctgccaaagaataagatctacgaacacagcggcgccaatacgaggctgaaggacttgttcgtcgagcaggtggagcagatcgtctggcaatacaagttggctccggaaacgatcaacctgcccgccaggctgggagtaccagagcttcagattttctcaatccagctcaaggcatcggagctgaatctggacgttttgcgttgcatcgatggcgcagtgcagtttcccattatcttcgagctgagctttgatggccgaacaaaggtgatcgctgcgtacaaacgccccaatgagtcagacgccagccgttgggtcttgagtgactactttgcaacagcctggttgccgagtgactgtgagcgcgccgccatgcccttagcactcgacttgggcggcttgtatgagcagttgcttcacagcctgatctccacgcccgcgcgcctacaagaaagtctcgcggatttggtcgcacgtgtcgaactggttgcagccaaggaacgtgaggttgaaaaaatagccagcagacttgccaaagaaaaacaattcaaccgcaaggtagagatcaacgccaaactgcgaatgttgaaaatagaactggaagaactcaaacattga

SEQ ID NO: 135480 - DNA, 1881 bp, Enterobacter cloacae
atgaagattcaatccgttcgcatcaaaaacttccgggcactcaaagacgtcacgattcccttcgactccgttacgacattcatagggccgaacggcgctggcaagtcgacagtgctacatgcactcgattggttcttcaacggcaagcccggctcgctgacagagaaagactgctcctttggagaagctagcgaagacatcgaggtgcaagtcacattcgcagatctcaccgaaaaggatcgggaggcgcttggtaagtacactccagagggcgcagctacattcacggcgtggaagcgccgttcagctgacggcaccgatgtgctctctgcaaacgcaaagggattcccagagttcaacgtaatcaaaactgcaaatggcgtagcggcgaagagggagctttatacaaatctcagaactagtcgtccagagctggagcttcctacagccactaccggtacagccattgaccaggcaatgactacctgggaggcatcacatacagagttactcgtagacgcccccgaatcgctgcaaaccaacttctttggtttcaacagcggcggcaagatgagcggcctcttcgattttgtgctggtgactgcagaccttcgtgcaagcgaagagtccattgacggtaaatcgagcatcatcggacgcatcctggaacgctccgttgatcgtgcagcggcagatcaggagattgcggcaatcgtcgaggagtccagagcaaagcagcagaaagtctacgaagagaaattccaagcccagcttaaggtgatgacgacgcagcttaacgaggttgtttgctcatactcacccggtcgggcggtcacggtttctcccgcagaggtagagctcaaagcccccaagaccacgttcgaagtatccgtgctcgatggtacaaccgaaacagcggtagagcgacaggggcatggttttcagcggactattctgatctcggcgctccagctcttggcacaatcgggagcagcttcagccgacggagtcatctgtttagcaattgaagaacctgagctctttcagcacccgattcaggcacaggcgtttgcaaaagtgctccgctcacttgttgaagaccccgacaagtgtatccaagtaacctatgcaacgcacagcccttatttccttgaggcccgccattttgatcatgtcaggagattgacgcgatcatctggagagactccgactgtgactatccactttgcctccattgatgatgtgaagaccaggctgcaccagatagtaaatggtgatgttgtcgaacgtcagttagatggcatcgtttcagagcaactggctgtagccctctttgcccatcgcgcttttcttgtggagggtaccaccgagtcatcggtgttccacggtataggcgacaaaatatctcatggtgcgcttgaagccgctggtatttccattgtcccagtcggaggcaagacgtcgattcctcttgtccatgccatcctgtccgcactcggtatcccggtttatgcgcttttcgatgctgacagagcatgtgcggcgcgagcaaaagccaaaggaaaacagcaaaacaagatcgatgaagaacttgcaaaaaatgcccgagaaaaccggacagctctgaaatacttcggtattgctgaagaagattttccggaagctgtcgtaggcgacacagtcgccatttttgaagaccatctggaatcatttctcgtagccaactggcctgagtggctagctgcttgcagtgaaatcgagattgccacaggtattagtctctcgaagaaccaactcgcataccgcacggcgacactcaaatccgcaggggcggtgccagagatgctccagcaaattttggccaaggtagaaggaaaatga

SEQ ID NO: 135481 - DNA, 1410 bp, Enterobacter cloacae
atgcatgaaatcatctgcccccattgcggcaaggctttcaagattgatgaagctggttactcagacattctgaaacaggttcgcgatgctgactttgagaagcagttacatgaacgccttgagctggccgaaagggacaagcaaaatgcggtcgagctggctcaagccaaggttaccagcgaattgcagaaggctgcttctgaaaaagatgccgaaatccaggcattaaaggctaggctggatgcaggagaggtggcgcaaaagcttgctgtcagtgaggcgctgagcgcggtagaaaaagatcgcgatgcactgaggaacgcgctggaaaaagcaaagcaagagattgaaactaaagctcaactggccgaggcgaagcgattaagtgagctacagcaagccgaggccaccaaggatgcggagattcagcgtctgcaggccaagcttgcagcgggcgaagttacacaaaagctcgcgctcaccgaagcggtcagcgtggtgacgaaggagcgtgacgaactcaagaacggactagagcgagcagcattggaaaagcaacttgccgagactgcactcaaagataaatacgaaacacagcttaaagatcgcgatggtgagattgtacgtctgcgggacatgaaggcacggctgtcgaccaagatgattggggaaaccctggagcagcattgcgagattgagtttaaccgtctccgagccaccgcattcccaatggcctacttcgaaaaagacaacgacgttcgcaccggcagcaagggcgactacatcttccgggacatggatgatgcaggcaccgagatcgtctcgatcatgttcgagatgaagaacgaaggcgacgaaacagcaaccaagaagaaaaacgaagacttcttcaaggagctcgacaaggaccgcaccgaaaaaggttgcgaatacgccgtgctggtttccctgctggagccagacagtgaactttacaacgctgggatcgttgatgtgtttcaccgctacccgaagatgtatgtcgttcggcctcagttcttcatccccatcatcacgctactacgcaatgcagcgatgaagtcacttcaatacaagtccgagctggcgctggtgaaggcgcagaacatcgacatcacccaatttgaaacccagctcgatgacttcaagaccgcattcggtcgcaactggcgtttggcttcagatgggtttgaagaagcggtcaagcgcatcgacgaagccatcaaggaccttgaaaagaccaaagaagccctgcacaagtccgccaacaatcttcggcttgccaacgataaagccgaagacctgacggtcaagcgactcacgcgcggcaacccaacgatggctgccaaatttgccgagctcaaacaccaaaacaattctgacgccgaataa

SEQ ID NO: 135482 - DNA, 1971 bp, Enterobacter cloacae
atggaaaagctaaaaatgcattcaccaaatctcacgcaggacaacatcgcccgcattcgcgatctgtttccaggctgcatcaccgaagccaagggcgaagacggcagtgtgaaactggcggtggattttgaccaactgcggcaggagcttgctgagtcgattgtggaaggaccgcaagaacgctaccacctgaactggcccggtaagcgcgaagccttgctcgcggctaacgcgccgattgccaagacactgcgcccggtgcgtgaggaaagtgtggacttcgatacgacgaagaacctgttcattgagggagacaaccttgatgcactgaagctgttgcaggagacgtatctgggcaaggtgaagctgatctacattgatccgccgtacaacaccgggaacgactttatttacgaggatgactttgccgaagatgcagacgaatacttgcgtcgttcaaatcaagtggatgaagacggaaatagattggtggccaacacagtatcgaatggccgctttcattccgattggctctcaatgatttattcacggcttcgtcttgctagggggttattaaaagaagatggtgccgtctttatctcgatcaatgatgctgaatttgagaacttaaaaagcatagccagtgaagttttcggtgcagagaattttgttggtacgatggtttgggcagcaggaagaaagaatgactcgcgctttatatcggcgtcacacgaatacatcgtttgctttgcgcgtagtatgaatgctcttaaagagcaaggagcctcgtggcaaattctgaaaaagggcctcaccgaaattgagaaaacctattcggagttgcgccgtaagtttggtggcgacgatgcggctgtcgaagctggcttgcggaaatggtatggcagcctctccgataatgatccaagtaagcggcataaacactatcaatacgttgacaagcgaggtatctattttgcaagtgatcttcgcaaaccacagcccacatcgcgttcgcgctatgaaattttgcatccaataactgggaagccagtgaatatgcatcctaatggctggtcatttgccccggagcgcatgaaggagttgcttgcagatgagcgcattcgatttggtgcagacgaaaagacgcggccaacattgaaggtatatcttcatgaggcaaacaaagaagctgcttatagcgttttctatcaagatgggcgtggtgcgtcaattcgacttgatgcgttgatggaagcacatgtttttgattttccgaaagatgaaactatcattcaggcactagtggaaatgaccactgcgggcgacgatattgtgatggatttttttgcgggatcagcgaccaccgcacatgcaactattgcagcaaatagcttagatggttcgtctcgaagattcgtcatgattcaacttccagaggagattaatgagaaatcagaagcgttcaaggctggctacaaaaccatcgcagatgtgagtagggagcgcatccgccgcgcgggccggaaaatcgtttctgaatttgccaatggcagcatggacatcgggttccgcgtgttgaagatcgacacgtccaacatggccgaggtcttctacacacctgatgctgtcactcaagccagtctgcttgacgccttggataacatcaagcccgaccggacgcccgaggacttactgttccaggtgatgttggactggggcgttgaccttgccttgcccatcgagaaaagggctatccaaggcaaagatgtatacttcgtggatagcaacgcgctggccgcctgcttcgatgtcagcagtagcatcgacgaaccctttgtgaaggaactggtcaaacatcagccgttgcgcgtggtgttccgcgacgcgggctacaagaacagtgcggtcaagatcaacgttgagcagatttttaagctcttgtcgcccgcaaccgaagtgaaatgcatctga

SEQ ID NO: 135483 - DNA, 3072 bp, Enterobacter cloacae
atgaaacttaaattcaaacatcagccctatcaggctgccgccgtgcaggcggtcgtcgatatttttcaggggcagccaccggcctctgatgcggccatgagctatcgccttgaccctggtaataccaaaaacggcatgggagatctgtttgcggttgataccggttttaaaaatgctgagctaaccctcagtgaggtttccttgcttaataacatccaacaggcgcagcgccagcaaaacctgccgttgtcggagagcttggtcaagaacaaggtcgccaggctaaatcttgatatcgagatggaaacggggactggcaagacctattgctacatcaagacgattttcgagctgaacaaacagtacggctggagcaagttcgtcatagtggtgccgagcattgcaatccgcgagggcgtggccaagtcgctggaaatcacggccgagcactttcaggagacctaccacaagaaggcccgctcctttatttacaactctaagcagttgcaccatctggagagcttctcctccgatgccagtatcaatgtcatggtgatcaacgtgcaagcgtttaacgccaccggcaaagataaccgccgtatctatgaagcgctcgatgattttcagtcacgtcgcccgatcgatgtgatcagcgccaaccggcccatcttgatccttgatgagccgcagcgaatggagggaggcaaaacgctggattctttggctaatttcaacccattgatggtgttgcgctattccgcgacccacaagaccacacacaacaagatccaccgcctggatgcgctcgatgcctataaccagaagctggtgaagaagattgaggtgcgtggtatctcggtgaagggactggcgggaaccaatgcctatatctatttacaagccatcgaaatctcaaacaaaaaaccgccggtagcggttgtggagttcgaacagaaactcagcggtggcaacatcaagcgtgtcactcgcaaactggggaagggtgacaatctgtttgtgctatcgaacgagctggatcaataccgcgatgggtttgtggtatcggacatcaatgccaatacggacaccttcagctttaccaatggtgtagaactgacggtgggtgatgcgactggtgatgtttccgagatagcgctgcgccgcattcagatccgtgagacgatcaaggcgcactttgacaaggagatggagctcttcgataaaggggtgaaggttctctcgttgttctttatcgacgaagtcgccaggtaccgggactacaccgctgccgatgaaaaaggcgagtacgcaaaaatctttgaagaggagtacgctaagcaccttcaagaagcctttgataatgggtttatggagggggatgccccttatgctaaatatctacgccgcattgcggccgataagacgcacagcggctacttttccattgacaagaagagcaagcgcctcaccgatcccaaggttgctgcacgtggtgaaaatgcgggcttgtcggatgatgtagatgcttatgatctgatcctcaaagacaaggaacggttattatcactagctgagccagtgcgttttatcttctcacactcggctttgcgtgagggttgggataacccgaacgtgttcgttatctgcacgctcaaacatagtgataacaccatttcacgtcgtcaggaggtcgggcgcggcctgcgtttgtctgtcaatcagaatggtgatcgcatggatcatccgtccattgttcatgacattaacgtactgacagttgtggccagcgaaagttacaaggacttcgtaacagccttgcagaaggacattagcgagtccttgtcagctcgtccgcgtgtggcggacaaggcctacttcacgggcaagatgatgaacacgaacgaaggcccggttacggtctcggatgaacaggccacggacattgagttttatctaatccagaacggctacgttaataaaaaacgcaatatcacggagaagtaccatcaagccaagaaagacggcacgctggtggcattgccggatgaactgcagtcctatgcggagcaggtattccacctgattgacagcgtattcagcgaaaaccagctcatgcaggtagaagatggtcgcaagcccaaaagactgcagcccaatgccaactttgaaaagcaggaattcaaggcgctatggggtcgaatcaatcgcaaggctacttacagcgtgctgtttgatgatgttgagctagtgaacaatgcgatcaaggcgctcaatgacaagaatgctgggttgcgagtgacaccgttgcaatacaccatccaccgtggcgagcaggctgatacggcaacttacgatgacctcaaaaagggtaatgccttcgagttaaaagttaccgaaacagaatcggacaacacatcaattcactctgctgtgcagtacgatctgattggcaagttatcagagggaactttgctgacaagacgagccgctgccgaaattcttaaaggcctcaatgctgacgtcttcgcgcaattcaagagcaacccggaaagcttcattgccgaagccattcgcttggttaatgaacaaaaggccaatgtcatcatcgagcatctggcctatgacacgctagaagacaagtttgatctggatatctttaccactggtcaaagcaaacaggacttgagtaaggccgggaataaactgcaaaatcacatctatgactacgtgcttaccgactctgcgattgagcgcaagttcgtcgaagagctggataccagcaaggatgtggtggtatatgccaagttgccacgtggttttctgattccaaccccagtcggtgattacaaccccgactgggccatttccttcaaagaaggctcggtcaagcatgtgtatttcgttgctgagaccaagggctcgatgtcgtcactggatttacggcctattgaaactaccaagattaaatgtgcccgtaagttcttcgatgagatcaacaagaagtttgctccagaaaacgtgaagtatgacgtcgtggatagcttcggtaagctgatggaagtggtgaagtaa

SEQ ID NO: 135484 - DNA, 1308 bp, Enterobacter cloacae
gtgaccttagaacttaaacacccaagtgagatctatcagattatcactgaagaactggaccacattatacattcattgcagagacagagctgtgataaggattttgatggtacccaagccgatgcgctcgaacaattagccctacatcagacagaattacgtgctcagttagctcgattggaaatgaatgctgagtggaatacgtttactgtcgctttttacggggaaaccggagcagggaaatccagcatcattgagacgctgcgtattctgcttcatgagtccggaaaaatgaatgagcaacttgctttccgggcagtgcaggaaaaatattttttaagtgagaactgttttcagaaactggtacaagagactgaacaggctgagaataaactcgctgtgatcacggagaaaatcgcggccgtcagactggcttttgatcaacagcaacagatagatctgaaacatattgagtctctgcaaaatcagatcaatgaacataagcgtacggcttcactatggcagaagctcctctcctggtttcgaaagatgccacaagaaatcgaactcaagacggccagacaacaggtgcaggataccgttgactcacatgaatgtgctatccgtaagttactcgatgagcagggtgaagctgagcagaaaaaaaatgagttgattcagagacagcaacagtcagagagccacttgaaggaactgaatgcaatggccgatggtgccatcatcggcgatggcagttctgacttcactcgtcaaaccaagcgttacaacatggaactggatggtcataagttcgctttgctggacgttcccggtattgaaggcaaagaagggttagtgctgaaagagatcgaggatgcagttcaaacggcacatgccgtgttctatgttaccaaccagccagccccgccgcaaacaggtgatgatcaacgtcagggcacgctagaaaagatcaaaacacatctcaaagatcaaaccgaagtgtggacgattttcaacaagaaaattgtcaatccaatggccattaagaatcagccactacttaaagatgatgaagaaaatagtctgattgaactcgataaaaaaatgcatgaacaattgggtaaaaattatcgtagcgtattttccctcagcgtacttccggcatttgtagcctctacagaccactttgctcccgattcacaatatgctaaacgacgcaaaaaatttcttgatagctttgatgccgacgagcttttggaaatttcgcacatgcgggcttttatcaggatgacctgcccccacgattag

SEQ ID NO: 135485 - DNA, 1293 bp, Enterobacter cloacae
atgaaaatccgttctcaggttggaatggtgctgaatctggacaaatgcatcggctgtcacacctgctcggtcacctgtaaaaacgtctggagcagccgcgaaggcatggagtacgcgtggttcaataacgtggagaccaaaccgggcattggctaccccaaaaactgggaggaccaggatcagtggcaaggcggctggatccgcggcattagcggtaaactgacgccccgcctcggcaatcgggtcagcgtgttatcgaagattttcgccaacccggtgctgccggcgatcgacgattactacgaaccctttacctacgactaccagcacctgcacaacgcgccggagggcaaatatctgccgaccgcccgcccgcgctcgctgatcagcggcgagcgtatggataagattaactggggcccgaactgggaggagctgctcggcggcgaattcgagaaacgcgcccgcgaccgtaacttcgaagccatgcaaaaagagatgtacggccagttcgaaaataccttcatgatgtatctcccgcgcctgtgcgagcactgcctcaacccgagctgcgtggccacctgcccgagcggcgccatctacaagcgtgaggaagatggcatcgtactgatcgatcaggacaaatgccgcggctggcggatgtgcatcagcggctgcccgtacaaaaaaatctactttaactggaagagcggtaagtcggaaaaatgcatcttctgctatccgcgcattgagtccgggcagccaacggtctgctcagaaacctgcgtcgggcgcatccgctatcttggcgtactgctgtatgacgccgaccgtattgaagaggcggccagtaccgaacatgaaaccgacctctatgagcgccagtgcgaggtgttccttaatccaaacgatccggcggtcatcgaggaagcgctaaagcaagggatcccgcacaacgtcattgaggcggcgcagaagtctccggtctataagctggcgatggactggaagctggccctgccgctgcatccggagtatcgcaccctgccgatggtctggtacgtgccgcccctgtcgccgatccagtcggttgccgacgccggcggcttaccgagcaacggcaacatcctgccggcggttgagagtctgcgcatcccggtgcaatacctggcgaatctgctgagcgccggcgataccggaccggtcttgcgcgcgctgaaacggatgatggcgatgcgccactacaagcgctcgcaaaccgtcgagggcgtcaccgatacccgcgccatttaa

SEQ ID NO: 135486 - DNA, 219 bp, Enterobacter cloacae
atgtatcgctatctggcgatcgccaactacgaagaccgcttcgtgatccccaccagccatcgcgaactggcggaggatgcctttccggaacgtaacggctgcggctttaccttcggcgatggctgccacgggtcagatacgaaattcaacctgtttaacagccggcggatcgacgccatcgacgtcagcggcgtgcgtaagcatggggagggcgagtga

SEQ ID NO: 135487 - DNA, 696 bp, Enterobacter cloacae
atgcggatcctgaaagtgatcggtctgctgctggagtaccccgacgagttactgtgggagaaccgcgacgacgccctggcgctggtcagggccgatgtcccttccctgacgccgtttgtcggtgagctgctgacggctccgctgttggatcgccaggccgaatggtgcgaggtgttcgagcgcgggcgcgccacctcgctgctgctgtttgaacatgtgcatgccgaatcccgcgaccgcggccaggcgatggtcgacctgatgaatcagtatcagcaggcaggtctgcagatcgattgtcgcgagttgcccgaccatctgccgctgtatctggagtatctcagtattctacctcccgcggaggctcgggaggggctgcagaatatcgcgccgattctggcgctgatcggcggccgtcttaagcagcgagcctgcccgtattatcagctgtttgacgccctgctggcgctggctaaaagcccgctcaccagtgacagcgtcacaaaacaggtggcgggagaaaagcgcgacgatacccgtcaggcgctggacgccgtgtgggaagaagagcaggtgaagtttatcgaagataacgcgaccgcttgcgatagctcgtcgatgcaagcttatcaacgacgctttagtcaggatgtggcgccgcagtacgttgacatccgcgccggaggcccgaaatga

SEQ ID NO: 135488 - DNA, 846 bp, Enterobacter cloacae
atgagtccctttttacgcgcctatttttcccgtctgagctggacgggtgagcctgatgtttccattgataccctgcgggaactgcatctgcagcataacagcgccatcccctttgaaaacctcgacgtcctgctgccgcgtgaaatccaccttgacgatggggcgctggaagagaagctgatcgccgcccgccgcggggggtattgttttgaacagaatggcctgctggagcgcgcgctgcgcgagataggctttaacgtccgcagcctgctgggccgcgtggtgctggccaacccgccgcagatgccgccgcgtactcaccgtctgttgctggtggaggtggcgggggagcgctggatcgtcgacgtcggcttcggcggccagacgctgaccgcgccgatcaaactgctggccgatatcccacagcaaacgccgcacggcagctatcgtctggtgcatgaaggggatgagtggacgctgcagttcaaccatcacgaacactggcagtcgatgtaccatttcgatttaggctgccagtatgcgtctgattatgtgatgggcaacttctggtcggcgcactggccgcagtcccacttccgtcaccatctgctgatgtgtcgtcatctcccggacggcggcaaaatgaccctcaccaacttccactttacccactgggagaataaccatgtggtggagaaggtcgattttgccgatgtctccgcgctgtatgaagcgctgcagacccgtttcggcctgggggtggacgatcctaaacatggcttcagcgaagcggcgctggcggcggtgatggcggcgttcgatacccatccggaagccgggaagtaa

SEQ ID NO: 135489 - DNA, 1656 bp, Enterobacter cloacae
gtgaaacaaacattcctttccggcgcgacccttgccgccctggtgatgctggtcgcgttaccgttagtgtttattctgctgcaggcgatttttccccattttagcgccggttcgctcggggacgcctttggcggcatcccggcgctgctggccgatcctcagctgccggcgatgctcggcggtacgctgtggatcgccgccggcgtggcgctggtcagcgtaatgattggcctgccgctcggcatcctgcgcggtatgttttcgctgccgctgccccggctgtgggatctcctgtttttgatcccctttctgacgccgccctatatctcggcgctctcctggatgctggccctgcaaagccagggctacctgcagcagctgaccggctggcagctgaacgatctgctgttcagccgcagcgggatcgtgctggtgatgacctttaatatatttccggtggtctactttgccgtctcccgcagcctgctggcgagcgggacccggctggcggtggtcgcccgcgtccatggcgccagcgcctggcgcgccttctggcacgtgacgctaccgatgctctctccggcgctggcggcggggatgctgctggcgtttaccctcgccatcgaggaatttggcgtaccggcggcgctgggcagccgggcgggagtggtgatgctgacggtcggtattgagaaaaagctggccgactggccggtggatctccctggcgccgcgctattgtcgctgctgctgatggcggtggcgttgttcgcctggtggctgcaaaggcggctggtgggggagaaagaggtcaccagcgtcaccggtaagccgggggagaaccacggggcatcgctgggctggatgatgctgcccgccgtgctggcgatggcggccgtcggcggcctggcggtcggcgtccccgccgtctcgatgatgctcaccagcgtgatgggcacgctctccggtggcgtgagtgttgagaatgtcacactgcgtcatttcgcggcgctgtttgaccagcagggagatgccctgtcggccctcggcaccagcctgtcgctggccctgggttcggcgctaatcgtcggcgcgctgggcctgctggccgcctggctggtgatggtgcagaagattaaagggcgcgggatggtggacgcgctgtcgctgatgccggcggcgctgccgggcgtggtggtgggggtcggtttgattctgctgtggaatcagcccttctggccgcgctcgccctataacacgctgtggatgctgctgctctcctattgctgcctgctgttgccctggccggtgcgctatgtcggcagcgcgctgcgccagctgggcccgaaccttgagcccgccgccagggtgcacggggcgtcgccactgcaggcgctgcggttgattgtcctgccgctggtctttccggcgctgctggcggcgatgctgatggtgttcgcggtggcctcccgggagctggtgacctcgctgctgctctctccggccggtacgcaaaccgtggcggtgtttatctggcgccagttcgaacagggttccgtcggtcagggcatggcgatggccagcctgacgttgttgaccggtctggtcctgatgctgacggcgctggcgctgatgcagcgccgcacgcgcggttaa

SEQ ID NO: 135490 - DNA, 969 bp, Enterobacter cloacae
atgaacaccgttatgaccgttaagaaaggagtggtactcgcgatggctctttccgccatgatgctctccagcgcccatgcgctgaccgtttacaccgccggacccggctcgctggcgaaaagcctggccagcggttttgaacaacagaccggggtgaaggtgaccgtttttcaggccaccaccggcaaagtgatggcccgactggaggccgagcaggccaacccgcaggcggatgtgctgatctccgcctcgtgggataccgccgaagatctgcaccagcggggctggttgttgccttttgcgagcgccaacgccgaccaggtaccggcgaacctgaaatcggcggactatatcgcccagggcgtctccgccctgggtattgtctggaacagtaaaagcggcaccccggaaccgaaagagtggcgggatctcacccagccggcgtttaaagacaaggtgacaacccccgacccggcgctctccggcgcgtcgctggatttgctgatcgggctgcaaaacagcatgggcgaccaggcctggcaactgtttgacgatctgaaaaagaacggcatggtagtcagcggacccaacgcccaggcggtgacgccggtgatgcagggagcgaaagcggcggtgtttggcgcggtggattatgtctcctacggcaatattcagcagggcgagtcgctgaaggtgatcttcccggccagcggaacggtgattgccccgcgcccgatgatgatcctcaaaaccagccagcatcccggcgaggccaaagcctttatcgattacgtgctgtcgccggaaggtcaggcgaaggtcgccgacgcctggctgatgcccgcccgccgcgacgtggcggctaaacgtccgctactggacgcgctgaaggtgctacccaccaccagcgagggcagcagcgagcggggcgccgtgctcgcccgcttcagtcagctgtacgcgcagtaa

SEQ ID NO: 135491 - DNA, 702 bp, Enterobacter cloacae
atgcgcacgctgacccctatcaccctgcaggaggtctctttcgccttcgcagagacccctattcttgaccgcttcacgttgcatatcgaacccggccgcatcgtggcgctactgggcccttccggctgcggcaaaagcacgttgctgcgtctgctggccgggctgagcgtgccggccagcggcgaaatccgctttggcgacaggctggtcgccagcgcaggatggggattgcccccggagcagcgcgatatcggcatggtttttcaggattatgccctctggccgcatatgagcgtggcgcagaacgtcgcctttccgctgcgcatgcgcggcgtctcccgcagcgaacgcgagcgccgggtcagcgaggcgctggcgcgggtaggcctcaatggctttgccgaacgtaagccttcaggcctctccggcggtcagcagcagcgggtggcgctggcgcgggcgatcgtcgccgcgccgcgggtgctgctgtttgatgaaccgctctccaacctggacagcgaactacgcgaatcgctgtgtggcgaaatgagccgcctgctgcgacagctcggcatcaccgccctgtatgtcacccatgaccgacgtgaagccgagctgttagccgaccagattgtttatttatccgcgggccgcgtggccgctgtccgcgccgttacgccaacctcaggggaagttgcatga

SEQ ID NO: 135492 - DNA, 582 bp, Enterobacter cloacae
atgagccgctttcgccacgttgaactgcaatacgccagccgcctgctcaaccacggcccaaccattttgatcaccagctacgatgccccgtccgaccggcgcaacgttatggccgccgcctggtcaatgccggtggaattcgccccgccgcgggtggctatcgtggcggataaaagcacctggacgcgggagatcatcgagcgcaatggcaccttcggcattgtggttcccggcgtcgcagccgccagctggacctacgccgtcggcagcgtcagcggccgcgatgaggacaaattcaatgcctgggggatcccggtagtaaccggtccggagctggggctgccgctgatcgaggagaaatgtctggcatggatggagtgccggttgctgccggcgacggcggcccagacccagtacgacaccctgttcggggaggtggtctctgccgccgccgatgagcgcgcgtttgtaaccggacgctggcaattcgacgacgataagctcaataccctgcatcatcttggcaccggcaattttgtcgccagcggccgtcatgtgcgggcaaactccctcgacgaataa

SEQ ID NO: 135493 - DNA, 228 bp, Enterobacter cloacae
atgccgcatgttgatattaaatgttttccccgtgaactgactgatgaacaaaaaaccgcgctggccgccgacatcactgaggtgctgatccgccatctgaacagcaaagagagcgccgtcagcgtcgcactcactcaggttgagccggacgcgtggcaggcggtgtgggacagtgagatcgccccgcagatggcgcagttgattaagcagccgggttatagcatgtag

SEQ ID NO: 135494 - DNA, 618 bp, Enterobacter cloacae
atgataaccgtttatggcgtgccgggatggggctcgacgattagcgagctgatgctctccctggccgatattccctacgaggtggttgacgtggagggctttgaccagcccggtccggcgcgcgagcgtctgcggcagattaatccgctgtgccaggtgcccaccctgaggctggccgacgggagcatcatgaccgaaaccgccgccatcgcgctgatgatcctcgaccagcgtcccgatctggcccccgcgccggggacgccacagcgtccgcagtttcagcgcctgctggtctggctggtggccaatgtctatcctacctttacctatgccgattacccggaacgctgggcgcccgccgccgcggagcagctggtggagaattgtcgccagtaccggaaaaatctctatctctggttcgaacagcagctggccgccgggccgtgggcgctgggcgcgtcggtaacgttgctggattgctatatcgcggcgatgtaccgctggggaccccgccaggcgtggtttgacgaccacgcgccaaaattcgccgccatcgcccgggcggtctgtcagcgaccggagctggccgcggcgctacgccgtaacaagctgatttaa

SEQ ID NO: 135495 - DNA, 879 bp, Enterobacter cloacae
atgacccttgttctcagcgcttttgccatgagcgctcacgcggcgctggatctgcgcgccaatgagcagccattgccggtcacccgcgacccgcaggcgatagcgaaaattccgccgggctatcgcttcgtcgagccggggacgctaacggtggcgatctcggcgctcaattcgccgccgctggccctgctggccagcgacaaccgcacgcggatcggtagcgacccggatatagcccgcctgctggccggaagccttggcctgaagctcaggctggtgcccaccgcgtgggaggactggccgctgggcatcgcctccggccgctacgatgtggcgctgatcaatatcgcggtaaccgagaagcgcaaagagaagttcgattttgcgacttaccgggtggactccctggccttctcggtgaaatccaccagcgatatcgccgcggtaaacggacccgccgatctcgcggggcgcaaagtgatcgtcgggtccggcaccaatcaggagcggatcctgctgggctggaacgaggacaaccgcgccgccggacggccgcaggcccagccggtctacctgaccgatgatgcctccggcaatctctatatccagtccgggcgggcggatatctttttcggcccgcagtcggtggcagcctataaagcggcgcttaacggccagacccgggtggtgggcctggggccgaaaaaagcgtgggtggcgacaaccaccaaaaaaggcaacggcctggtctatgccctgcaggcagccctcgacggggcgattgcccgcggtgaatatcagcaggtgctggcgcgttggggggagcagggcgaagcggtggcgcagtcggtggtcaacccgccggggataacctactaa

SEQ ID NO: 135496 - DNA, 780 bp, Enterobacter cloacae
atgcccagctctcataatggccatatctctatcaccggagtcagcaaatactatggccgccacaaggcgctggacgatgtgtcgctggagatccccccgggcacggtgacggtgatcctcggcccttccggttcgggcaagtccacgctgctgcgcaccataaatcacctcgaacgggtcgatgagggatttattcagattgacggcgactatatcggctatcgccgcaaaggcgacaagctgtatgagatgaaagaaaaggaaattcttcgccagcggatcaacgtcggctacgtgttccagaactttaacctgtttccgcacctgacggtgctggagaacctgattgaggcgccgatcgcccaccagcaggtcacgcgcaaagaggccattgcccgcgcctatgagctactggacgtcgtcggactgcgcaataaagccgacgcctggtcgcggcatctctccggcggccagcagcagcgtatcgccattgcccgggcgctggcgctgaacccgcgggtgatcctgtttgatgagcccacttcggcgctggatccggagctggtgggcgaggtgctggatgtgatcaaaaagctggcacgatcgggcaccaccctggtggtggtcacccatgagattggctttgcccgcgaggtggccgaccaggtggtgtttatggtcgacggcaggatcgtcgagcagggcagcagcgacgaggtgctcaaccatccgcagcatccgcgtacccggcagtttttatccagggtgctgccgtcatga

SEQ ID NO: 135497 - DNA, 927 bp, Enterobacter cloacae
atgcattcatctgaaacgatcaaagtggtgccggcgcgctatccgctgcgggtggtcggggctctggtcgccctgctggtgctggcggtggtgatccagtcggtggcctttaacccgcgctgggagtggggcgtcttcgcccgctggttcttcgacccggtgatcctcgaggggctggggcaaactctgctcctgaccctgctcggcacggtgttaagcgtgatcttcggcggcctgctggcgctggcccgtttgtcctcatcgtggctgctcagcagtctcgcctggggctatatctggctgtttcgctcgctgccgctgattgtggtgctgatcattctctataacttttcctatctctacgacaccctgtcgctggggatcccgtttaccggcgtcacctgggtcagctatcagaccattaacgtgctggggcaattctccacggcggtggtgggcctgaccctggtgcagagcgcctataccgcggagattattcgcggcggctttctcggcgtcgaccacgggcagtatgaagccgccgccgcgctggggctacccgcctggcggcgcacgctgcgcattattctgccgcaggcgctgcgcaccatcctgccatccggcttcaacgagatcatcagtctggccaagggaacggcgatggtgtacgtcctggcgatgccggaactgttctacaccatccagatgatctacaaccgtacccaggaggtgatcccgctgttgatggtcggcgccgcctggtatctggcgatcaccagcgtcctctccgccattcagtatctggtggaacggggcctggcgcgcagcgaacgccgctcggcggtaaacagcgcccgcagcagccgaaccactcaatccgcacgtcaagcgcagccgcaggaggccgttcatgcccagctctcataa

SEQ ID NO: 135498 - DNA, 510 bp, Enterobacter cloacae
atgagcgaagcattccgcgatatttctccggaggctccggagctgcagccgattattagcgggctgtttgccgaatatgccgcccgctacggcgactatttttcccgcgatgcggaagtggagttaagtgagtggtatgtgccgccgcaggggctgtttattgtccttgagcgtgagggcgaaattatcgccaccggcgcgtataagccgaaggatcgccacaccgcggagatcaaacgtatctggacgcaccgccgtctgcgccagcaggggctggcggcgaaggtggtccaggagctggagcgacgggcggtgctggccgggtacagccatatctacctgaccaccggtttccgtcagccggaggcggtaaagctctatctcagccaggggtatgaggcgcagtttgacctcacgcgagacccggaagagtacagtcagccgccgtacgatggccggctgcggttcactaaagcgctggtggtgagcgcctacagccacagcgcctga

SEQ ID NO: 135499 - DNA, 933 bp, Enterobacter cloacae
atgcagaaaacaacactcttgctggccgtcgcgttggcatttagcgcctcatcgtggggtcaggacgtcaagatcaatggcaccggagtgagcctggaggccaacaaaacgccgattcacacagcgaaaaatccgcaggccattgccctgttgccgcaagatctgcatctggcggtgccggggaaattcaccgtcgcggtggcggccctgaactctccgccgctgacggtctttgccgatgacaacaaaaccctgctcggcagcgaggcggatatcgcccggctggtggcggagagcctcgggctggaagtaaacgtggttcccacttcatgggaagactggccgctgggggtcacctccggcaaatatgatgccgcgatcagcaatattaccgtcaccaaagagcggaaagagaagttcgatttcgccacctaccgcaaagactcgctgggcttctacgtcaaaagcaccagtccgctgagcaagattgacaaagcggaagatatcgccgggctaaagattattgtcggctccggcaccaaccaggaggcgatcctgctggcgtggaacgcggagaacgtcaagaaggggctgaagccgtttatcccggtctacaccaaggatgatgccgcccagacgctggccctgcagaccggacgagccgacgccttcttcggccccaacgtgattggcgcgtggaaggcggcgctgaccggcaaaaccaaactggtgggtagtgtcgatggcggctggccgaaagcggcgcacatcgcggtaacgctgaaaaaagacagcgggctggtgaatgccgtccaggcggcgctgaacggggctatcgccagcggggactacgccaaagtgcttaaccgctggggcgaaggggtggaaagcattccgcaatcggaaatcaatccgcccggactgggcgactga

SEQ ID NO: 135500 - DNA, 1314 bp, Enterobacter cloacae
atgtctgaaaatcgacaattgcgtctgggaaccatattgcatggcgcatcgggaaatatgtccgcctggcgtcatccggcggcccaggcggacgccagtattaattttgatttcgtcacccagacggcgctaaaagcagaagcggggaagctggattttatttttgtcgccgacggtttatatattaacgaaaaatcgattccccattttttaaatcgcttcgaacccttaacggtactttccgcgctggccgcgatcacccggcgactggggctggtggggaccttatcgacttcgtacagcgagccgtttactaccgcccgccagttcgccagccttgaccatttaagccagggacgggcggggtggaacgtggtcacttccccgctggaagggtcggcgaaaaacttctcccgggcccaacatccggatcatgcgctgcgctatcgcattgccgatgaatatctgcaggtggtgaaaggcttatgggattcatgggaagaagacgcctttgtgcgcaataaggagactggccagttctttgataaaaataaactgcatacgctcgaccaccacggcgatttctttaaagttgccgggccgctgaatattgcccgcacgccgcagggccgaccgattattttccaggccggcgcgtcggatgacggcaaaaaattagccgcacgccacgccgatgccatttttacccatcaggactcgctggccgaggcgcaggcattttatcgggatgtcaaaagccaactcgccgcatatcagcgcagcccggaccaactgcatattttccagggcgtcagcgtcatcgtcggggatgacgccgaggacgcggagcggcagtaccagaccaccgcggcgttggtctccatcgaggatgcgctgaattatctcgggcgctatttcgaacaccatgacttttcgcagtacccgcttgatgaaccgttcccggatattggcgacctcggacaaaacagcttccgcagtaccaccgacgagattaaacgtcacgcccgcgagcggggcttaaccctgcgccaggtggccctggaggcagccagcccgcgtccgcgctttaccggcaccgccagcgatgtcgctgatggcctgcaactgtggttcgagcagcacgcggcggacggcttcattattcagggcggcacgccggaaaccttcccgcgctttgtggatgaggtggttccgctgttacaggcgcgcggactgttccgtcgcgactatccgggcaccaccctgcgggaaagtctgggtctggcgctacccgctaatcaattccaaaaataa

SEQ ID NO: 135501 - DNA, 1122 bp, Enterobacter cloacae
atgtcctttgaacaacaactgattagctggcggcgcgagctgcaccagaacccggagctctccctgcaggaggtggccaccaccgcgcggatccgcgactggctgcagagcggcgggctgaccctgctgccctacgatctgaaaaccgggctggtcgccgaagtcggcagcggcgacaaggtgattgccctgcgggcggacatcgacgcgttgcccatcgaggaggcgaccggtctgccttaccgctcgcagaatcaaggggtaatgcatgcctgcggccacgatattcacaccagcgtgatgctgggggcggcgctgctgctgaaggagcgggaagcggaactcccggggcgggtgcggatcctgtttcagccggcggaggaaaattttggcggggcgaaaaccctgatccgcgccggggcgctggaggaggtgtcggcgatctttggtatgcacaatgagcccggcctgccggtgggcgaatttgccacccgcggcggcgcgttctacgccaacgtcgaccgcttcgtcttcaaagtgaccgggaagggggcgcatgccgcccgcccacatgaaggaagggatgcgatcctgctggccagccagctggtgacggtgctgcagagcgtggccagcctggaggtgaacaccctcgactcggtggtgctcagcgtgacgcggatccagggaggcaatacctggaacgtgctgccggagagcgtcgagctggaggggacgctgcgcacccacagcagtgaagtgcagcagcgggtcaaggcccgggtcagcgagattgccgccggtttcgccagcgcctttggcgcgcagattgacgtattctggtacgccggcccgacggcgctggtcaacgacgcccgctgggccgatttcgccagcgaggtggcagcccaggccgggtatcgcacccaccatgccgatctgcatctcggcggcgaagattttgcggtctatcttcagcatattcccggggcgttcgtcagcatcggcagcgccagcgaatatggtttgcaccatccggcatttaatccggatgaacggctgattgcgcccgcggcgcactatttcgcccgtctcgcggaagaagcgttacaacacatttaa

SEQ ID NO: 135502 - DNA, 1008 bp, Enterobacter cloacae
atgtcttatcgaatcagtatcctggataaaagtccgcttgccgccggggaaaccgccgcgcaggcgctggcgcgtacattaacgctggcgcaacacgccgaagcctggggctaccaccgcttctgggtcgccgaacaccacaataccgatcagctggcgagcccctcgccggagctggttatcgcctggctgctgggccacacccggcggatccgtcttgggtccggcggcgtcatgctccagcactatagcccctataaggtcgcggaaaactttaacctgctggccgccctcgcgccgggccgcatcgatctcggggtcggcaaggcgcctggcggcctgccgctctccacccgtgccctgcagcagggcctgcatcaagaggagaaagggacctttgccgatcagctggcgcagctggataactggctgtcgctgactgagcccgggggagaggagagcctacgcgccacgccgatcccgccgcgccgggcagacggttttctgctcggcgccagcctggagagtgctgaactggccgcccgccttgactggaactttgtctttgccgcccatctcaatggcgacagcgcgctgcgccgtgccgtgttcaaccgctggcgcgagctcagtccgcgtgaggcgatggtcgccgtccaggtggtggttgctgacgatccggccaccgccgccgcgctggcgcagcaggtcgaggtgtggggcgtcgagctggagaacggccagcgggtgaccgtcggcagtgaggcgcaggccgtcgcttttgcccgccaggccggcagccgaccgacgcgcattgcccgccgtgaatcttcgctgatctccggtactcccgaacaggttaaaacccggcttgacgcgctgcaggcggaagaacagttggatgaactcatcattgatacccccattagcgacgggccagcgcgcctgcactctctgcgcctgctggcgcaggctcactacggcaaggaggtgctgaatgtcctttga

SEQ ID NO: 135503 - DNA, 552 bp, Enterobacter cloacae
atgaatatcaacgtggtcggcaccagcggctcaggcaaatccactttggcccggcgcctggcgcacaggctgggactaccctggatcgagctcgatcgcctgtactggcggccgaactggcagggcgcgccggatgaggcatttttcgccgccattgccgccgcgacggccacgccgggctgggtgctggatggcaattacaatcgcagccgcagcgttaaatggagtgcggtggatttggtgatctgggtagattatggtttctggcgcacgctgcgccaggcggtatggcgggcggcgagccgggcgtggcgacatcaggagctgtggccgggcacgggcaactgcgagagctttcgccgttcgttctgcagccgggaatccatcatcctctggacgctgaaaacctggcggcagcatcgccgacgctatctggccgatatgcaggatccgcaatatcgtcatattcgcttcgtccgggtgcgcaatccgcggcaggccgaggcgctgctccgcgagctggaagcgcagcgttcagccgggcatatctaa

SEQ ID NO: 135504 - DNA, 888 bp, Enterobacter cloacae
atgctaaaagagaacgtaaacgatctgctctcctttatggtggtggcgcgtgaacgcagctttacccgcgcggcggcccagcttggcgtgtcgcagtcggcgctcagccatgccatgcgccatctcgaaacgcggctcgatgtccggctgttgacccgcaccacccgcagcgtggtgccgaccgaagcgggcgagcgactgattcagcgcctcggtccgcatctggaagagatcgagcaggccctggctgcattgcgcgacacccgagaacgcccggcgggcaacctgcgcattaccgccggggagcatgccgccagcgcggtactctggccggcgctaaagccatttatgctgcaatatcctgatattaacatcgaaatcactgttgataatgggctcacggatatcgtgggtgaccgcttcgacgccggggtgcgtctcggcgaacaagtggcaaaagacatgattgccgtgcgcatcgccccggatatgcggatggcggtggtgggttcgccggcctatctgcagcgggccggtacgccgcaaacgccctgggatcttgcccaacatcgctgcatcaatctgcgcctgccgacacgagggggactttacgcctgggaatttgcccgcgatggccgggagattcaggtgcgggtggagggacagctgatcctcaacagcctgccgcagcgcatcgacgcggcggaggcgggcctcgggctggcctacgttccggatgactgcgtggcggaggccttagccagcggccggctggtgcgggtgctggcggagtggacccctgccttccccggctaccatctctattaccccagccggcgccagcataccagcgctttcacgctgttactggaaactctgcgacgctga

SEQ ID NO: 135505 - DNA, 1455 bp, Enterobacter cloacae
atgaatacgaaacacgaaaatgcagcggagcatcatgctgcaaaacgccactggcttaactcacatgaagcgggttatcacaaagcgatgggcaaccgtcaggtacagatgatcgccatcggcggcgctatcggtaccggtttgttcctcggcgccggggcacgtttacaaatggcagggccagcgctcgccctggtctatctggtctgcggcatcttctccttctttattcttcgcgccctcggcgaactggtcctccaccgcccctcgagcggcagcttcgtctcttatgccagggagttcctcggtgaaaaagccgcttacgtggccggctggatgtacttcgttaactgggcgatgaccgggattgtcgatatcaccgccgtggcgctgtatatgcactactggggcgcgtttggcgatgtgccgcagtgggtcttcgccctcggcgcgctggctattgtcggcaccatgaatatgatcggcgtgaagtggttcgccgaaatggagttctggttcgcgctggttaaggtgctggcgatcgtcgcctttctcgtggtcggcaccattttcctcggctccggtaagccgctggacggcaatgccaccggcttccatctgatcaccgataacggcggcttcttcccgcacggcctcctgccggcgctggtgctggtgcagggggtggtcttcgccttcgcctccatcgagctggtggggaccgcggccggagagtgtaaggatccggagacaatggtgccgaaggccatcaacagcgtgatctggcgtatcggtctgttctatgtcggttcggtggtgttgctggtgctgcttctgccgtggaacgcctaccaggccggacagagcccgttcgttaccttcttctcaaagctgggcgtgccatatatcggcagcgtgatgaacatcgtggtgttaaccgcggccctctccagccttaactcgggtctctacagtaccgggcgtattctgcgctcgatgtcgatgggaggctccgcgccgaagtttatgtcgaagatgagccgtcaccacgtcccttacgccgggatcctggcgacgctgggggtatatgtagtcggggttttcctcaactatctggtgccatctcaggtatttgagatcgtactcaacgtcgcctcgctggggatcattgcctcctggggctttatcgtggtgtgtcagatgcgtctgcgcaaagcgatcaaggaagggaaagcggcaaaggtcagcttcagaatgccgggggcgccgttcacctcctggctgacgctgctgttcctgttcagcgtgctggtgctgatggccttcgattatccgaacggtacctacaccataggatcaattccgctgctggcggtattgctggtggctggctggtttggtgtgcgtaaacgcgtgcatgagattcacagcacggcgccgacgctgaggaagtaa

SEQ ID NO: 135506 - DNA, 222 bp, Enterobacter cloacae
atgaaaaagccattcatggtgatttgcgccggcgcgatgctggcgctgctggcaggttgttcgtcaaactacgttatgaccacgaagagcggtcaaactatcgttacccacggcaagccgcagctggataaagaaacggggatgaccagctatatcgatgagtcaggtaataagcgggaaattaacagcagcgatgtgtcgcagctggttgaagataattaa

SEQ ID NO: 135507 - DNA, 234 bp, Enterobacter cloacae
gtgctgtttaacccggcgcgcaacgaagcctatgtgacgcatcgtaaggccggggaagtcagcgttatcgacggtaagagctacaaggtagtgaagacctttaaaacgccgactcaccccaacagcctggcgctctccgaggacggaaaaacgctgtacgttagcgtgaaacaggcttccagccgtgagaaagaagccaccgcgccggacgatgtgatccgcatcgccctgtaa

SEQ ID NO: 135508 - DNA, 909 bp, Enterobacter cloacae
  misc_feature (858)..(867): n is a, c, g, or t
atgtcattacgtcattttgccgcgccgcgtctgcgccattcactgctcgtcacttctctgctgctggcaggcagctttagcgcccacgccgcggaagagatgctgcgcaaggccgtcggaaaaggggcctacgaaatggcctacagccagcaggagaatgcgctgtgggtcgccacatcacagagtcgttcgctggacaaaggcggggtggtttaccgtcttgaccccaccaccctcgacgtgacgcagattattcacaacgatctgaagccgttcggcgccgctatcaaccatgccaccggcacgctgtggtttggcaataccgtcgacagcactgtcaccgctattgacgccaaaaccggcgccgtgaaggggcgcctggtgctggacgagcgtcagcgcagcgaaaccgtgcgtccgctgcagccgcgcgagctggcggtcaatgagcagaccaacacggtctacattaccggtctgggcaaagagagcgtgatttgggtggtagatggcgcaaccctgaagctgaaaacgaccattaccggcaccggggcaatggcgacgggtctggcgatcgatccgcaggctaagcgtctgtataccaccaacgccgatggcgaactgctgaccatcgacagtgagagcaacacgattgcgtcgcgcaaaaaattgcaggatgacggcaaagcgcatttctatcttaacctgagtctcgataccgccggccatcgtgcctttattaccgacagcaagcagccggaagtgctggtggtcgatacccgcgacggaaaggtgctggagaaaatcgccgcgccggagtcgctggcggtgctgtttaacccggcgcgcaacgaagcnnnnnnnnnntggcggtgctgtttaacccggcgcgcaacgaagcctatgtga

SEQ ID NO: 135509 - DNA, 2106 bp, Enterobacter cloacae
atgaaaatcctgtccgtgcgtcacgtcgccctcccggccctgctcttgccgctcattgccgcagcccaggccgctgatgaacaaaccatggtggtgaccgccgcgccaaccacggtttctgaactggatacccccgccgccgtcagcgtggtgaatggggatgagatgcgccaggccgcgccgcgcgtcaatctctctgaatcgctgggcgccgtgccgggcctgcaggtgcagaaccggcaaaactatgcccaggatctgcagctgtcgattcgcggctttggctcgcgctcaacctatggcgtgcgcggactgcgcatctatgtggatggcattccggccaccatgcccgacggccaggggcagacctcaaatattgatatcggcagcgttgacaccattgaggtgctgcgcggccccttctctgccctgtacggtaactcgtccggcggggtgatcaacgtcaccagccagaccggcacccagccgcccaccgtggaagccagcagctactatggcagcttcggcacctggcactacgggatgaaagccactggcgccgttggcgacggcagccacgcaggcgatgtggattacacggtctcaaccaatcgcttcaccacccatggctatcgcgatcacagcggcgcgcgcaaaaatctggagaacgcccggctgggggtgcgcatcaacgacgtcagtaagctgactctgctgctgaatagcgtggatatcaaagccaatgacgccggtggcctgaccgccgatgaatggcgcgataacccgcgccagtcgccgcgcggcgaccagtataatacccgcaagaatacccgacagacccaggccggcctgcgctatgagcgccagctcagtgcccaggacgatctcagcgttatgatgtacgctggagaacgtgaaaccactcagttccagtcgatcccgcgcgcgccgcagctgaagccgagccatgccggcggggtgatcgaccttacccgtcactaccaggggatcgatacccggctgacccatcgcggagagctgctggtgcccgtcacgctcaccgccggtctcgactacgaaaacatgagcgagcggcgcaaagggtatgaaaactttgtgatggtcaacggcgcgccgcagtatggcgaacagggcgcgctgcgccgtaacgaacgcaacctgatgtggaacgtcgacccctacctgcagacccagtggcagctcactgacaaactctcgctcgatgccggggttcgctacagctcggtatggttcgactcgaacgactactacatcaccccaggcaatggcgatgacagcggtgatgccagctatcacaaatggctgcccgcgggctcgctgaaatatgccctgaccgacgcgtggaacgtctatctttccgccggccgcggcttcgagacgccaaccattaacgaactctcctaccgctccgataaccagagcggcctcaacttcggcctgaaaccctccaccaacgacacggtggagatcggcagcaagacgcggatcggcaatgggctgttcaccgccgccctgttccagaccaataccgataatgagattgtggtcgacagcagcagcggcgggcgcaccagttataaaaacgccggcaagacccgccgtcaggggatggagctggggctggatcagcagtttggcgagagctggcgtctgaaggcggcctggacctggctggacgcgacctatcgcactaacgtctgcgacgacgccagctgcaatggcaatcgcattccggggatcgcgcgcaatatgggctacgcctcctttggctatcagccggagcaaggttggtacgccgggagcgatattcgctatatgagcgatatcatggccaatgacgaaaacaccgccaaagcgccctcctggacggtggttggcctgacgaccggctataaatggagctacggcaggatggatatggatctgttcggtcgcatcgacaacctgttcgaccgggagtacgtcgggtctgtcatcgttaacgagtctaacggacgttactacgagcctgccccgggacgtaactacggcatcggcctgaacctcgcctggcgcttcgaataa

SEQ ID NO: 135510 - DNA, 1707 bp, Enterobacter cloacae
atggataatgtcgtttatgcggactgcgtattgattaacggcaaggtcgccacggtggacgcacattttagttttaagcgcgccatcgccgtgaagcagggatggattattaacgttggtgaagaccaggagattcagcagcatattggtccccagacgcaggtcattgaccttggcggcaaactcattttacccgccgcgcatgactcacatatccatatcggctggctcgctgacagctggcattgcctgaactgccaggacgtgcgttccctggcagtactgcgggaaagactgcgcgaccaggcagcccgcactcccgccggggcatggattcgtgtctgcggtctggatccaaacgcaatcaaggagtgcgcggccgagcagcgctctctgacgcgctgggatattgacgacgtcacggccgatcatcccaccctgctcgccctgtgggacggtcactcctgcatcgtcaacagccgggcgctggccctctccggtcttgacgccagcccccctgatcccctcggcggacatctggggcgaacggccagtggcgaactggacggcaatttcatcgacctgcccgccctgcatctcgcatccggcacgatgccccgtctgaccgtagcggccctcaaagagaaccttctggcagcccagcgcctgatgaacagcgaagggtatgccagctacacggaaggcgccatgggtccgggggaaaacacgcgcgaggtgggcgctgcgggggatcgcgccatcgccgcctaccgtgaactgcaggatgaaggaaaactcaccgcccgggtatccatcgccttttactccgccgagcggggggttcaatcctgcgccaccctgaagcgcgatctggatagctttgatttctcccagttcaccgaccgggactggctggactgttggaccataaaactgttctgcgatggcgttcccacatcgcacacagcgtggatgaatcaggattacgccgaccggccgggatatcgcggacgctcggtgtttggtggccccgaggcgaccgaggaagcacaagttgaggcgctacagcagatgattctgctggctcaccagcggggttttcaggtggctgtccatgcggtcggcgataaggcggtaaaagtcacgattaacagcttcgtgcaggcgattcagcgctatccgggggagagccgacggcattatgtgctgcacggctcaatgggcgatcggcaagatttcgtgatggcggcaaaatacggcattctgctttccgaacaaccctcacccggcggcccggcatatgactatgaacagcgcgcccgctactgtggcatcaagggggaaatctgcaaagggctacgggatatcatcgaccttggggtcatcatcgccggcgggtcagatggcattatggcgctggtgaactggcgcaaaatggttcaggcagcggtcacccgcaaatcatcttccagcggcaaggttattcgcccggagctggcaattagcgtggcggacggcgtgcggatgtacaccatcaatgcggcctatcaggaagggaaagaagcggtacgcggatcgatagaggtcggcaaagtcgctgattttcaggtgctggaccgcgatatcttcgccgtagcccatgaggagattggcgccagccgcgtggtgatgactatggttggcggaaacgtcgtctttcaagactaa

SEQ ID NO: 135511 - DNA, 582 bp, Enterobacter cloacae
  misc_feature (379)..(388): n is a, c, g, or t
ttgctgcgaggcaacgcgtatcgttacgcgaccgtccgtaaacatggtgccacgttttgcggtggcgcaagatggcgcccggcgcgacgcgatataatagaaaaattgctaatccttacggatattaatggtttgcttttcggtgggcgggttcttatccttaagaaaactcaagaggttattacgatgaaagatgtagtagataaatgcagcaccaaaggctgcgccattgatgtcgggacgatcattgataacgaggactgcgtctaccgggccgagaaggtgttcccaagccgcgaagaagcggaatccaccgtagccgccgtgcgcgaacgtgctgccgccgcagcgccggccagtgaaccgccgcaggtcgatnnnnnnnnnngattacaccatcgtcgccgctggcgacgcggtgaaactcgacctctccatcgccttctcctgccaggcggaaaagatcattttcgagttatccctgcgaaatctgctttaattcgctcctgtagcggaagaacgttgcccctgacgggcagacgccttccgctggagcagcacgctgcccgcccggcgacctga

SEQ ID NO: 135512 - DNA, 936 bp, Enterobacter cloacae
atggcactgccgattatgattgattgcgatccgggacatgatgacgcgatcgccctggtcctcgccctcgcctcgccggagctggaggtgaaagccgtcaccgcttccgcgggcaaccagaccccggagaagaccctgcgcaacgtgctgcgtatgttgacgctgctgaaccggccggacattccggttgccggcggcgcgtggaagccgttgatgcgcgatctgatcatcgccgataacgtgcacggcgagagcggactggatggcccgagcctgcctgagccggcctttgcgccgcagaactgcaccgccgtcgaactgatggccagcgtgctgcgggaaagccaggagccggtgaccctggtggccaccgggccgcagactaacgtggcgttgctgctcgccagccatccggagctgcacgcgaagatcgcccgcatcgtgatcatggggggcgccatggggctgggcaactggcagccggcggcggagtttaatatctacgttgatccgcaggccgcggaaatggtctttcagtcggggatcccggtggtgatggcgggccttgacgtcacccataaggcgcaaatccttcccgccgatatcgagcgattccgccagattggcaacccggtgtcgaccatcgtcgccgagctgctcgacttctttatggcctaccacaaagatgaaaagtggggcttcgacggcgcgccgctgcacgatccctgcaccatcgcctggctcctcaagccggagatctttaccacgatcgaacgctgggttggcgtagaaacggaaggcaaatatacccaggggatgacggtggtcgattactaccatctgaccggcaatcggcccaataccaccctgatgctggatgtggaccgcgaagcctttgtcgatctgctcgcccagcggttagccttctacgcctga

SEQ ID NO: 135513 - DNA, 1038 bp, Enterobacter cloacae
atgacagatcaaccgcaacgccatcgccgctgggtactggcttcccgcccccatggtgaaccgacggcagagaatttccgcctggaagagagcgaagtgccgacgccaggcccgggtcaagtgctgctgcgtaccgtttatttatcgctcgacccgtatatgcgcgggcgcatgagcgacgcgccgtcctattcgccgccggtggccattggcgcggtgatggtgggagggaccgtgagtcgcgtggtcagctcaaatcatgccgattatcaacccggcgactgggtgctgggctacagcggctggcaggattatgaactctccgacggcagcggactggtgaagctgggtgacaatccgcaacacccgtcctggtcgctgggtgttctggggatgcccggcttcaccgcctacatgggtttgctggacatcggccagccaaaggcgggcgaaacgctggtggtcgccgcggcgaccgggccggttggcgccacggttggacagatcggcaaaattaagggctgccgcaccgtcggcatcgctggcggcgcggaaaaatgccgctatgcggttgagacgttaggctttgatctctgccttgaccatcgtgcggatgattttgccgaacagctggcccaggcctgcccgcagggtattgacgtttattatgaaaacgtcggcggcaaggtttttgacgcggtgctgccgctgttgaataccgcagcgcgggtacccgtctgcggactggtgagcggctataacgccaccgggctgccggacgggccagatcgtctgccgctgctgatggcgaccatcctcaaaaagcgcatccggatgcagggctttattatcggccaggattacgggcatcggatcgccgaattccagcagcagatggggcgctgggtgcaggaggggaaaattaaatatcgcgaacagctgatcgacggtctggaccaggcgccgcaggcgctgatcggtctgttaaaaggcgagaacttcggtaaggtagtgatccgcgtcgcggcggacgactag

SEQ ID NO: 135514 - DNA, 582 bp, Enterobacter cloacae
atgaatactatagaagacaacctcaatcagcgcatcagcgcgcgcatccgcatcgagcgcgagtcccgcggctggtcgctgaacgaccttgccgaacgggccggcgcctcgcgggcgatgatccataaaatcgagcgcggcgaaagcagcccgaccgcctcgatgctgggccgtctttccggcgccttcggcatcagtatgtcgaccctgatcgcccgcgcggaaatgcaggagggcaagctgctgcgctttgccagccagccggtatggcgcgacccgcaaagccactatctccgccgccacgtttcgccgcgcagcgatttgccgatcgatctggtgcagattgagctgccgcccggtagcgatgtgccgatgcccgctgcgtcctatgcgcttgcccgccagctaatctggctgcaacagggcgagctggtgtttgtcgaaggcaatacccgccatgagatgcaggcgggggattgtctggagcttggcccgcccaacgattgtcgctttattaatgaatccgcagagacctgcgtctatctggtggttcgccttaatcaatcgccatccggctcttaa

SEQ ID NO: 135515 - DNA, 519 bp, Enterobacter cloacae
atgtccattcgccctgccattaaagacgactgcgcggcgatcgccgagatctataaccatgccgtcgtccataccgccgccatctggaatgataaaactgtggataccgacaaccgcatcgcctggtttgaagcccgccagctggctggatttccggtactggtgagcgaggaagacggcgtcattaccggttattcctcgtttggcgactggcgggcgtttgacggctttcgccataccgtggagcattcggtgtacgttcatcccgaacatcaggggaaagggctgggccgcaagctgctggtcgccttgatcgccgaagcgcgacggctgaataaacatgtgatggtcgccggcatcgagtcgcagaatcacgcttcgctgcatctgcatgaaacgctgggctttatcaccaccgggcagatgccgcaggtgggcaccaaatttggccgctggctggatctgacctttatgcagctgcagctggatgcgcgtcaggacccggacggcaaagcatga

SEQ ID NO: 135516 - DNA, 450 bp, Enterobacter cloacae
atgaacgcgtcgctcactctcgccggcctgatcgccgccggcgttggcctggtagtgcagaacactctgatggtgcgcatcacccagtcggcgtcgacgatccttatcgctatgctgctcaattcgctggtcgggatcgttatcttcgtgacgatgttactgctgcgccagggcgtcgccggctttcaggagctagccctgagcgtgaaatggtggacgctgatccccggcctgctggggtcctttttcgtcttcgccagcatcagcggttatcaaaacgttggcgcggcgacgaccattgcggtactggtggccagccagctggtgggcgggttgatcatggatttagttcgcgcccacggcgtgccggtgcgggcgctgatcggaccgttatgcggggcggtgatgctggtggtgggcgcctggctggtggccagacgccagttctga

SEQ ID NO: 135517 - DNA, 234 bp, Enterobacter cloacae
atggcacatctggatgaggttatcgtcaaagtcgatgacgccctggccgagggcgttatcgcgcatatgaatgagctgctaatcgccctgagtgatgatgcgcaactcagtcgtgaggaacgctatatccaacagcagcgtctgcgcaccgccatcgcccatcatgggcgacagcatcaggaagagcaggacgcgcgccgcgagcagttgaccaaagggggcgcgatcctctga

SEQ ID NO: 135518 - DNA, 1599 bp, Enterobacter cloacae
atgtctacagggaaaaccacgctggcgctgctgctgagcgcactgctgccggccggcgccgcctgggccgcaggcaatgacactctggtctactgctcagaagcctctccggagtccttcaatccgcagatcgccagctccggtccgtcgttcgtcgccagctcgcaggtactgtataaccgtctggtgagctttgacccggtgaaaaatacgccgatcccgtcgctggccaccgagtggcacgtctctgaggatggcaaaacctggacctttactctgcgtcagggggtgaagttcaacagcaacaaattcttcaaaccgacccgcgattttaacgccgacgacgtcctgttctccgtgctgcgccagatggatcctcagcatccttatcacaaggtgtcgcaggggaactatgaatacttccacgacgtgggcctcgataagctgattaaatcggtgaaaaaggtggatgattaccatgtccagttcgagctcaacgagccgaacgcagcgtttcttgccgactggggcatggacttcgcctctattctgtcggcagagtatggtgaggcgatgctgaagaaaggaacgccggaaaacgttgataactggcctgtcggtaccgggccgtatgcgctgcagcagtataaagtggattcgcaaatccgctatattgccaatccccactactgggaaggcgaggtaccgaccaagcacttaatcttctccattacgccgaacgtcgagactcgtctggcgaaactgcagaccaacgagtgccagattattcccgcgccgtcgccggtacagttcccggtgattaagggcaataaagatctggcgctgcatgcggttgaggcgctgaacgtcggctatctggcgtttaacaccgagaaaaaaccgtttgataatgtgctggtgcgccaggcgttaaactacgctaccgacaagcaggcgatcgtcaaggcggtattcctcgattccggcagcgtggcgaaatcaccgatcccgtcgacgatgctcgggtataagaaagatctcccggactatgactacgatccgcagaaagccaaagcgctgctcaagcaggcgggtctggagcaaggcgcggaagtgaccctgtggtcaatgccggtccagcgcccctacaacccaaactcaaaacgcattgccgaaatgatccaaaacgactgggcgaaagtgggggtgaaagccaaaattgtcagctatgaatggggcgaataccttgccggtatgcgtaaaggggagcacgacagcgccctgtatggctggatgtcggacaacggcgatccggacaactttgctggcacattgctcagctgtgataatatccagaccggctccaacgccgcccgctggtgtgataaatcctatgacgcgctggtaaagaaagcgctgttggtgagcgatccgcaggcgcgggccaaactctacgaacaggcgcaggagattttttatcagcaggcgccatggatcaccctggcgaccgggaaaaccttctatgcgacgcgcagcaacgtcagcggctacaccgtcagcatgatggggagcgatttttccaaagcgaagctgaattaa

SEQ ID NO: 135519 - DNA, 1434 bp, Enterobacter cloacae
atgacaatcacctgcaatctgtacattgacggccagtggcacgatgccgaaggccgccgcacctttacccgacgccacccggcccacgatgaggcagcctcggtggccgctgccgccagcctcgccgacggcaaacgctgcgtcgaagccgcggcctgcgcctttccgctgtggcgcgatactgcgccggcggaacgacgtcgcttactgctcgaggcggcggaacagatgctgttgcgggaggcgaaatttatcgccgccatggcggcggagaccggcgcgaccgcgcactgggccggatttaacgttcatctggcggcagatattctgcgtgaagcggcggcgctgaccacccagattgaagggcaaataattccgtccaacgtgccgggtaacctggcgatgggcgtccgccagggggcgggagtggtgctgggcatggcgccgtggaacgcgccgctgattctggccacccgggccctggcgacgccgctggcctgtggcaacacggtgatccttaaaggcgccgaacttccccccgccactcagggactgattatcgacgcccttgacgcggcgggcttcccgccgggcgtggtgaactatcttacctgtgcgcctgaagatgcgccggcgctggtggaatcgctgatcgcccacccggcggtgcggcgcgttaactttaccggctccacaccggtgggacgcattatcgcccgcacctgcggacagtatctgaaaccagcggtgctcgagctcggtggaaaagcgcccctgctggtgctggacgatgctgatattgagcaagcggcagcgggcgctgtttttggcgccttcgccaacgccgggcagatctgcatgtccaccgagcgcattattgtcgacaatgccgtagcggaggcgtttatcccgctgctggccaggcgcgccgccgccctgcctgccgccctcacgggcccggttgtcgatatgaacaccatcgcccgctgcaacgcgctcattgacgatgcgttagcgaaaggcgctcgcctgctgaccggtggtagagccaacgatacccatatgagcccgaccctgctggacggcgtgacccgcgagatgcgcctgtggcgtgaagagtccttcggtccggtgaaagcgattattcgcgttcatagcgaagaggaggcgctggcggtggccaacgacagcgagtatggtctttccgctgcggtctacagccgcgacagcgccagagcgtggaacgtagcgcaacgtctgcataccgggatttgccatatcaatggcccaacggtgcatgatgaggcgcaaatgccgtttggcggctgcaaagcctccggctatggccgctttggcgggcgggccgggatcgcggaattcaccgagctgcgctggataacgatccagacccagtcccgcgagcttcccttctga

SEQ ID NO: 135520 - DNA, 213 bp, Enterobacter cloacae
atgcaacaagaagcattaggaatggtagaaaccaaaggcttaaccgcagccatagaggccgctgacgcaatggttaagtcggccaacgttttattagttggctatgaaaggatcggttcaggcctggtgcagcgggaagtgaaagccgtacacgtcattccccgcccccataccgatgttgaaaaaatcttaccgaaggggaatagccaatga

SEQ ID NO: 135521 - DNA, 813 bp, Enterobacter cloacae
atgagcagcaatgagctggttgaacagatcatggcgcaagtcatagcccgtgtagcgacgccagagcagcaggcgcttcccgataccccccatcccacaggagagacggctatggcagagaaaagctgcagcttaacggaatttgtcgggaccgccattggcgacaccctcgggctggtcatcgccaacgtggatgccgcgttgctggaggcgatgaagctcgaaaaacgctatcgctctatcggcatcctcggcgcccgcaccggcgccgggccgcacatcatggccgccgatgaagcggtcaaagccaccaacaccgaagtggtcagcattgagcttcctcgcgacaccaaaggcggcgccggccatggctcgctgattgtgctgggcgggaatgatgtttccgacgtcaaacgcgggattgaggtcgcgctgaaagagctggaccgtaccttcggcgatgtctacggcaacgaagcgggtcatattgagctgcagtataccgcgcgcgccagttatgccctggaaaaagcgttcggcgccccactgggccgcgcctgcggcattatcgtcggcgccccggcgtccgttggcgtgctgatggccgataccgcgctgaaatcagccaacgtcgaggtggtggcttacagctcaccggcccacggcaccagtttcagcaacgaagccattctggtgatttccggcgactccggcgcggtgcgccaggcggtgatctccgcccgggaaatcggcaaaaccgtactggcgacgctgggcgccgaaccgaaaaacgatcgcccctcctacatttaa

SEQ ID NO: 135522 - DNA, 1665 bp, Enterobacter cloacae
atgagatcgaaaagatttgaagcactggcgaaacgccctgtgaatcaggatggtttcgttaaggagtggattgaagagggctttatcgcgatggaaagccctaacgatcccaaaccttctatccgcatcgtcaacggcgcggtgaccgaactcgacggtaaaccggttgagcagttcgacctgattgaccactttatcgcgcgctacggcattaatctcgcccgggccgaagaagtgatggccatggattcggttaagctcgccaacatgctctgcgacccgaacgttaaacgcagcgacatcgtgccgctcactaccgcgatgaccccggcgaaaatcgtggaagtggtgtcgcatatgaacgtggtcgagatgatgatggcgatgcaaaaaatgcgcgcccgccgcacgccgtcccagcaggcgcatgtcactaatatcaaagataatccggtacagattgccgccgacgccgctgaaggcgcatggcgcggctttgacgagcaggagaccaccgtcgctgtggcgcgctacgcgccgttcaacgccatcgccctgctggtgggttcacaggttggccgccccggcgtcctcacccagtgttcgctggaagaagccaccgagctgaaactgggcatgctgggccacacctgctatgccgaaaccatttcggtgtacggtacagaaccggtgtttaccgatggcgatgacactccatggtcgaaaggcttcctcgcctcctcctacgcctcgcgcggtctgaaaatgcgctttacctccggttccggttctgaagtacagatgggctatgccgaaggcaaatcgatgctttatctcgaagcgcgctgcatctacatcaccaaagccgccggggtgcaaggcctgcagaatggctccgtcagctgtatcggcgtaccgtccgccgtgccgtccgggatccgcgccgtactggcggaaaacctgatctgctcagcgctggatctggagtgcgcctccagcaacgatcaaacctttacccactcggatatgcggcgtaccgcgcgtctgctgatgcagttcctgccaggcaccgacttcatctcctccggttactcggcggtgccgaactacgacaacatgttcgccggttccaacgaagatgccgaagacttcgatgactacaacgtgatccagcgcgacctgaaggtcgatggcggcctgcggccggtgcgtgaagaggacgtgatcgccattcgcaacaaagccgcccgcgcgctgcaggcggtatttgccggcatgggtttgccgcctattacggatgaagaagtagaagccgccacctacgcccacggttcaaaagatatgcctgagcgcaatatcgtcgaggacatcaagtttgctcaggagatcatcaacaagaaccgcaacggcctggaggtggtgaaagccctggcgaaaggcggcttccccgatgtcgcccaggacatgctcaatattcagaaagccaagctcaccggcgactacctgcatacctccgccatcattgttggcgagggccaggtgctctcggccgtgaatgacgtgaacgattatgccggtccggcaacaggctaccgcctgcaaggcgagcgctgggaagagattaaaaatatcccgggcgcgctcgatcccaatgaacttggctaa

SEQ ID NO: 135523 - DNA, 690 bp, Enterobacter cloacae
atggaaattaacgaaacgctgctgcgccagattatcgaagaggtgctgtcggagatgaaatcaggcgcagataagccggtctcctttagcgcgcctgcggcttctgtcgcctctgccgcaccggtcgccgttgcgcctgtgtccggcgacagcttcctgacggaaatcggcgaagccaaacccggcacgcagcaggatgaagtcattattgccgtcgggccagcgtttggtctggcgcaaaccgccaatatcgtcggcattccgcataaaaatattctgcgcgaagtgatcgctggcattgaggaagaaggcatcaaagcccgggtgatccgctgctttaagtcttctgacgtcgccttcgtggcagtggaaggcaaccgcctgagcggctccggcatctcgatcggtattcagtcgaaaggcaccaccgtcatccaccagcgcggcctgccgccgctttccaatctggaactcttcccgcaggcgccgctgctgacgctggaaacctaccgtcagattggcaaaaacgccgcgcgctacgccaaacgcgagtcaccgcagccggtgccgacgcttaacgatcagatggctcgtcccaaataccaggcgaagtcggccattttgcacattaaagagaccaaatacgtggtgacgggcaaaaacccgcaggaactgcgcgtggcgctttaa

SEQ ID NO: 135524 - DNA, 525 bp, Enterobacter cloacae
atgaataccgacacaattgaatccatggtacgcgacgtgctgagccggatgaacagcctacaggacgggataacgcccgcaccagccgcgccgacaaacgacaccgttcgccagccaaaagttagcgactacccgttagcgacccgccatccggagtgggtcaaaaccgctaccaataaaacgctcgatgacctgacgctggagaacgtattaagcgatcgcgttacggcgcaggacatgcgcatcactccggaaacgctgcgtatgcaggcggcgatcgctcaggatgccggacgcgatcggctggcgatgaactttgagcgggccgcagagctcaccgcggttcccgacgaccgaatccttgagatctacaacgccctgcgcccataccgttccacccaggtggagctactggcgatcgctgatgacctcgagcatcgctaccaggcacgactctgtgccgcctttgttcgggaagcggccgggctgtacatcgagcgtaagaaactgaaaggcgacgattaa

SEQ ID NO: 135525 - DNA, 1506 bp, Enterobacter cloacae
  misc_feature (1427)..(1436): n is a, c, g, or t
atgcgctatatcgctggcattgatattggcaactcctcgacagaagtcgccctggcgacggtcgatgacgcaggtgtgctgaacattcgccacagcgcgttggctgaaaccacgggtataaaaggcacattacgaaatgtgttcggtatccaggaggcgctaacgcaggcggcaaaagcggccggcattcagctcagcgatatttcgcttattcgcattaacgaagccacgccggtcattggcgatgtggcgatggaaaccatcacggaaaccatcatcaccgagtccaccatgatcggccataacccgaagacacccggcggcgtcggactgggggtcggcatcaccatcacaccagaggcgctgctgtcctgctccgcgggcactccctatattctggtggtctcctcggcctttgactttgccgatgtcgccgcgatggtcaatgcggcaacggcagcgggctatcagataaccggcattattttgcagcaggatgacggcgtgctggtcaataaccggctacagcaaccgctaccggtgatcgacgaagttcagcatatcgaccggattccacttggcatgctggcggccgtcgaggtcgctttacccggtaagatcatcgaaacgctctccaacccctacggtattgcgaccgttttcgatctcaatgccgaggagaccaaaaatatcgtgccaatggcgcgggcgctgattggcaaccgctcggccgtggtggtgaaaaccccctccggcgacgtcaaggcccgcgctattccggcaggtaatctgctgctcatcgctcaggggcgcagcgtacaggttgatgtggccgccggggcggaagccatcatgaaagtggttgacggctgcggcaaactggacaacgtcgcgggagaagcgggcaccaatatcggcggcatgcttgagcacgtgcgccagaccatggcggagcttaccaataagccagctcaggagatccgcattcaggatctgctggccgttgatacggcggtgccagtcagcgtgaccggcggtcttgcgggagagttctcgctggagcaggcggtgggtatcgcctcgatggtcaagtcggatcgcctgcagatggccctcatcgcccgtgaaattgagcacaaactgcagattgcggttcaggtgggcggcgccgaagcggaggcggccattcttggggcgctcaccactcccggcaccacgcgcccgctggcgatcctcgatctgggcgccgggtcgaccgacgcctccattatcaatgcgcagggagagatcagcgccactcacctggccggcgccggcgatatggtcacgatgatcatcgcccgcgagctggggcttgaggaccgctacctggcggaagagatcaaaaaatatccgctggcaaaagtcgaaagcctgtttcatctgcnnnnnnnnnngaagacggcagcgtccagttttttccgtcggccttaccaccgacggtatttgcccgcgtctgcgtggtga

SEQ ID NO: 135526 - DNA, 336 bp, Enterobacter cloacae
gtgaaaccggatgaactggttcccctgcccggcgatctgccgctggagaaagtgcgcgccattcgccgtagcgccaaatcacgcgtctttgtcaccaacgccctgcgagcgttacgccaggtgagccctaccggcaacattcgcgacatcccgttcgtggtgctggtgggcggctcgtccctcgatttcgagatcccccagctggtcaccgacgcgctggcgcactaccggctggttgccgggcgcggcaatatccgcggctgtgaaggcccacgcaatgcggtcgccagcggattactcctttcctggcaaaaaggaggcacacatggagagtag

SEQ ID NO: 135527 - DNA, 351 bp, Enterobacter cloacae
atggagagtagcgtagtcgcccccgccatcgtcattgccgtcactgacgaatgcagcgaacagtggcgcgatgtcctgctgggcattgaagaggaaggcattccttttgttctgcagccgcagaccggcggcgatcttatccatcacgcctggcaggcggcgcagcgttcgccgctgcaggtaggcatcgcctgcgaccgggaacggctcatcgtgcactacaaaaatttacccgcatcaactccgctgttttcgctgatgtatcaccagaacaggctggcccggcgaaacactggcaacaatgcggctcgtctcgtcaaagggatcccatttcgggatcgccatgcttaa

SEQ ID NO: 135528 - DNA, 276 bp, Enterobacter cloacae
atgaataacgcactaggactggttgaaacgaaaggcctggttggcgccattgaagccgctgatgcaatggtgaaatccgccaacgtgcagttgattggttacgaaaaaattggctccgggctgattaccgtgatggttcgcggagacgtcggcgcggtcaaagccgccgttgacgccggcagcgcggcggccagcgtggtcggcgaggtcaagtccagccatgtgatcccgcgcccgcatagcgatgttgaggccattctgccgaaatccgtctga

SEQ ID NO: 135529 - DNA, 447 bp, Enterobacter cloacae
gtgaagcaatcactgggattacttgaggtcagcggtctggccctggccatcacctgcgccgacgctatggcgaaagcggccgccatcacgctgctcgccctggaaaagaccaacggttccggctggatggtggtgaagatcgccggtgatgtggcctctgtccaggcggcggtgatgaccggggccgaactcgccgaacggcagcaggggctggtagcgcagaaggttatcgccaggcccggggaaggcctgctgccggcccgcgtccaggcgccttcgccagcgcctgacgtcgccgtgacggaggagaacacggccctcacagacgccccctcccactctacggagcgggtgacctgcaacctgtgcctggacccacactgcccacgacaaaaaggcgatccccgctcgcagtgcctgcacgccggtaaacgaggtgacgcgtaa

SEQ ID NO: 135530 - DNA, 633 bp, Enterobacter cloacae
atggataaacaacagctggcttcgacagtccacaaagtgctggatgagatgcgccagcgtcccattccaatcggtatctccagtcgccatatccatttagcggcggctgactatgccaggctttttcccgcgcagcccatccagccgaaaaaagcgctgctgcagccgggacaatatgctgcagagcagacggtgaccctggttggccccaaagggcgattaaacaacgtgcgcctgctcggccctttgcgccagaccagtcaggtggaaatctcacgcaccgacgcccggatcctcggtatcgccgcgccgctgcgcatgtccggcaatctgcagggcacgccggggatccgcctgataagcccctttgccgaactggagttgagcggcgggacgattgttgcccagcgacatattcatatgtcgccacttgatgcgttgatcctgcgcgtctcccatggcgataacgtcgcggtggcgatcgaaggcagcgacaggcggcttatcttcgacaacgtggcggtccgcgttgccccggatatgcgtcttgagatgcacatcgatactgacgaagccaatgcggcaggcgctgacgctgcgcaagcctgggcaacgctggtgacgaagccatga

SEQ ID NO: 135531 - DNA, 345 bp, Enterobacter cloacae
gtgcaggtggatttaccgctgctggagcagcttgccggccagcgtgcgctggcggcagccggttgcgcactgcatgaggcgatggcctggggcgttcgggtacagctaacgctgcttcccgcccagctccccgcgctggcggtaaaaaaactcgcccgcttgccgctgacgttcagcgacccgcttggccagcccgtcaggcttcacgccgcgtcggtgctcacctatgccgacgtagcccgtttcagtggcggctatctggtgctgcgccgccgccccattatcaccgccctcgcccgcgaagcggccgtcgcgcggcatgttcaattgattaagcaggagtga

SEQ ID NO: 135532 - DNA, 276 bp, Enterobacter cloacae
atgcatctggcacgcgtgaccggcgccgtcgtctcgacgcaaaaatcgccctctctgaacggcaaaaaactgctgctggtgcgccgggtaagcgcggacgacgatcgtccgattctccccacgagcggcgatgaagtggcggtagattcggttggcgctggcgtcggcgagctggtgctgctctgcagcggctcgagcgcacgccacgttttcagcggcccgaatgaggccatcgatcttgccgtcgtgggcattgttgactcactttcacgctaa

SEQ ID NO: 135533 - DNA, 1017 bp, Enterobacter cloacae
gtggctatctatacccgaaccggcgatgccggcagtacatcactctttaccggccagcgggtcagcaagacgcatccgcgcgtcgaagcctacggcaccctggatgaactgaacgccatgctgagcctgtgcgtctgcgccgtcgctgaagaggaacagcgcaccctgctcgaagccctgcagcagcacattttttggttcagcgcggagctcgccagcgacagcgaacagccatcaccgggtaagcgctatatcagcagcgaagagattgccctgctggagcagaccatcgatcgcgagatggcccgcgtgccggagctgcaccagtttgtattgcccggacgctgtgaagccgccagccgtctgcacctggcccgcaccgttgccagacgggcggagcgccggctggtcgagctggcggcagaggttactatccgtcagatactgctgcgttatctgaaccgcttatctgactgcctgtatgccctggcgcgcagcgaggatcatgccgctcaccagcgccgccttgtgacggagatcgcgacccgatatctggccgccagcaggtcgcctgcgcccgacgcgcccaaagcccaggccgggtcgctctcctttcacgagctgcatcagctcatccgtcaggccattgaacacgcccgccagctgcaggtgccggtggtgatcagcatcgttgacgcacacggcaccgaaaccgtgacctggcgaatgcccgatgcgctgctggtcagcagcgagctggcgccgaaaaaagcctggaccgccgtcgccatgaaaaccgccacccacgagctcgcgacgaccgtacagccaggcgctgcgctgtacggtctggagagccatctgcagggcaaagttgtcacctttggcggcggatatccgctgtggcgcgatggccagctaatagccggcctcggcattagcggcggcagcgtcgagcaggatatggctattgcacaggctgccatggcggccattaacgtgagaactcatcaatga

SEQ ID NO: 135534 - DNA, 291 bp, Enterobacter cloacae
  misc_feature (201)..(210): n is a, c, g, or t
atgaatacagcagaactggaaacccttatccgcaccatcctcagtgaaaagctcgcgccgacgccccctgcccctcagcaagagcagggcattttctgcgatgtcggcagcgccatcgacgccgctcatcaggcttttctccgctatcagcagtgtccgctaaaaacccgcagcgccattatcagcgccctgcgggagacnnnnnnnnnngcgggagacgctggcccccgagctggcgacgttggcggaagagagcgccacggaaaccggcatgggcaacaaagaagataa

SEQ ID NO: 135535 - DNA, 1137 bp, Enterobacter cloacae
atgggcaacaaagaagataaatatctgaaaaataaagccgctcttgaaaacacgccgggcatagaggatctcactaccagcgccctcaccggcgatggcgggatggtgctgtttgagtactcgccgttcggggttattggcgccgtggcgcccagcaccaacccaacggaaaccattatcaacaacagtatcagcatgctggcggcgggtaacagcgtctatttcagcccccatcccggcgcgaaaaaggtctcgttgaagcttatcgccaggatcgaagagatcgcctaccgctgcagcgggatccgtaacctggtggtgaccgttgccgagccgacctttgaagccacccagcaaatgatgtcccacccgctgattgccgttctggctatcaccggcggccctggcattgtggcgatgggcatgaaaagcggtaaaaaagtgatcggcgctggcgccggcaatccgccgtgcatcgttgatgaaaccgccgatctcgtcaaagccgccgaagatatcatcagcggcgccgccttcgattacaacctgccctgtatcgccgaaaaaagcctgatcgtcgtcgcctccgtcgctgaccgcctgatccagcagatgcaggattttgacgcgctgctgttgagccgacaggaggccgataccctgcgtgccgtctgcctgcccgacggcgcggcgaataaaaaactggtcggtaaaagcccggctgcgctgctggcggcggcgggtctcgccgttccgcctcgcccccctcgcctgctgatagccgaggtggaggcgaacgacccctgggtgacctgcgagcagctgatgccggtgctgccgatcgtcagggtcgccgactttgacagcgccctggcgctggccctgcgcgttgaggagggtctgcaccacaccgccattatgcactcgcagaatgtctcgcggctcaatctggcggcacgcacgctgcagacctccatttttgtcaaaaatggcccgtcttacgcgggaatcggcgtcggcggcgaagggtttaccaccttcaccatcgccacgccaaccggagaaggcaccacctccgcgcggacgttcgcccgcctgcggcgctgcgtgttgaccaacggtttttccattcgctaa

SEQ ID NO: 135536 - DNA, 1113 bp, Enterobacter cloacae
atgcataccttttctctgcaaacgcgcctctacagcggcccgggcagcctggccgcgctgcagcgctttagccatcagcacatctggatcgtctgcgacggcttcctggcgcgctcgccgctgcttgaccgactgcgcgccgcgctgcccgccagcaaccgcgtcagcgtgttcagcgatattacgccggatccgaccattcacaccgtggcgaaagggatagcgcagatgcaggccctgcgtccgcaggtggtgatcggcttcggcggcggctcggcgatggatgccgccaaggctatcgtctggttcagccagcagggcggtctgcctgtcgacacctgcgtggcgatccccaccaccagcggtaccggttcggaagtgaccagcgcctgcgtcatcagcgacccggaaaaagggatcaagtacccgctgttccatgaggcgctctgtcccgacatggcgatcatcgacccgacgctggtggttagcgtaccgcccaccatcacagcccataccgggctggacgcgctgacccacgccctggaggcatgggtctcgccgcaggccaccgattttaccgatgcgctggcggaaaaggccgtaaggctggtgtttcgcgccctgcccgttgcgattcgtcagggcgactgcattgcgacccgcagcaaaatgcacaatgcatcaaccctcgccggtatggcctttagccaggctggccttgggctcaatcatgcgatcgcccatcagcttggcggccagtttcacctcccccatggcctggccaatgcgctgctgctgaccgcggtgatccgcttcaatgccagcgagccgcgagcggctaagcgctatgcgcgcctggccagggcctgccgcttctgcccgcccgcagctggcgaacaggaggctttccaggcgctgcttaccgcggtggaaacgctgaaacagcagtgcgccattcccaccctcaagggcgcgctgcaggaaaagtatccccttttcttatcgcgaattcccgccatggtgccggccgcgctggccgacgccaccctgcgcaccaacccgcgtccggtcgatggcgcggccatcgcgcaactgctggagaacctgcaatga

SEQ ID NO: 135537 - DNA, 1353 bp, Enterobacter cloacae
atgagtgaagcgatagtgccactatcaagcattgatgcagcggagatccgcgaacgcgttcgggccgctggcgtcgtaggagccggtggcgcaggctttccgacccacatcaaactgcaggcccgggtggacaccgtgctggtgaacgccgccgaatgcgaaccgatgctgaaggttgaccaacagctgatggctcagcaggctgaccgactgattcgcggcctgggttacgcgatgaccgccactggcgcccgggaagggatcattgccctgaaggcgaaatatgctccggcgattgcggcactaaccccacgactcccggaatgggcccggctgcatattctgcctgacgtctatccggccggggatgaggtgctcactatctggctggcgacgggacgccgcgtaccacctgccgcgctgccggtcagcgtcggcgtggtggtcaataacgtgcagacggtgctcaatatcgccagagccgtggaacagggctatccggtgactcgccggacgttgaccgtcaatggcgccgtcgcccgtccgctgacgctggccgtaccactgggtatatcgctgcgcgaggtgctggatctggccggcggcgcgacggttgacgatccggggtttatcaacggcggtccgatgatgggctcgcttattacctccctcgagacaccggtcaccaaaaccaccggcggcctgctggtgctcccgggcaaccatccattgatccagcgacggcggcaggatgaacgaacgctgctcgccatcgcccgcaccgtctgtgaacagtgccgtttatgcacagatttatgcccccggcacctgatcggccatgagctttcccctcatctgctggtgcgggcggtgaactatcgccaggcggccaccccatcgctgctgctcagcgccctgacctgttcggagtgcaacgtttgcgagagcgtcgcctgcccggtgggtatttcccccatgcgcatcaaccgtctgctgaaacgtgagctgagggcgaaaaacctgcgctacgacggaccgctgcgtccggcggacgagatggcgaagcaccgcctggtgccggtcaagcggctcatcagcaaactgggacttgatccctggtatcaggaagcgccgctgacggcggtggaaccggaggtggcctgcgtcaccctgcccctgcgccagcatatcggcatcagcgccgtgccctgcgtcgcgccgggagagcgggtaacgcgcggccaggtgctggcggatatccccgccgacgccctcggcgcgccggtgcacgccagtattgacggcctggtctccgccatcacggagcaggccattacgcttgtaagaggttaa

SEQ ID NO: 135538 - DNA, 555 bp, Enterobacter cloacae
atgacccaggctatcggaattttagaactgaccagcatcgccagggggatggagctgggcgacgtcatgctgaaaagcgcgaacgtacagctcctgctctgcagaaccctttgccccgggaaattcctgctgatgctcggcggcgacgtcggcgccgtgcagcaggcaatcgccgccggcaccgcgcgcgccggggagatgctggtggacagcctggtgctggccaacattcaccccagcgtactaccggcgatcagcggtctcaacgtggtcgggcagcggcaggcggcggggatcgtcgaaacctggagcgtggcggcgtgcatcagcgccgccgaccgagcggtgaaagcggccaacgtcatcctggtgcgggtccatatggcgtttggtatcggcggcaaatgctacatggtggtggcgggtgatatcgccgatgtcgacaacgccgtcacggtggccagcgacagcgcaggcgagaaaggattactggttcaccgggcagtgatcccgcgaccgcacgatgcgctgtggcaacagctgatggagggataa

SEQ ID NO: 135539 - DNA, 351 bp, Enterobacter cloacae
atggaaccgcaaacccctaccgaacgcatgatccaggagtatgtcccgggcaaacaggtcactctggcgcatctcattgccaatcctggcaaagatctgttcaaaaagctgggtctgccggacgcggtctccgccatcggcattcttaccattacccccagtgaagcatcgattatcgcctgcgacatcgctaccaagtccggcgcggtggagatcggttttctcgatcgcttcaccggcgcggtggtgttgaccggcgatgtctccgccgtggagtacgcgctcaggcaggtcacccgcaccctcggtgagctgatgcgcttcaccgcctgcccaattacccggacctga

SEQ ID NO: 135540 - DNA, 441 bp, Enterobacter cloacae
atgaaacgcctgatgctaatcggacccagccagtgcggcaaaacctcgctgacccaggtattgcgtggcgaaaccctgcgctatcagaaaacccaggccatcgtctggacgccggccgccatcgatacccccggggaatatctggaaaaccgctgcctgtacagtgcactgctcaccagcgcctgcgaggccgatgtcatcgcgctggtactaaatgccgatgcgccctggtcacctttttctccggggtttaccgccccgatgaaccgcccggtcatcggggtgatcactaaagccgatttggccgccccgccccgtctgcaacaggtccggacatggctcgagacggcgggcgccggacatatctttatcaccagcgcgttaaccggcgacgggcttgatgacctgttcgcctgcctgaatgcagaggaatatcaatga

SEQ ID NO: 135541 - DNA, 1230 bp, Enterobacter cloacae
  misc_feature (778)..(787): n is a, c, g, or t
atgacctataaaatcatggcgattaacgccggcagctcctccctgaagtttcagctgcttaacatgccgcagggggcgttgctctgtcaggggttgatcgaacgtatcggcctgcccgaggcccgcttcacgctgaaaacgtcggcacagaaatggcaggagacgctgcccatcgccgatcaccatgaggcagtgaccctcctgctggaggcgctgaccggccgcgggatcctgagcagcctgcaggagatcgacggcgttggccaccgcgtcgcccacggcggcgaacgcttcaaagacgccgcgctggtctgcgacgataccctgcgggagatcgagcgcctggcggagctggcgccgttgcataacccggtcaatgcgctgggcatacgtctctttcgccagctgttacccgcggtaccggcggtggcggtttttgataccgcctttcaccagaccctggcgccggaggcctggctctatcccctcccctggcgctattacgccgagctgggcattcgccgctacggttttcacggtaccagccatcactatgtcagcagcgcgctggcggaaaagctgggcgtaccgctgagcgccctgcgggtagtaagctgccatctgggcaatggctgtagcgtctgcgccatcaaaggcgggcaatcggtgaatacctcaatgggctttaccccgcagtccggggtgatgatgggcacccgcagcggcgatctcgacccgtcgattcttccctggctggtggagaaagaagggaaatccnnnnnnnnnnaatccgcccagcagctcagccagttgctgaataatgaatccgggctgcttggcgtctccggcgtgtcctctgattaccgcgacgtcgaacaggcagctgacgccggcaacgaacgggcggctctggcgctgtcgctgtttgccgaacgcattcgcgcgactatcggcagctatatcatgcagatgggaggtctggacgcgctgatctttaccggcggcataggcgagaattccgcccgtgcgcgggcggcgatctgccgcaatttgcattttctcggcctcgcgctggacgacgagaaaaaccagcggagcgcgacctttattcaggcggataatgcgctggtcaaagtggcggtgatcaataccaatgaagagctaatgattgcccgcgacgtcatgcgtcttgcattgccgcaggcgcgcgagctggcggtgtcggcataa

SEQ ID NO: 135542 - DNA, 903 bp, Enterobacter cloacae
atgcgccctggcgaaggtaagcggaaaggtgaaaacgtggctgttgcacaatgtcccgcctcgtgcggagaacttatccagggctggatcctcggcagcgaaaagctggtctcctgtccggtggactggtacagcaccgtcgaggtcgagaccggggtaccgcgaaaagacgagcggccgctgtcgcgggcgatggtcgaccagctgctggcccactggggctaccccccagcgctgagccagcagatccgcatcaccctgcactcaacgatcccggtggccaaagggatggccagcagcaccgccgatatcgctgccaccgccgtcgccaccgcccatcatctgggccatctactggatgagccgacgctggcgcgcctgtgcgtcgcgctggagcctaccgacagcaccctgtttcgccagctgacgctgttcgaccataataccgccgccacgcaaatcgcctgtccccctccgccggcgctcgacctgttagtgctggagagcccgctgacgctgcgcaccaccgactatcaccagctgccgcgcgagccgggcctgttggcaaacgcctcccggctgcagctggcgtgggagaaagtacagcaggcctgccactgcggcaacccgcagctgctgggcgaagcagcgaccatcagcgccattgccagccagcagctgttgcctaagccggggtttgacgcgctgctggacctggtggaaagcgcagggctctatggtctcaacgtggcgcacagcggcagcgtcgtcggcctgctactggaccgccgtcggcatgacgtcgaatttctgcaatggcggctggcagacagcgacatcgccgcccactggccgcagcagcatctgttggcgatggtgcccgggggcgtcatcctgcagtag

SEQ ID NO: 135543 - DNA, 1077 bp, Enterobacter cloacae
atggccttactgaaaagcgcccatggcggtaacacccgcgaggccgccgccctgctgggcattgcgcccggcgagctgctggattttagcgccaacattaatccgctggggatgcccgcctcgctcaggcaggcgatcatcgacaacccaggctgcgccgaacgctaccctgacgtcgagtatcaacagctgcatcaggcgctggctgcccaccatcagttgccggcggcgcatatcctcgccggcaacggcgaaactgaatcgatcttcaccctcgtccacggccttaagccgcggcgggcgatgatcgtcattcccggtttcgcggagtaccggcgggcgctgcagacggtggactgcgaggtggtggagtatgccctgcgggagcgcgatggctggcagctgaccgacgcgatcctcgatgccctgactccggcgctggactgcctgtttctctgcaccccgaacaaccccaccggcctgctgccggagcggggcctgctggaagccattgcgcagcgctgccgggcgctgaacatcagcctgatcctcgatgaggccttcctcgactttatccccgaccagccggggtttattcctctgctggcgcagcatccgcacgtctgggttctgcgatcgctgaccaaattttatgccattccggggctgcgtctcggctacctgctgaacgctgatgcccaggcggtggcccgactgcgcgcgcgacaaatgccgtggtccatcaacgcctatgccgccctggccggggaaattattctccaggatcgggcgtatcagcgggccacctggcagtggctgcaggaggagggagcgcgtttctatgcgcagctgcaggagatggccgggctgaccgtgtggcccgggcgtgctaactacctgttcttgcgctgcgacagagccgattttgacctgcaatatgccctgctgcgccagcatgtgctgatccgcagctgcgccaactacccggggctggatagccgctatttccgggtggcgatccgcagcgccgaggaaaacgaccagctgctggcggcgttgcgccgggtgctggcctga

SEQ ID NO: 135544 - DNA, 1254 bp, Enterobacter cloacae
atgtcgggaaacaactctggattaagccgtcgccgtttattgcagggggcgggcgccatgtggttaatgagcgtgagccctgttgggctggccgccgccgcgcgggtggtcgctgttcgcgtctggccagcatcgacctacacccgcgtcacggtggaatcgaatcatgtgctgaaataccggcagtttgccctcagtaatccggaacgggtagtggtcgatctggagggggttaacctgaactcggtactgaagggcatgggggggcagatccgcgctgacgatccctttattaagtccgcccgggtgggccagtttgatccgcaaaccgtgcgcatggtcttcgaactcaagcagaacgttaagccgcagctgtttgccctcgcgccggtggccggctttaaagagcgtctggtgatggatctctaccccgccaacgctaccgatgttcaggatccgctgctggcgctgctcgaggattacaacaaaggcgatctggagcggcaggtgccgccggcgcaaagcgggccgcagccgggcaaagccgggcgcgaccggccgattgtcatcatgctcgatcccgggcacggcggcgaagactccggcgccgtggggaagtatcgcacccgcgagaaagatgtggtgctgcagattgcccgtcgcctgcgggcgctgatcgacaaagaaggcaatatgaaggcctatatgacccgcaacgaagacgtgttcatcccgttgaaagtgcgtgtcgccaaggcgcagaagcagcgcgccgacctgttcgtgtcgattcacgccgatgcctttaccagccgccagcccagcggctcttcggtgtttgccctctccaccaagggggccaccagtaccgcggcaaaatatctcgcccagacgcagaacgcctcggatctgatcggtggggtcagcaagagcggcgaccgctatgtcgaccacaccatgttcgatatggtgcagtctctcaccatcgctgacagcctcaaatttggcaaggcggtgctggagaaaatgggcaatatcaataacctgcacaagaaccgggtagaacaggcgggctttgcggtgctgaaggcgcctgacatcccctccattctggtggagacggcgtttatcagtaacgtggaagaagagcgaaagctgaaaacggccaaattccagcaggaggtggccgagtcgatcctcgccgggattaaagcctactttgccgatggcgcgacgctggcccgccgcggataa

SEQ ID NO: 135545 - DNA, 1332 bp, Enterobacter cloacae
atggtgaaggaacgtcgcactgaactggtagaaggattccgccattctgttccctatattaatgcccatcggggaaaaacgtttgtcatcatgctgggcggcgaagccattgagcatgaaaatttctcaaatattgtcaatgacataggattattgcatagcctgggcattcgcctggtggtggtctatggcgcccgcccgcagattgacgctaacctcgccgagcaccatcacgagccggtctatcacaagcagacgcgagtgactgacgccaaaacgctggagctggttaagcaggcggcggggatgctgcagctggagatcaccgcccgtctgtcgatgagcctcaacaacaccccgctgcagggggcccatatcaacgttgtcagcggcaactttatcattgcccagccgctgggcgtcgatgacggcgtcgattattgccacagtgggcgtattcgccgcattgacgaagaggcgattcatcgtcagctcgacagcggcgccattgtgctgatggggccggtcgcggtgtcggtcaccggcgagagctttaacctgacttcggaagagatagctacccagctggccatcaagctgaaggcggagaaaatgatcggcttctgttcgtcgcaaggggtttacaaccaggccggggaaattgtctcagaactgttccctaatgaggcgcaagcccgcgtcgaagagctggaagcagacgaagactataactccggcaccgtgcgcttcctgcgcggggcggtgaaggcctgccgcagcggcgtacggcgctgccacctgatcagctatcaggaaaatggcgcgctgctgcaggagctgttttcacgcgacggcatcggcacccagatcgtcatggagagcgcggagcagatccgtcgggcgaccatcaatgatatcggcggtattcttgagctgataagcccgctcgagcagcagggcattctggtacgccgttcccgcgaacagctggagatggagatcgacaaattcaccattattcagcgcgataacaccaccatcgcctgcgccgccctctatcctttcccggaagagaagatcggcgaaatggcctgcgtggcggtgcatccggattaccggagctcgtcgcggggagaggtgctgctggagcgtattgccgctcaggccaggcagatgggactgagcaaactgttcgtgttaaccacccgcagcatccactggttccaggagcgcggcttcacgccggtggatatcgacctgctgccggagagtaaaaagcagatgtataactatcagcgccggtcgaaggtgctgatggccgacctcgcttaa

SEQ ID NO: 135546 - DNA, 321 bp, Enterobacter cloacae
atggaaaccaaaccgaactggctggtcagacatattaatctcattaccaccgcggtcgccctctatccgtggttgctgatgatactgctcctctgggataaccagcgccatcatcagcatggctatgccgcgctcggcgccgccatcgcgatattatttctgctggccctgacgtccggcatgaatcttctcatctcctcgctggtgattttttgtgcccgctgttccaccccaccgctggccggcggcgcagcagtccgctttttcgccatgaactcgatctcggcgctctggcttatccctctgttcttcagttactga

SEQ ID NO: 135547 - DNA, 1845 bp, Enterobacter cloacae
atgactttcgaacaactactactggcggcggtggagcagcgtctgctgcggccgctggacgtccagtttgccctgatggtggcgcaaaacgacccgccggcggtcaagctggcggcggccttgctgagccgggatgccggcgaggggcacgtctgtctgccgctctcgcggttgagcggcgacgaggcgctgagcggtaaagccggggagatccgcgatcggctgctggccgaagccggcgcgccggaggactggcccgcactgctgctcgcttcgtcggcggtgagctgcggcgatgctccggcgccgatgattttgtgcggcgaccggctctatctcaaccggatgtggcgcaacgagctgaccgtcgcccgcttcttcaatgaagccaaccgggtgctggagatggatgaggcccggctggcgtcaaccctgaatgccctgttccctgccaccggcgaaaccgactggcaaaaagtggccgcggcggtggcgctgacccgccgcatctcagtgatctccggcggtcccgggaccgggaagaccaccaccgtggcgaagcttctggcggcgctgatccagatcgaagacagcccgcgctgtcgtattcgcctggcggcgccaaccgggaaagcggcggcgcgtctgaccgaatcgctgggcgcggcgctgagaaaattgccgctgaccgacgcgcagaaagcgttgattcccaccgaggccagcacgctgcatcgtctgctgggcgcccagccaggcagccagcggatgcgctatcacgccggcaacccgctgcatctggacgtgctggtggtggatgaagcctcgatgatcgacctgccgatgatgtcgcggcttatcgacgcgctgccggcccacgggcgggtgattttcctcggcgatcgcgaccagctggcctccgtagaagcgggggcggtgctgggggatatctgcgcctgggcgagttcgggctataccgccgcgcgggcgcaggagctgacccggctgaccggttcgccggtgccggcgggcgagggggctatcgcgggcgcgctgagagacagtttgtgcctgctgcaaaagagctatcgcttcggcagtcactccggcatcgggagcctggcgcgggcggtgaacgctggcgcgcgcgcggaggtgaaggccacgctgcgccagccgtttgacgatatcgcgcttcatcccctcagcacgaccgaagagtacgaagccatgctcggcgcggctcagcagggctatgagcgctacctgcagctgcgccgcgagcgggccgaaccgcaggccatgctggccgctttcagcgaattccagctgctgtgcgcgctgcgcgaggggccgtacggcgtgagcggcgtcaatgagcggctggagcagcgcctcaaccgccagcgggcgatcgccctgccgcgccactctcgctggtatgatggccgaccgatcatgatatcgcgcaacgacagcgcgctggggctgtttaacggcgatatcggcatcgccctggagcgcaacggcgagctgcgggtgtggttcctgatgcccgacggcgccatcaagtcggtgcagccgagccgtctgccggagcatgataccgcctgggcgatgaccgtgcataaatcgcagggctcggagttcgaacacgcggcgctgatcctgccggcgcgcagcgtcccgctggtgacccgcgaactggtctacacggcgatcacccgcgcgaaacggcggttgtcgctctatgccgacgagcaggtgctctcccaggccattgtgacgcgcaccgaacggcgcagcggcctggcggagattttcgccgggcgcgaagccccctga

SEQ ID NO: 135548 - DNA, 3537 bp, Enterobacter cloacae
atgaccgacaccgctgagtctttggatcccctgcgcttgcccctgatcggcgagcgcctgatagaagcctctgcgggcaccggaaaaacctttaccatcgccgcgctgtatctgcggctgctgttggggctgggcggtgaggccgcctatccccgcgccatcagtgttgaagaactgctggtggtgacctttaccgaggcggcgaccgaagagctgcgcggccgtatccgcagcaacatccacgaactgcgcatcgcctgcctgcgcggcgaatccgacaatccgctctacagcgcgttgttggcggagatcgccgataaagatgacgctgcgaagacgctgctgctggctgaacggcagatggacgaggcggcggtattcaccatccacggcttttgccaacggatgctgagccttaacgccttcgagtcgggcatgctgttcgagcaacagctgatcgaggatgaatcccgcctgcgctatcaggcctgcgccgatttctggcgccgccactgctatcccctgacccgcgatatcgcggcggtgatccacgacgtctggaaagggccgcgcgatctgctgaagtcccttgaccgctggctgcagggcgaagcgccgcagcttaagtcgccgccagcccctaacgagacgctggccgaacgccatcagcagatcatcgcccgcattgactcgctcaagcagcagtggcgcgagcaggtgggcgagatcgaaggcgtgctggaaaattccggccttgaccggcggaagtttaatcgcggcaaccagggcaagtggatggagaaagtgaacgcctgggcgcaggaagagacgttaagctaccagctgcccgacgcgctggagaaatttgcccagtcgtttctgctcgagcgcaccaaagccggtggcgaaccgccggtgcatcccctgtttagcgccgtagagtcgttgctggcctcctcgctgacgctcaccgatctggtgctggcgagagcgatggtcgagatccgcgatgcggtcgcccgcgaaaagcgccgccgcggcgagctggggtttgacgatatgctcagccggcttgacgaggcgctgcgcggcgacagcggcgagacgctggccagcgctattcgccagcgttttccggtggcgatgatcgatgaatttcaggacaccgaccctcagcagtaccggatttttcgccgcatctggcgccggcagccggagacggctctgctgctgatcggcgatccgaagcaggccatctacgcctttcgcggcgccgatatctttacctatatgaaagcgcgcggcgacgttgccgcgcactacaccctcgataccaactggcgctcctcgccgggcatggtgggcagcgtcaatcggctgttcagcctcagcgataaccccttcatgttccacgagatcccgttcctgccggtgaaggcggcggcgaagaacaaggggctgcgctttaccgttgacgcggcggacgtaccggcgatgaacgtctggctgatgcccggcgacactgtcgggtctggcgattatcagacctttatggcgcagctctgcgccacgcagatccgcgactggctgagcgccggtcagcaggggcgcgcgctgctgtggcgcggggaaacctcgcgcccggtacaggcttcggatattaccgtgctggtgcgcaaccggctggaggcggcgcaggtgcgtgaagcgctgcagacgctgggtattccctcggtctacctctccaaccgcgacagcgtttttgagacgctggaggcccaggagctgctctggctattgcaggcggtgctggccccggagcgggaaaataccctgcgcagcgcgctggcgacgtcgatgtttggcctgaccgcgctggatattgaaaacctgaaccaggatgagcaggcgtgggacgcgctggtggaagagttcagcgaataccgccagatttggcggcagcgcggagtgatgccgatgctgcgggcgttgatgacagcccgacatatcgccgagaatctgctggcgacccgcggcggcgagcggcgcttaaccgacattctgcacatcagcgaactgctgcaggaggcggccagccagctggaaagcgagcatgcccttgtgcgctggctggcgcagcatatcgccgagccggacagcaacgccgccagccagcagatgcgtctcgaaagcgataagcacctggtgcaaattgtcactattcacaagtcaaaagggctggaataccccctggtctggctgccgtttatcgcccggtttcgtaaacaggaccaggcgttttaccacgatcgcgagacgttcgcggcggtgctggatctgggccaggatgaggccagcctcgagctggcggaggcggaacgactggcggaagatctgcgcctgctgtacgtggccctgacccgcgcggtctggcactgcagcctcggcgtggcgccgctcagcagccggaaatccggcaacagcgatttccacctcagcgcgctggggcggctgctgcaggcgggcgaagccatggacgccgccgggctggctgcgcggctggcagacttctgtcatggcgatattgcattacagattccgggcgaactggatctcaccccgtggcaggcgcccgcggcgaccatcccgcgattgtcggcgcgcgagttgcagcgccgcatcgccgacgactggcgggtgaccagttactccggactgcagcagcatggtttcagcggcgggcaggatttgctgccgcgtctggatgttgatgccgccggcgtcggcgaagtcgtggaagagccgcagctgactccgcaccagttcccgcgcggcgccgcgccggggaccttcctgcacagcctgtttgaggagctggacttcacccagccggtgccggaagggtggatggcggagaagctgcagctgagcgggtttgacgcgcagtgggcgccggtgctgaccgactggctggggggcgtgctgaagacccgcctgccggggccggatatcgcgctcaatcagcttgcggcgcgggataaacaggtggagatggcattttacctgcccatcgcccagctgctgacggcggagcgccttgacgcgcttatccgccagtacgatcccctctctgccgacacgccgccgctggatttccgccaggtgcgcggcatgctgaagggctttatcgatctggtcttccgtcacgaaggccgttattacctgctggattacaaatccaactggctgggggaagatcgcgaggcctacacccggccggcgatggagcaggcgatgcgtgcccaccgctacgatctacagtatcagctgtatagcctggcgctgcaccgctatctgcgccaccggctggccgattatgactatgaccgccacttcggcggcgtgatttatcttttcctgcgcggcatggacgggcaggagggggggcaggggatcttcaccacccggccggtgcgaccgctgattgacggtctggatcagctttttgccggagaaactcaggaggaggcctcatga

SEQ ID NO: 135549 - DNA, 2886 bp, Enterobacter cloacae
atgccccgcagtttatggttcaaggtttttgttgtgctggccgccctctgggcgccgtttagtcaggccgacaccggatggcagccgattcaggagacgatccgcaaaagcgaaaaagatacgcgtcagtatcaggcgatccgccttgataacgacatggtcgtgctgctggtttccgatccgcaggcggtgaaatcgctgtcggcgctggtggtgccggtgggatccctgcaggatccggcagatcatcaggggctggcgcattttctggaacatatgacgctgatggggtcgcaaaaatatccccagcctgacagccttgcagagtttcttaagctgcacggcggcagccataacgccagtaccgcgccctaccgcaccgcgttttatcttgaagtggaaaatgatgcgctggacggggccgtagatcgcctggccgacgccatcgccgcgccgctgctggataaaaaatatgccgaccgcgaacgtaacgcggtcaacgccgagctgacgatggcccggacgcgagacgggatgcgcatggcccaggtcagcgcggagaccatcaacccggctcacccggcggcccacttctcgggtggcaacctcgagacgctcagcgataagcccggcagcccggtgcttgatgcgctgcacaccttccgcgatagctggtactccgccaatctgatgaaagcggtgatctacagcaacaagccgttgccggcgctggcgcgcatggctgcggacacctttggccgcgtgccgaatcgtcagatcagcaggccggaaattaccgtcccggtggtcacggatgcgcaaaaaggcatcattattcactatgtgccggcgatgccgcgtaaagtgctgcgcgtcgagtttcgcatcgacaacaacagcgatcgcttccgcagcaaaaccgatgagctggtcacctatcttatcggcaaccgcagcccgggcacgctctctgactggttgcaaaaacagggtctggcggaaggtatccgcgccgattccgatccggtggtaaacggcaacagcggcgtactggcgatctcagccaccctcaccgacaaaggcctggcgcaccgcgatgaagtgacggcggccattttcagctacctcgacctcctgcgtactcagggcatcgacaaacgctatttcgacgaactggcgcatgtgctggcgctcgatttccgctatccgtcgatcaaccgcgacatggactacgtggaatggctggcggacaccatgatccgggtgccggtcgagcatgcgctggacgtggtgaatattgccgaccagtacgacccgcaggcgatcaaagaccggctggcgatgatgaccccgcagaacgcccgtatctggtatatcagcccccaggagccgcataacaagacggcctactttgtcgatgcgccgtatcaggtggataagattagcgagcagacgttcgctgactggcagcacaaatcgcaggccatccagctgcagctgccggcgctcaacccctatattccggatgacttcacccttatcaaaagcgataaagcctggccgcatccgcagctgatcctggatgaaccgacgctgcgggtggtgtatgccccgagccagtattttgccagcgagccgaaggcggacatctccctggtgctgcgtaaccctcaggcgatggacagcgctcgccggcaggtgatgtttgccctcaacgattatctcgccggcatcgccctcgaccagctcagtaaccaggcggcggtcggcggcatttcgttctctaccggcgctaataacggattaatggtcaatgccaacggctatacccagcatcttccggcgctgttcagcgatctgttgcagggatacttcagctatacgccgaccgaggagcagctggagcaggccaaatcctggtatgcgcagatgatggattccgccgagaaaggcaaagcctacgatcaggcgattatgccgatccagatggtctcgcaggtgccgtacttccagcgcgaagtgcgccgggcgctgctgccctccattacccttaaagaggtgctcgactaccgcgccaacctgaaaaccagggggcgtcctgaactgatggtgatcggcaatatgaccgccgatgccgccacgaccctggcccgccagatccagcagcagctgggcgccgacggcaacgaatggtgccgtaataaagacgtggtggtgaaccggcagcagctggcgatcttcaacaaagcgggcaatagcaccgactccgcgctggccgcggtgtttgcgccgcccaacgtggatgagttcagcagcaccgccgccagcaccctgctggggcagatcattcagccgtggttctacaaccagctgcgtactgaagagcagctcggctacgcggtctttgccttcccgatgaacgtggggcgccagtggggcatgggcttcctgctgcagagtagcgataagcagccggccttcctctggcagcggttccaggccttcttccccaccgcggaggcgaagctgcgggcgatgaagccggaagagtttgctcagctccagcaggcggtgataagccagatgctgcaggcgccgcagacgctgggcgatgaagcctcgaaactgagcaaagatttcgatcgcggtaatatgcgttttgattcacgtgataaagtagtggctcagattaaactgctgacgccgcaaaaacttgccgacttcttccatcagacggtggtggatccgcagggcatgacgatcttgtcccagatttccggtagccagaatggcaaagcggactatgcccagccgaaaggcggcaaagtgtgggaaaacgtcagcgcattgcagcaatccttacccctgatgcgagagaatgaatga

SEQ ID NO: 135550 - DNA, 3378 bp, Enterobacter cloacae
atgttaagggtataccactcaaaccggctggatgttctcgaggcgttgatggagtttatcgtcgagcgccagcggctggatgacccttttcaggccgaaatggtgctggtgcagagtaccggcatggcgcagtggctgcagatgaccctggccgcgcgcttcgggattgccgccaatatcgagttcccgctgccggcgagctttatctgggatatgttcgtgcgcgtcctgaaagatattccgggcgaaagcgccttcagcaagcagagcatgagctggaagctgatgaccctcctgccgcagcacctggaggaagacgattttatcctgctgcgccagtatctgagtgatgacggcgacaagcgcaagctgtttcagctggccgcccgggtggcggacctctatgaccagtacctcgtctatcgcccggagtggctgatgcgctgggaggccggccagcgggtggaaggtctcggcgatgcccagcagtggcaggcgccgctgtggcaggcgctggtgagctataccgccgagctggggcagccgcagtggcaccgcgccaatctctaccagcgctttatcagtaccctggaaaaagcggacgaaccgcccgccgggctgccgtcgcgcgtcttcatctgcgggatttccgcgctgccgccggtctatcttcaggcgctgcaggcgctgggtaagcatgtcgatgtctatgtcttgtttaccaacccctgccgctactactggggagacattaaggatccggcgttcctggcgaagctgctgtcgcgccagcggcgccatcaccgcgaggcgcgcgcgctacctctgtttcgcgacaccgagcaggcgccggggttgtttaatgacgccggggaacaggatgtcggcaacccgttgctcgcctcctggggcaaactggggcgcgactatatctacctgctggcagggctggagcgctatgaggaactggacgcttttgtcgacatcgcccccgataacctgttgcataacctgcaatcggatatcctcgaactgcgcaacgcggcggtggccgggcagagcgcagaggcattcgcccacagtcgcgacaaacgtccgctggcgctggatgaccgcagtctgagcattcacgtctgccacagtccgcagcgcgaagtggaggttctgcacgataggctactggcgatgctggaggcggatccgacgctcacgccgcgggatatcatcgtcatggtggcggatatcgacagctacagcccctatatacaggcggtgtttggcgccgccagcggcgatcgctggctgccgtgggcgatctccgaccgtcgcgcccgagagtcgcacccggtgctgcaggcgtttatcacgctgctctcgctgccggacagccgcttcgccagtgaagatgtgctggcgctgctggacgtcccggtgctggcggcgcgctttaatatcacggaagaagggctgcgctacctgcgccagtgggtgaacgagtccggcgtccgctggggaatggatgacgacaacgtccgtgagctggacctgccggcgaccgggcagcatacctggcggttcggcctcacccgcatgctgttgggctacgcgatggacagccgcgagggagaatggcagtcggtgctgccatatgacgaatccagcggtttgatcgccgagctggtgggcaacctcgcgtcgctgctgatgcagcttaatctgtggcgacgcggcctggcccagcagcggccgctggcggagtggctaccggtctgtcgcgatctgctgaatgactttttcctgccggacagcgagaccgaagcggcgctggcgctgattgagcagcagtggctggcggttattgatagcggtctggaggcgcagtatggcgagcaggtgccgctgacgctgctgcgcgatgagctggcccagcgcctcgatcagcagcggatcagccagcgctttcttgccggcccggtcaatatctgtaccctgatgccgatgcgttcgatcccctttaaggtggtgtgcctgctggggatgaatgacggggtttatccgcgcacgctaccgccgctgggctttgatttaatgagccagaagccgcagcgcggcgaccgcagccggcgcgatgatgaccgctatctgttcctcgaagcgctgatgtccgccgagcagacgctgtatatcagctatatcggccgttcgatacaggacaacagcgagcgttttccttcggtgctggtgcaggagctggtggattatatcggccagagccactgtctcgccggtgacgaagagcttgactgcgacgccagcgaagcgcgggttaaagcccatatcacccatctgcatacgcgcatgccgttcgacgttgccaatttccaggaagacgagaacaagagctacgctcgtgaatggctggcggccgccggccagcagggagaggcgcatagcgattttatacagccgctcaccgcgccgccgattgacagcctgccgttcgatcagcttctgcgcttctggcagcacccggtacgcgcgttctttcagcagcgtttgcgggtcaatttccgcgccgaagaggacgatattccagacgacgagccgttcactcttgaagggctgagccgttatcaactgaatcagcaactgctcaatacgcttattgaggagcaggacgtctcggctatgttccgccgctttcgcgccgccggcgagctgccgtatggcgcctttggcgagctggtctgggagacgcagcgcctggagatgcaggcgctggccgagcgggtgatggccgagcgccagcaggcgcagagcatggagatcgatctgcagtgcggcggcgtgaacctgaccggctggctgcagcaggtgcagccggacggtctgctgcgctggcggccttcgctgctgagcgtctcccaggggatgcaactttggctggaacaccttgtctactgctccagcggcggcaccggcgagagccggctgtttgtgcggaaagagggagagtggcgctttccggcgctggcgcccgccgaggcgcaggcgtaccttaacgagctggtggatggctatttgctggggatgtcgcagccgctgctgctgctgccggaaagcggtggcgcctggctgaaagcctgttacgacgccgaaaaggatgtcatcttaatggacgaagagacgcagcagaaagcgcggagcaaattcctgcagacctacgaagggaacatggtggtcagcggggagggcgccgatatctggtatcaacgcctgtggcgttcgctggagccggcgcattacgaagaaatcattgcccagacgcagcgttatctgttaccgctatatcgttaccatcggtccacacaaatttaa

SEQ ID NO: 135551 - DNA, 324 bp, Enterobacter cloacae
atgtcaaatgccctgaagcgtcagcgggggtttagcctgccggagaccgtgctggcgatggcgctgatggtgctgacggtcaccgcgctgggcggctatcagcgcggaatggcgcaaggaattgtccagttgaaccagacccgtcaactgtggcgcgacgcgtggcgctatagccagctctccgcgccgccgtcgccggcacgcgggcaggtaagccgtatgcagacatcgaggcaaagatgtgtcagcatcacggtaacgatcagtagacccgttgcaaagcgggtgcagatgacccggctgcattgcccggtcagccagtag

SEQ ID NO: 135552 - DNA, 408 bp, Enterobacter cloacae
gtgatccgccagcgtggaatgtcgtcgctgctgatggtgctcctgttgctgaccctcggcagcctgttactcgaggggcttaacctgcagcagcgggcgctgctggcgcaaaccgccagcgaaacgcaggcgatccgcgatacggcgatagcccattccgcgctgcagtggggaaaacagcaggtctggtcggcgcaggtggcgctggcctgccgggagcaggcgccgcagggctggcgcgcctgtctgcgtatcttcggcgacggttcactggtgctcagcagcgccagcggcgaggtgcaggtctggcagtccggcgaggtgcgcggcgggcaggtgcgtttttccgcccacggctggagcgatttttgcccgctcagggaggcgagcttatgtcaaatgccctga

SEQ ID NO: 135553 - DNA, 303 bp, Enterobacter cloacae
gtgcgctgggatgcgaacagcaacgggagatgggaaacttcccccgcggcagcggcggagagcaccggctttcgcctgcgcgacggcgcgctggagaccctgcgcggggccagcgactgccgcggcggcggatgggagaaaatcaccaacccggccgccatcgtggtgacgcgcttctcggtacaacgtcaggtcaccccgggcttcgcgccggagctgagcgtgacgctggcggcgcgctccgcgcaacagacgggcctgacgagcgaggttgagcagcgggtgacggggtataacctgtga

SEQ ID NO: 135554 - DNA, 1107 bp, Enterobacter cloacae
atgtctctaaaacaaatatggcaagcagcaaaccctaaaggacatctgctgaccgctatctcgtttctgatccccattgtctgtggctctgggtttattatcgccatcggcatggggcttggcggaacggtgcaggacacgttaactccgggacaatttgatgtatggcaggcgatggccaccctaggcgccaaggcgcttgggctgttgccggtggtgattgccgtgggaatatctggctcgatcgccggcaaaccaggcatcgcgccaggatttgtcgtcgggctggcggcgaataccataagcgcaggctttatcggtgggatgattggtggctatattgcggggtatattgcgctggcgatcattaaaaacgtcaaggtgcctgactgggcccgcgggttgatgccgacgctgatcgttcccttttttgcctccattatcagctgcctgattatggtctatatcatcggtacgcctatcggtatctttacggaagcgcttacgtctttcctgagaagcatgggcacgtcgtcgaatttggtgttaggcgcagtcataggcgcattgtgtattgttgattttggcggcccgctgaataagacatgctttgctttcgtgctgaccctgcaggcgcaggggataaatgaacccattaccgcacttcagttagttaacaccgctacgcctatcggatttggcctggctttctttattgccaaactgctgcgtaaaaatatctataaccgtgaagaagtggaaaccttaaaatcagcggttccgatggggattgtgaatatcgttgagggttctatcccgatcgtcatgaatgatattgtgcgcggtatcgcggcggcggctatcggcggcgcgtgcggcggggcggtcaccatggtctatggtgcggatgcgacggttccttttggcggagtactgatgatccccacaatgtcacatccgatggcaggcatcatggccctgctggtgaatatcgttgttaccgccacggtctatgccgtcatcaaaaaagatatccctcgcgacgtgattgttgataatgattacgaagaagaggatatcgacctggatgatattaaagtgagctaa

SEQ ID NO: 135555 - DNA, 621 bp, Enterobacter cloacae
atgctcgtcactgattcacttcttgcttacaccctcgctgctacactgcttaccctgacgccaggtcttgatactgctcttattctccgcacggcgactgctgaagggggacgcaaagccttgcatgccgcgttaggcatcgatctcgggtgctttatctggggcgcgctggtggcctttggtttaggtgcgctactggcggtttctgagttggcttataccttattgaaatggtgcggagcaggatacctttgctggctgggcatccagttgctcctgcgaccacgccagcaatttaacacccacccggccgaatcagattccacgagtaactggttcctgcgtgggatgctggggaatgtgcttaaccccaaaatgggcgtcttctacgtttcgtttttgccccagtttatccctgccgggcattcaccgatcagctggacttttctcctggtcgctatccatgtattgattggtacgctgtggtcgttaacgctgattaccgccactcgctatgccgcaggcatcctgaaaaaaccagccgtagtgaaatggatggatcggacgaccggctgcctgtttctgttattcgccgcgaagctggccatgagtcggcggtag

SEQ ID NO: 135556 - DNA, 1392 bp, Enterobacter cloacae
atgttatcattattaaaaaaaggcccgtcggcgaataaagttcctgctgagaaaattcaggcaacctatggtcgataccgtatgcaggcgctgctaagcgtatttctgggatacctggcgtactatatcgtgcgcaataacttcaccttatccacgccctatctgaaagaacagttagacctcagcgccacgcagatcggtttgctcagcagctgtatgctcatcgcctacgggatcagtaaaggcgtaatgagcagcctcgcggataaagccagcccgaaagtctttatggcctgtggcctggtgctgtgcgccatcgtcaacgtcgggttaggattcagtaccgcattctgggtcttcgctgcgctggttgtcctgaacggcctgtttcagggtatgggggtcggcccctcttttattactattgcgaactggttcccgcgccgtgagcgtggccgcgtaggggcgttctggaacatttcccataacgtcggcggcggaattgtcgccccgatcgtcggcgccgcattcgccattctcggcaccgagcactggcagagcgccagctacattgtaccggcctgcgtggcggtggtattcgccattagcgtactggtgctgggtaagggttcgccgcgcgaggaaggtctgccttcgctggcagagatgatgccggaagagaaagtggtgctgaagaccaaacacggccagaaagcgccggagaacatgagcgcatttcagatcttctgtacctacgtactgcgtaacaaaaacgcctggtatgtctcctttgtggatgtgtttgtctatatggtgcgtttcggcatgatcagctggctgccaatttacctgctgacggtgaaacatttttccaaagaacaaatgagcgtcgcattcctgttttttgagtgggcggcgattccgtctactctgctggccggctggctctccgacaagctgtttaaagggcgccggatgccgttagccataatctgtatgacgctaatcttcatctgtctgatcggctactggaaaagcgaatcgctactgatggtcacggtattcgcggcaattgtgggctgccttatttatgtcccgcagtttctggcctcggtccagaccatggaaatcgtccccagctttgccgtcggttcagccgtgggtctgcgcggatttatgagctatatctttggcgcatcgttaggcaccagcctgttcggcgtaatggtcgataaaatgggctggcacggcgggttctatctgctgatgggcgggatcgtctgctgcatactcttctgctacctctctcatcgcggcgcgctggaacttgagcaacagcgtaaaatcaccgagcaggaagaggcccgactggcactggctgacgcacagtaa

SEQ ID NO: 135557 - DNA, 1221 bp, Enterobacter cloacae
atgctcgcgctgctactgctgaccgcatggctgagaccctgtgcggcgcaaagcaatgagctggtgatggcgacgacattttctcccagcgccaccgtgtggattatcgatcgctggcagaaagagccggggtcggtgatgataaggacgctcaaccgcaccagcgcctcgctggaacagttgcttgatacggcaaatgccgaaaatgtcgatctgatcctgacttcgtcgccgatgctgctgcagcatcttcaggagcatcaaaaactggcgccgttcagcggtgcgccggcagtcagccaacatctggtgccggaatccattcgctccacctccgtggccgtggcgatctccgggttcggtttgctgatgaatcgctcagcgctgatgacccggcatctgcctgcgccagcggactgggatgacctgaccgatccccgttatcagggggcgctgctgatgagcagtccgtcgcgttcggataccaaccatctgatggtggagtcgctgctgcaacaaaaaggctggattaaaggatgggaaacgctgttgacgacggcgggaaacctcgtgaccatttcatcccgtagctttggggtggcagataagattaaaagcggcctgggcgtggctggtccggtgattgataattacgccaatctgctgctgaacgatccgcacctggcttttacctatttcccccagtcggcggtttcgccgacctatgtcgcagtgcttaaaaacagccagcacgccagcgaagcgcggcggtttattcgctatctgttaagtccggagggccagacgatcctcgccgacgctaataccgggaagtatccggtaacaccgctggcgccaggcaatccacgggcggcgcagcaggcgatgctgatgaatcaaccgccattaaactatcgattgatcctcaaacgtcagcgtttggttcagcggatgtttgatacggcgattagctttcgtcttgcccagctcaaagacgcctggcgagcgctgcatagcgcggaggtccgtcttaagcgtccgctgcccgagatacgggcgctgctcacccgtgtcccggtggatccggccagcagcgaggatgaagcctggctggctcagttcgacaacaaaagttttgcggaacagcagatgatggagtggcagctctggtttctcaacaaccagcgacaggcgattactaaactggaagaactgaaatga

SEQ ID NO: 135558 - DNA, 1995 bp, Enterobacter cloacae
atgctgcaacgcctgcggcaaatcagtatcagtagcagtctgcgcggggcatttctgacgggggcgctgcttacgctgattgtcagcagcgtaagcctctattcctggcatgaacaaagttcgcagatccgctattcgctggatgagtattttccgcgcatccatgcggcttttctgattgaagggaatctcaacctggtggtcgatcagctcaatgaatttctgctggcgccaaataccacggtacgactgcagctgcgcaaccagattatccagcatctggacaaaatagaacggctaagtcaggggttgtcgccggcagaacgccagcagttgggggtgatattgcaggacagccgcgcgctgctggcggaactggatcgcgtgctctacaacatgtttctggttcgtgaaaaggtgggagagcttgcggcgcggatcgactggctgcacgatgatttcaccaccgagctgaattcgctggtgcaggattttacctggcaacagggaacgctgctcgatcagattgaagcccgacagggggatgcgaggcagtatctgaaacgcgcccgggaagtgcagaatgaacagcagcaggtctataccctggctcgtattgaaaatcagatcgttgacgacctgcgcgacaggctcaatgaactgaaatccgggaatgatgacggcatgctggtggagacgcatatccgctatcttgaaaacctgaaaaaaacggcggatgaaaatatccgtgcgctggatgactggccgagcaccattaccctgcgacaaacgatagatgagctgctggaaattggcatggtgaaaaataatatgccggataccatgcgcgactatgttagcgcgcaaaaagcgctcgtggaagccagccggtccagagaagcgacgctggggcgcttcagaacgctgctggaagcccagcttggcagcagtcaccagcagatgcagatgtttaatcagcgtatggcgcagattgtccgggtcagcggcgggttaatcctggtggcgacgctgctggcgctgctgctggcatgggggctgaaccattattttattcgctcgcggctggtgaaacgctttaccgcgctgaatcaggcggtggtgcagattggtctgggccggaccgaggcgaccattccggtttacgggcgcgacgagctgggacgtattgccggtttgcttcgtcataccctgggtcagcttaatgcgcaaaaacagcagctggaacaggagattggcgagcgaaaagcgattgaggccgatctgcgcgccacgcaggacgagctgatccagaccgctaaactggcggtggtggggcagacgatgaccaccctggcgcatgagattaatcagccgctgaacgcgctgtcgatgtatctttttacggcgggaagggcgatcgaacagggacaggcggagcaggcgcggacgacgttaagcaaagcagaagggctgatcaaccgcattgacgcgattatccgctccctgcgccagtttacccgccgcgcagaactggaaacgccgctgcatccggtcgatttgcgtcagacgtttaccgtggcgtgggaactgctggcgatgcgtcataagcctcagcaggggacgctggtgataccggatgacactgtctggatccagggggacgaagtgcgcgtccatcaggtgctggtgaacgtgctgtccaatgccctcgacgcctgcccgcacgccgcgcaaatcaccgtgagctggcaaatccagggcggaaggctgtgcgtgttgattgccgataacggccctggctggcctgcggccttactcccttcgctgttaaagccgttcactaccagtaaaaccgtggggctcggaatagggctttcgatatgtgtttcgctgatgacgcaaatggaaggggcgttgcgcctggcgtcgacgtttacacgcagtgcctgcgtggtgctggaattcaatttgacggatgtaaaagatgttgagtaa

SEQ ID NO: 135559 - DNA, 402 bp, Enterobacter cloacae
  misc_feature (355)..(364): n is a, c, g, or t
atgttgagtaataactgttcgattctgctgattgacgatgatgccgatgtgctggatgcctatacgcagctgcttgagcaagcggggtatcatgtcagtgcctgtaataatccgtttgatgcgcgggagcaggtgccgaaagactggccaggcattgttttaagcgatgtctgcatgcctggctgctccggtatcgatttaatgacgttgtttcatcaggatgacgatctgctgccgattctgcttatcaccggtcacggcgatgtgccgatggcggtggaggcggtgaaaaaaggggcctgggatttcctgcaaaagccgatcgatccgggcaagctgctcacgctggtggacnnnnnnnnnngcccgtcgccagtattgtcagcaaaaattacaggttga

SEQ ID NO: 135560 - DNA, 723 bp, Enterobacter cloacae
atgaccggcgcgcgttacctgcaccagttaggacggcacgctgaaggtccgtttatcgcctgcgagctgactccggctaacgcccatacgcttaatgaactgatcgcccaggcccagggcgggacgctggtcttaagtcaccccgagcatctgactcacgagcaacagcatcagctggtacagctgcagagtcatgagaagcggccttttcgcctgattggtatcggtagcgcttcgctggtggagttggccgccagcagccagatagtggcggaactctattactgcttcgcgatgacgcaaattggctgccagcctctgtcaaagcgacctgatgatatcgagccgctgtttcatcactatttgcaaaaaacctgtcaacggctgaatcatcccgtcccggaggtggatgctggtctgttgaaggggatgatgcgccgggtgtggccaaataacgttcgcgaactggcgaacgccgccgagctgtttgcagtaggggtattaccactcgcagaaacggttaatccgctgatgcacattggcgagccgacgccgctggatcagcgggttgaggacgtcgaacggcagatcatcaccgaagcgctgaatatccaccagggacgtattaatgaggtggcggagtatctgctgataccgcgtaaaaaactttatctcagaatgaagaagtatggtctgaataaagagcactacaaagggggttag

SEQ ID NO: 135561 - DNA, 519 bp, Enterobacter cloacae
atgcgaatattgactgtggttgattatgatgagatgtggccggctttatttgagaacgaacgtactctgttgcagatgacgcttggtaaagtgatatcccggattcatcatattggtagcacctcggtgcctggattatcagctaagccagtaatagatatattaatcgaagttgctaatcttgaagaactggacagtctgaatcaggcaatggagggtgtaggatatactgtgcgtggtgaaaacggcattttaaatcgtaggtactttacaaaaggtggaaatcagcgtagtcatcatatccatgcgtttaccaccggggatgctcaaatcataaaacacctggcattccgtgattaccttattaaacacaatgacgtagccattcagtacgctttaatgaaaaaaagcgcgatgttattatgtgaaaatgacagccaccgatacagcatttataaagcggatttcattcagaaacatcttcgtatggcgcttattgatgcgggtcacctgggctag

SEQ ID NO: 135562 - DNA, 519 bp, Enterobacter cloacae
atgaccgcttataaccggcgctttggcaaagcaccccggcatgactttgatgttcaccggccacttgaaactgatgatgatttgaccgcatttttcacatggcgggaaccgcgccgtgtttcaaaatccctgacggtgcagtatgacaaagtgctctatctgattgaagacaatgagttaagccgaagggctattggcaagtacattgaggtatggcattacccggatggccggaaagagctccggctaaacggggttgtccttccctactccacctatgatcgccttcagaaaatcgaccagggggctatcgtggacaacaagcgcctcgggcgtacacttgaatttatcaaactggtacaggacaaacgcgacaataaccggtcacaggctctccctgccggagatggcccctcgcgccgacgcaggaaacccacagagaagaaatcccagcgatctctggacgaagacgaaagacgatatgctcaatgcgctgaagacattacaatcacgttctga

SEQ ID NO: 135563 - DNA, 333 bp, Enterobacter cloacae
atgacggcatacggaacggagtttttctcaatgagagatgtaaaccgactcaggatccttcaggatgtcatcgaccgcaacctgcgtcctggtctggcagccgaaatgctcggtatcacgccgcgccattgcagccgtctgctgaaacgttatcgtcagtccgggccactgggcatgaataaccagagtcgtggtcgcaccggaaatcgcctgctttccgcatcattgactgatcaggccctgaatatcatccgtgaacgctatgccgattttggccccacactgatgtgggaaaagctcgctgaaaatcacggtttactgatgagtttatga

SEQ ID NO: 135564 - DNA, 375 bp, Enterobacter cloacae
atgaggtactggttgctcgttatcttaatgaacgtgctgttctggttgatcgtgaagcatgttgctccggaatggtatggttcccctggttattatgcaggccagattatctgcacactaatagctgcggtcatcacatggcgtgatccgcctgactggttagatggaatcctgctcggcgttatagaattcggcgttctgattgccggggttatattctttgtctggggcatcgggtacaagctggcattctgggggcaacatgatcctaataccatatacgcaagtgcaaacgatgtgattttgcctaatcttgcgctgggcacgggcgtcttgatcgcgggatgggtatacattagatatttaaagcgctaa

SEQ ID NO: 135565 - DNA, 729 bp, Enterobacter cloacae
atgatcccgtcatccagtgctcttgtatccctgaaaccagcccgtcaggcagcgctgcaggccatcatgacggtggaagaggctcgccagcgcggcgcacgtctgccatcgatgccacacgtccggacattcctgcgcctgctgacaggctgtagccggattaacagtgacgttgcccgccgcatccctggccttcaccgtgatccaaaagaccgcctttccagcctgaaacaggtggaagaggcgctggagatgcttatctccagccacggggaatactgtccgctgccgctgacaatggatgtgcaggctgaactttttccggaagtccttcatacccgaacagtacgcaggctaaaacgtcaggactttgccttcacccgaaaaatgcgccgtgaagcccgtcaggtcgagcagtcctggttactgcgtcagaacctgctgggacaggctgtcacagaactgaattttcagtcaccggaaaccgtctgcacctggtacacccggtggagcgacgagtttgacgcggcagagcttgcagcaccgttctggcgctggcagtcgcgattcacatcgctgaaggaactggactggcttcgcatcagcggtgagccgctgtatgcagtgatgtacgaaattccgttaattgtccgggaaacacctgaacatattcgtgttgctgaacgctggcaggtgccaaataagctggctgatcggagtggtgtatga

SEQ ID NO: 135566 - DNA, 432 bp, Enterobacter cloacae
atgaaaacgttactgactctggatgtcctgaaaaccatgtcttctgatgagctggaagactaccgcgccgccggtgaagactttcgccgggagctgagtcacgctgtcatgcgcgatctgacctcaccgtccggctggtccgtgaatgccgaataccggtgcgaatttggcggcttctttcctgtccagatccgttttaccccccctcatggtcactttgatgtggcggtatgcagtccgggggagctgaatcctcgctggatagtggtctttgttacccgtgacggtcagccgttctctgtcgttcgcgtgatggatgcattcaaccctgaactcatcacccatactctggatctcatcgagtgtcttgacgccggtggctactcgtttgccagcatcatcagcacgctgtcacaggagggcgcacaatga

SEQ ID NO: 135567 - DNA, 249 bp, Enterobacter cloacae
atggaccataacgttttgtccccgcttgtatccctgccggatggcacgtttacccgcgagcaggctcaggttgtcgcagcgcagtatcagaatgtggcgattgaagatgaccaggggactcattttcgccttgtcgtccgtcatcaggatgacggcagcatgatctggcgcgtctggaattttgaaccgggcggcgaggacatgatgaaccgctacatccgggactacggagtacgcaaaacgaagtaa

SEQ ID NO: 135568 - DNA, 564 bp, Enterobacter cloacae
atgcatcatggccttaaacaccgtattcaggcgatgcgggacaaactggaagggcgcgcccctgtcgctgaaattcagggtagttcgcagctttttgtcaccccctccccggaatgtcgccggctggttgagctggctgatgtccgggaaaccgatcgcattctggaacccagcgccggaacgggcgccatactgcaggcgatcagggatgcagttccccgggcgaagtgtgacgccgtggagctgcacgccgggttagcccgtcacctgcaggcgcatttcccggaggtccggatctggtgcggagattttctcgaatatcatccggagcgccggtatacacgaattatcatgaatccgccgtttcatcgcggtgatgatatccggcatatccggcgggcattaactctgcttgagcctggcgggattctgactggaatatgtctggacggcccgcgtcagcaaaaggcgctggagtccctggcggacgtctgggagccgttgccgcggggaacattcacgtatacccaggtagcgaccgccatcctcagaataaccgtctga

SEQ ID NO: 135569 - DNA, 1356 bp, Enterobacter cloacae
atgacaccgactaccgcacagatcatgacggaaaataccgtcagccagacttaccgggcaacctattcaccagatgataataaattgcgactttacgcatcattacggctcgatgaagaaacgtattccctgatcaacaaagcaggctttcgctgggcgcccaaacaggaactttttgtggcgccagcctggacgccggggcgggaggatgtcctgctttccctcgccggtgatatcgaggacgaggacagcaccctgtttgatcgccaggagcagcgcgccgggcggttcagtgactacagtgaccggcgggcggttgaatcggagcaggcgcttgcgcatgttgattcgctggcatcggctgtcccgctgggacagccgatcctggtaggccaccacagcgagcgccgcgcgcgccggcatgcgcagaaaattgagaacggcatgaaacgtgcggtgatgctgttcgagcgcgccgaatactgggaacagcgcgcgcaggcctctctgcggcacgcgaaatacaaggagcgtccggatgtgcgttaccgccgtatcaaaaaaatcgaggcggaattacgcaagtcccaaaagcacattacccggtctgaagagtatatgacgatgtggcgtgcgcagacgctcgatctgaaaatggcgttactggtcagtaattatgaccatatttatgcctgcttcacgctcgacaaatacccccgcccggcagagaaaagccagtatgagggctcgatgtctctccattctgccctgtctgaggagatcattacttttgaacaggcgcgtgatattgcgatccgctgtcatgagcgcacgattagccaccaacagcgctgggttaatcattaccagaaccgcctggcctacgaacgcgcgatgctcaatgaaaatggtggcgttgtcacccgaacacaggaatttgaaccaggcgggcaggtactgagccggggagaatggttaaccattctccgggttaaccggagtaagggggaggtgagttcagtcgaaacgcccggttatcgctttctgggctacagcggcacgatgaaactcacgcccgaccgtatcacggactacaaagccccgacagcggaggaagccagcgacgcgaagaaagcggcgaagcgcccaccgatcgtcaattatccgggggaagggttccgggaaatgacaaaagccgagtgggcgaaattacccgctgattataaaggcgtgcggggtgctgcagaaaccgaaacacacggcgcctaccgcttccgccggtgcatgacgcacggttgtacgctcgtgaatgtgtatatcacagacatgaaaaccgttgaaattccgaaaaaataa

SEQ ID NO: 135570 - DNA, 231 bp, Enterobacter cloacae
atgatcgtttctattttttcaccttccgcaggcgctgtaaagccccgtcgtcattcgcgcattctgcgcgcagatatcaccgcacctgagattgatcccgctctaagagctttcgggcgtcatatcgccagaagtcaccgcaaagggcgcggtgtccacatccccgcgatgaaaaattccgccctcgggcaggtactccgcacgctggaactgaaacgcgcatttaactga

SEQ ID NO: 135571 - DNA, 228 bp, Enterobacter cloacae
atgcaggatccttcattgcgaacgtatcggatcgcatttctgggacgcaatgccagcggcaatctgccgatgtttacccgggtgcaggccacgaccggaaaacgggcgataaaagcgtttattgaacgctgtgaacccgtcaaaggctggtttctgggcgcacctgaagacattaccgatcaagttaagaaggaggaagaagaggcgggaagcaaaccgcaggtatga

SEQ ID NO: 135572 - DNA, 1140 bp, Enterobacter cloacae
atgagcgattttttgcctttttcgcgcccgtcgatgggcgacgcagagctggcagccctgcgtgaagttttagcgtcgggctggatcaccaccgggccgaagaatcaggcacttgaagcggcattctgccagctgaccggcaaccgtcatgcgattgccgtcagttcagcgaccggcgggatgcatgtgaccctgatggcgctgggtattggccccggcgatgaagtcattacgccgtcccagacctgggtctccactctcaatatgatctgcctgctgggcgccacgccggtgatgatcgatgtcgataacgacaatctgatgattacccctgcagcggtggaagctgcgatcacctcgcgtaccaaagcgataattcccgtgcactacgcgggcgcgccagccgacatcgacgccattcgcgcggtgggcgagcgccatggcatttcggtgatcgaagacgccgcccatgcggccggtacccattataaaggccgccacgtgggctggcaggggaccgccattttctcgttccacgcgatcaaaaacatgacctgcgccgaaggcgggctgattgtcaccgacgacgacgagctggcctcccgcatccgtagcctgaaattccatggtctgggcgtggacgcttatgatcgccagacccacggccgcgcgccgcaggcggaggtgatcaccccgggcttcaagtacaaccttgccgatatcaacgccgctctggcgctggtccagctggaaaaactgagccacgccaatcagcgccggaccgagattgcccagcgctacctgcgcgagctggcggacacgccgtttaaaccgctgagcgtcccgacctgggatcaccagcacgcctggcatctgtttatcatccgcgtcgatgaggccgcgtgcggcatcagccgcgacgcgctgatggaaaagctgaaggcgatgggcatcggcaccggcctgcacttccgtgcggcccatacgcaaaaatattaccgcgagcgcttccctgaggtttccctgccgaataccgaatggaacagcgcccgcatctgctctctcccgttgttcccggatatgaccgatgacgatgtcactcgcgttatctccgcactgcgccagttgtcaggacgttga

SEQ ID NO: 135573 - DNA, 984 bp, Enterobacter cloacae
atgcttacttaccctcccgtgaagaaggtctcggtggttatcccggtttataacgaacaggatagcctgccggaactgcttcgtcgtacggatgccgcctgcgccaccctggggcggcaatatgaaattctgttgatcgacgatggcagcagcgacgattccgcgcgcatgctcaccgaagccgccgaggcggaaggcagccacgtcgtcgccgtgctgttaaaccgtaactacggccagcactcggcgatcatggccggcttcagccatgtaaccggcgatctgattattaccctcgacgccgacctgcaaaacccgccggaggagatcccgcggctggtggcgaaggctgatgaaggttacgacgtggtgggcaccgtccgccagaaccgtcaggacagcatcttccgtaaaaccgcgtcgaagatgatcaaccgcctgatccagcgcaccaccggcaaagcgatgggcgactacggctgcatgctgcgcgcttaccgccgccatatcatcgacgccatgctcaactgccatgagcgcagcacctttatcccgatcctggcgaataccttcgcccggcgcgcggtggagatcccggtgatgcacgccgagcgcgaattcggcgactccaaatacagcttcatgcgcctgatcaacctgatgtacgacctggtgacctgtctgaccaccacgccgctgcgtctgctcagcattttcggcagcgtgattgccctgctgggcttcgccttcggcctgctgctggtggtgctgcgtctggcctttggcccacagtgggcggcggaaggggtgtttatgctcttcgccgtgctgttcatgttcatcggcgcccagtttgtcggtatgggcctgctcggggagtatatcggccgcatctataacgacgtgcgcgcccgcccccgctactttattcaacgtgttgttcgccagccggaaacggcatctaaagaggaagatcgttcatga

SEQ ID NO: 135574 - DNA, 1986 bp, Enterobacter cloacae
atgaaagccgtagtcttcgcatatcacgatatgggctgcaccggtatccaggctctgctggacgccgggtatgatatcgctgctattttcacccacccggataaccctggcgaaaaccatttctttggctccgtggcgcgccttgccgccgagcagggcattccggtgtgggcgccggaagacgtgaaccatccgctgtggattgagcgtatccgcgagatgaagccggacgtgctgttctccttctactatcgcaacctgctgggcgatgagatcctcaatctggcgccgaaaggggcgttcaacctgcacggttcgctgctgccaaaatatcgcggccgcgcgccgctgaactgggtgttggtcaatggcgaaagcgaaaccggcgtcaccctacaccggatggtgaaccgcgcagacgctggcgatatcgtcgcccagcaggccgtggcgattggcgcggatgacgccgccctgacgctgcatcgtaagctgtgcgccgccgccactgagctgctgagccgggcgctgccggcgatcctcgccggcaccaccgatgagcgtccgcaggatcacagccaggcaacctatgtggggcgtcgtaccccggaagatggccggctggactgggagctgccggcgcagaccctgcacaatctggtgcgtgcggtctcggatccgtggccgggcgccttcggctacgccggagcgaacaagtttatcgtctggaaatcccgcgttcgccacgatttgccagcagctaaaccgggcaccgtgctctccattgctccgctgatcgtcgcgtgccaggacggggcgctggagattgtcaccggccagaccgaacgcggcgtgtacatgcagggcgctcagctggcgcaggcgctgggcctggtgtccggggcggtgatcagcagcaaaccggtggtggcgattaagcgtcgcacccgggtgctgctcctcggcgtcaacggctttatcggtaaccacctgaccgagcgcctgctgcaggacgacaactatgagatttacggtctggatatcggctccgacgccatcagccgttttctcgactgtccgcgtttccactttgtggaaggcgatatcagcattcactctgagtggatcgagtatcacattaagaaatgcgacgtggtgctgccgctggtggccatcgccacgcctatcgaatacacccgcaacccgctgcgcgtgttcgagctggatttcgaagagaacctgaaaatcatccgcgactgcgtgaaatacaataagcgcattatcttcccgtcgacctcggaagtgtacggcatgtgcaccgacaaaaacttcgacgaagatagctccaacctggtggtggggccgatcaacaaacagcgctggatctactcggtctccaagcagctgctggatcgcgtgatctgggcctatggcgataagaacggcctgaagttcaccctgttccgtccgttcaactggatggggccgcgtctggataaccttaatgccgcgcgtatcggtagctcccgcgccatcactcagctgatcctcaacctggtggaagggtcgccgatcaagcttatcgaaggcggcaagcagaagcgctgtttcaccgacatcagcgacggtatcgaagcgctgttccgcatcatcgagaacaaagacggccgctgcgacgggcagatcattaacatcggtaacccggataacgaagcgagcatcaaagagctggccgaaatgctgctcgcctgcttcgaacgtcatccgctgcgcgatcgcttcccgccgttcgccggcttccgtgaagtggaaagcagcgattactacggaaagggctaccaggatgttgagcatcgtaagccgagcatccgcaacgccaaacgctgcctgaactgggagccgaaggtggagatggaagaaacggtcgaacacacgctggacttcttcctgcgcacggttgaactggtggacgataaaaatccatga

SEQ ID NO: 135575 - DNA, 873 bp, Enterobacter cloacae
  misc_feature (329)..(338): n is a, c, g, or t
atgaaacaggtcggcttacgcatagatgtcgatacctttcgcggcacgcgggacggcgttccgcggctgctggagctgctgggccggcatgggatccaggcaagcttcttcttcagcgtcgggccggacaatatggggcgccatctgtggcgcctggtaaaaccgaagtttctgtggaagatgctgcgttccagagccgcctcgctgtacggctgggatattctgctggccggcaccgcctggccggggcgccgcatcggcgcagggaacgaagcggtgatccgcgccgccgccgaatctcatgaagtcggcctgcatgcctgggaccnnnnnnnnnnaaggctggcgctggaggttgagcgcggcctgctggagctcgagcgcatcatcggccggccggtgacctgctcggccgtcgccggctggcgcgccgatcagcgggtggtcaaagccaaagaatccttcgattttctctacaacagcgactgtcgcggcacgcggccgttcctgccccagctcggtagcggcacgttcggtacggtgcagatcccggtcacgctgccgacctgggatgaggcggtgggcacggcggtcgatatcgccggctttaaccgctacctgctcgactgcatccatcgcgacccgggcgtgccggtctataccattcacgctgaagtggaaggcattgcctacgccgatcagttcaatgaactgctgaccatggcggcggaagaggaaattcagttttgcccactgagccagctgctgcccgctgactttagcgagctgccctcaggcaaagtggttcgtggtgaactggctggccgggaaggctggctcggacgtgaacaattactgacttcgggtgtttga

SEQ ID NO: 135576 - DNA, 1656 bp, Enterobacter cloacae
atgaaaagcattcgctatggcgtctctctgattgcgctgtttgcgctgtattatctgctgccgctcaatttccgtttgctctggcaacccgacgaaacccgctacgcggagatcagccgtgaaatgctggccaccggcgactgggtggtaccgcattttctcggcctgcgctacttcgaaaaaccgattgccggttactggatcaacagtatcggtcagtggctgtttggccataataacttcggcgtacgcttcgggtcggtcttcgccatcaccatgaccgccctgctggtggcctggctggcgtggcggatctttcgtgataagcgggtagctatcctgtcgccgattatcttcctcaccgcgatgctggtgtatgcgattggcacctatgcggtgctggacccgatgatcaccctgtggctggcgctggcgatgtgcagcttctggggcgcggcgcaggcgcacagccgcagcggcaaaatactgggctacgtgctgctgggcgtcgcctgcgggatgggggtgatgaccaagggcttcctggcgctggcggtgccggtggtgggcgttctgccgtgggtgatcgcccgtaaacgctggcgtgaagtgctgacctacggctggctggcggtaatcgtctgtacgctggtggtgctgccctgggggctggctatcgctcagcgcgagccggacttctggcgctacttcttctgggtcgagcatattcagcgttttgctgaaaaagacgcccagcacaaagcgccgttctggtactacatcccgttcctgatcgccggcagtctgccgtggctggccctgctgccgggggcgctaaagcgcggctggcttgagcgcgatgaggcccgcggcgcgctgtatctgttaggttgggtggcgatgccgttcctgttcttcagtatcgccaaaggcaaactgccgacctatattctgccgtgctttgcgccgctgtcgatcctgatggcccgctacgcgctggaggccgcaaagaccggcgcgaaagcgttgcgcatcaacgggatgatcaacctgggcgttggtttgctggggcttatcgccgtgctggtggtctcgccgtggggcttcatgcataagccggtgtggaccaagattgagctgtataaatgtctgctggcggcgatcgcttttgccgtctgggcgctgatgggctggctggcgatgaaagactctggccgccgctggagcctcgccgcgctctgtccgctcggcctggcgctgctggtgggcttcgccatcccggaccgggttatcgacagcaaacagccgcagttcctcgtggatatcgtcagcgaatccctgcagcccagccgttacgtcctgaccaacaacgttgggatcgccggcggcctggcctgggagctgaagcgaagcgatattattatgttcgacaaacagggtgagctgaagtacggtctcgactggccggatgctcagggaagctttgtcagccaggccggttttgccgactggctggccgcgcatcgtcagcaggggccggtctcgctggtgctgttgatggataaaggagagagtatgctcgacttaccgttaccgaaaccggataacgcctacgagctgggccgggtcgttttccttcagtacctgccgcaatga

SEQ ID NO: 135577 - DNA, 339 bp, Enterobacter cloacae
atgagcgtctggatctgtctggtgtgcgccagcctgctgagctgcgccggacagctctgccagaaacaggcgacccgcccgtcccgtcgcggacggcggagtcgccatatactcttctggttggggatggcgctgttatgtctgggctgcggcatgctgctgtggctgagcgtcctgcagtctattccggtcagcatcgcctatccgatgctgagtctgaatttcgtctgggttaccctcgcgggctggggcatctggcatgagccggtcgcccgtcgccactggcttggcgtcgggttgatcgtcgtgggcattgtcattctggggaccagcgtctga

SEQ ID NO: 135578 - DNA, 381 bp, Enterobacter cloacae
atgggctttttctgggcattactcagcgtcggcctcgtcagcgccgcgcagttgctgctgcgcagcgccatggtggccttgccgccgctgaccgatattgtggcatttctccagcatctgctgcatttccagcccgggactttcggcctgtttttcggcctgctgggctacctgctgtcgatggtctgctggtactttgccctccatcgcctgccgctgtcgaaagcgtatgcgctactgagcctgagctatatcctcgtgtgggccgccgccatctggctgcccggctggcatgagccgttctactggcaatcgctgctgggtgtggcgatcatcgtcgccggcgtattgaccatcttctggccggtgaaacgccgctag

SEQ ID NO: 135579 - DNA, 1050 bp, Enterobacter cloacae
atgtcccctccgcaggctgataaagccgggcttcatattttacttaagctggcggcgctggtgattatcctcgccgggatccacgccgccgccgatatcctggtgcagctgctgctggcgctgtttttcgctattgttctcaacccgctggtcacctggttcattcgccgcggggtgcggcgtccgttcgccattaccctggtggtgacggcgatgctggtgatgctcaccgcgctgctcggcgtgctggcggcgtcgctcaatgactttgtcgccatgctgcccgatttcaaccgcgccctgacgcgcaagatcctccagctccaggagtatctccccttccttaatctgcatatcaatccggagcggatgctgcggcgcatggattcagaacggctgatgacctgggccacgacgctgatgacccagctttccggggcgatggccagcatcgtgctgctggtgatgacggtgatctttatgctgtttgaggttcgccacctgccctacaaactgcgttttgccctcaataacccgcgcctgcatatcgccggattgcaccgggcgctgaaaggcgtcacccattatctggcgctgaagacgctgattagcctgtggaccgggctgattgtctggctggggctgctggcgatgggggtacagttcgccctgatgtggggggtgctggcgtttttgctgaactatgtgccgaacattggctccgccatctccgctatcccccccatgctgcaggcgctgctgttcagcggcatttatgagtgcctgttggtaggggcgctgtttctggtggtgcatatggtgctgggcaacatggtggagccgcgcatgatgggccaccggctggggatgtcgaccctggtggtgttcctgtcgttgttggtctggggctggctgctggggccggtgggaatgctgctctcggtgccgttaaccagcgtctgtaaaatctggatggaaaccaccgtcgggggcagcaagctggcgatcctgctcggcccgggccgtcccaaaagccggctccccggctag

SEQ ID NO: 135580 - DNA, 1221 bp, Enterobacter cloacae
atgcccgaacccgtcgccgaaccggcgcttaatggactgcgcctcaatctgcggattgtctctgtcgttatctttaactttgccagctacctcaccatcggcctgccgctggcggtgctgcccggctatgttcatgatgtcatgggctttagcgctttctgggccgggctggtgattagcctgcaatatttcgccacgctgctcagccgcccgcatgccgggcgctatgccgacctgctggggcccaaaaagattgtcgtcttcggcctcggcggctgctttttgagcggtttaagctatctgctggccgcctggggcagcggctggccactgattagcctgctgctgttatgcctcggacgggtgatccttggtatcggccagagcttcgccggcacaggctcgacgctgtggggcgtcggcgtggtcggttcgctgcatatcgggcgggtgatctcgtggaacgggattgtgacctatggggcgatggcgatgggcgcgccgctcggcgtgctgtgctattcgcacattggcctcagcggtctggccggggtcattatggcggtagcgctggtgtctatcctctgcgcgctgccccgcgcggcggtgaaggctgccaaaggcaaagcgatgtcgtttcgcgcggtgctcggccgggtctggccctacggcatggcgctggcgttggcctccgccggctttggggtgatcgccacctttatcacgctattttatgacgccaaaggttgggacggcgcggctttcgcgctgacattattcagctgcgcgttcgttggcgcgcggctgctgtttcccaacgccattaaccgactcggcgggctgaacgtggcgatgctctgctttagcgtggaggcgatcggcctgctgctggtcggctttgccgatacgccgatgatggcgaaaatcggtactttccttaccggggctggcttttcgctggtctttccggcgctgggcgtggtggcggtgaaagcggtgccgcagcacaatcaggggtcggcgctggcgacctataccgtgtttatggatttgtcgttgggcgtcagcgggccgctggccggattgctgatggcgtggaccgggatctcgatgatttatctcgccgcggcggggctggtgatggcggcgctgctgttgggctggcggctaaaaaaacggcccccggttagcgaaccggaggccagcgcaccaggccagtaa

SEQ ID NO: 135581 - DNA, 558 bp, Enterobacter cloacae
atgcgcaatttggttaaatatgtcggtattggcctgctggtgatggggcttgccgcctgcgataacagcgattcaaaagcgccaaccgttggcgcagcagcggagagcaatgccagcggccaggcaatcagcctgctggatggcaagctgagcttcaccctgcctgcgggcatggccgaccagagcggcaaactgggtacccaggcgaacaatatgcacgtctactctgacgctaccggccagaaagcggtcatcgtcatcgtcggcgacagcaccaatgaagatctggcggtgctggcgaaacgcctggaagatcagcagcgcagccgcgacccgcagctgcaggtggtgagcaataaaccgctggagattaaaggccataccctgcagcagctggacagcatcatctccgccaaggggcagaccgcctggtcttccgtgatcctcggcaaagtggatgacaagctgctgaccctgcaggtcaccctgccggcggataaccagcagcaggcgcagaccgaagcggaaagcatcatcaacaccctcaccatccagtaa

SEQ ID NO: 135582 - DNA, 666 bp, Enterobacter cloacae
atgaatccgtttactaccgtacagcgcaaaaaagcgctcgtctggctttcgctatttcatttgctggtcatcacctccagcaactatctggttcagctgccgatctccatttttggtttccataccacctggggcgcgtttagttttccgtttattttcctcgccaccgacctgacggtgcggatttttggcgccccgctggcgcgacgcatcattttcgcggtgatggtcccggcgctggccatctcttacggcatctccgcgctgttctacatgggcgaatggcagggctttgcagcgctgggcacctttaatctcttcgtcgcgcgcatcgccgtcgccagctttatggcctatgcgctggggcagatcctcgacgttcacgtctttaaccgcctgcggcagagccgccgctggtggttggcccctaccgcctcgacgctgttcggcaacatcagcgataccgtggcgtttttctttatcgctttctggcgcagcccggacccgtttatggccgcccactggggggaaatcgccctcgtcgactacagctttaaagtgcttatcagcatcattttcttcctgccgatgtacggcgtgctgttaaatatgctgttgaaaagactggcggataaatctgatttgtcggcattacagccgagttaa

SEQ ID NO: 135583 - DNA, 246 bp, Enterobacter cloacae
atgagcgaacttttctccactcctgaccacaccctggatgccctgggactccgctgcccggagccggtcatgatggtgcgtaaaaccgtgcggacgatgccggtgggcgagacgctgctgattattgctgacgatccggccaccacccgcgatatcccgggattctgccgctttatggagcatgagctggtggcccaggaaaccgaagccctgccgtaccgctacctgatccgcaaaagccactga

SEQ ID NO: 135584 - DNA, 2100 bp, Enterobacter cloacae
atgtcgactccagacacgcaggataaaaaagtcccacaattctcgtctttcaccatgcggccagcaaccgccccggcggagagctgctgtacagatcacgcctgcgccacagagtccgcccctgccgccgaagcgcttagcgacgcccgctatagctggcaagttgatggcatggactgcgccgcctgcgcccgcaaggtggaaaccgcggtccgtcaggtgcccggggtcagtcaggtccaggtgctgttcgccacagaaaagctgctggttaacgccgagggcgatgtccgcgctcaggttgagaacgcggtccgccaggcggggtatacgctgcgcgatgccgatgctcccgcagcagagcaaacccgagggtcgctgctgcgcgacaatctgccgttactgacgctggttatcatgatggccttgagctgggggctggagcaggccaaccaccctgccggtcagttggcctttattgccaccaccctggttggcctgtggccggttgcccgccaggcgctacgcctgatcaagagcgggagctggttcgccattgaaacgctgatgagcgtcgccgccatcggggcgctgtttatcggcgccaccgcggaggcggcgatggtcctgctgctgttcctgatcggcgagcgtctcgaaggctgggccgccagccgcgcacggcagggggtgagcgcgctgatggcgctgaagcccgacaccgccatccgtctgcgcaacggcgtgcgggaaaccgtcgcccagcgcgacctgcgtcccggagatgtgattgaagtggctgccggcgggcgtctgccggcggatggacaactgctgtcgccgtttgccagctttgatgaaagcgccctgaccggcgagtcggtgccggtggagcgtcaggccggggaacgggtagcggcgggcgccaccagcgtcgaccgcctggtgcagcttaccgtgatatccgaaccgggcgacagcgccatcgaccgcatcctgaagctgattgaagaggctgaggagcgtcgggcgccaatcgagcgcttcatcgaccgcttcagccggatctacaccccggccattatggtggtggccttgttggtcgccattgtcccgccgctgttcttcgccagcgcctggctgccgtggatttataaaggactgacgctgctgctgatcggctgtccatgcgcgctggtcatctccacgccggcggccatcacctccggcctggcggtcgccgcccgccgcggggcgctaatcaaaggcggcgcggcgctggaacagctgggccaggtgcgccaggtggcgttcgataaaaccggcaccctgaccgtcggccagccgcaggtgacttcggttattgccacggccgaagttgacgacaacgcgctgctggcgctggcggcggcagtggagcaaggctccagccacccgctggcgcaggctatcgtccgtgaagcgcagcggcgtcagctgagcattccgcttgccagcggccagcgggcgctggcgggctctggtatcgaagccgaagtcaacggcagccgcatcctgatctgcgccgccagcaaagccgccccggcagagcatgaggcgcagatccagcagctggaaagcgccgggcaaacggtagtgctggtgatgcgcggcgagacgctgctcggcattctggcgctgcgcgataccctgcgcgacgacgcgcgtcaggcggtggatgctttgcatcagttgggcgttcagggggtgatccttaccggggataacccgcgcgtcggggacggtatcaacgacgcgccggcgatgaaagcggccaccatcggcatcgccatgggcagcggaaccgacgtggcgctggagacggccgacgccgcgctgacccataaccgtctgaccggcctggcgcagatgatttccctggcgcgcgccacccacgccaatatccgccagaacatcgcgattgccttagggctgaaggggattttcctcgtcaccaccctgctcggcctgaccggtctgtggctggcggtgctggcggataccggcgccaccgtgctggtaacggctaacgcgctgcggttattgcgtaagaagttgtag

SEQ ID NO: 135585 - DNA, 627 bp, Enterobacter cloacae
atgctttggtcatttattgctgtctgtttctccgcatggctttatgtcgatgcatcctatcgtgggccggcatggcgacgctgggtttttaaacctgtcaccctgattctgttgctgttactggcctggcaggcgccgatgttcaatgccatcagctatctggtgctggccggcctgtgcgcctcgctgctcggcgacgccctgaccctgctgccgcgccagcgggtgatgtacgcggtgggcgctttcttcctgtcacatctgctgtataccatctggttcgccagccagctgacgctgtcgttcttctggccgctgccgctggtgctgctggtattcggcgccctgctaatggcggtgatctggagtcggctggaagagatgaaaatgccggtgctgacctttatcggaatgacgctggtaatggtctggctggccggcgagctgtggtttgcccgccccaccaacaccgcgctgtccggtttcgccggcgcagccctgctgctgctgagcaatgccgtgtggctggtgagccactatcgtcgccgcttccgcgccgataacgccatcgccgccgcgttctactttgccggccacttcctgatcgtgcgcgcactgtacctgtaa

SEQ ID NO: 135586 - DNA, 360 bp, Enterobacter cloacae
atgagtaaaatgcccctcttttttgttctggtcgtcgcggtgattgtggtggcggcttcgtttcgctatgtccagcagcgccgtgagaaacaggcgaatgacgccgcgccgttgctacaaaagcgggttatcgtcagcaataaacgggaaaaagtgattaacgatcggcgctcgcggcagcagacggtgacgcctgcaggcagtgagatgcgctatgaagcgagctttcgccccgaaaacggtggtctggaggtggtgtttcgccttgacgcgccgcaatatcacgcgctgagcgtcggcgatcgtgggatgttgagttataagggcacagcgttcgtggcgtttacgcccgatccctga

SEQ ID NO: 135587 - DNA, 276 bp, Enterobacter cloacae
atgctgattaatttaggccgcctgctgatgctgtgcgtctgggcctttctgttattgaatctgtttcagcccttcccgaagccgctgaatatctttgtcaacgtcgcgctgattttcatgatcctgatgcacggtctgcagctgacgctgctcaaggcgacgcagccgaaagaggcgccgccgctgagccgctttgagcaaatccgcatttttattttcggcgtgtttgagctcgtcgcctggcagaaaaaactgaaggcgacgctgaaaaaatag

SEQ ID NO: 135588 - DNA, 597 bp, Enterobacter cloacae
atgaaaaaaccaaaccacgcgggcagcggccagatccgcatcatcggcgggcaatggcgcggccgtaaattaccggtgccggagagcccgggcctgcggccgaccaccgaccgggttcgcgaaaccctttttaactggctggcgccgtccattgttgacgcgcactgcctcgattgctttgccggcagcggcgcgctggggctggaagcgctgtcccgctatgcggccagcaccacgctgctggagatggagcgcggcgtagcccagcagctgcaaaaaaatctcgccaccctgaaagcggatcgcggcaaggtgatcaccaccaacaccctcagcttcctgagccagccggggaccccgcaccagatcgtgttcgtcgacccgccgttccgtcaggggctgctggaggagacgctacgtctgctggagacacaaggctggctggccgatgaggccctggtgtacgtcgaaagcgaagtcgaaaacggcttaccgccggtgccggctaactggcaattgtatcgtgaaaaagtggccggacaggtcgcctaccgtctttaccaacgtgaggcccaaggagagcaccatgctgattaa

SEQ ID NO: 135589 - DNA, 1524 bp, Enterobacter cloacae
atggcaaaagagaaaaaacgtggcttcttttcctggctgggctttggacagaaagaacaggcacaggaaaccgagactgagcaaaaagtagaagaacagcaagcggttgccgaagagataccggcggttgaaacctctgctgagccgagcgcgccgaaagcagacccggaggcgtttgccgaagacgtcgtcgaagtgaccgagacggtggtcgaaagcgaaaaagcgcacctcgcggagcctgccagagcgcaggaagaagagtgggtggaaacgcctgctctgaccgaagaaacgcctgttgttgaaccggagcccgcggtcagcgaaccgcctgaacagcctgcggtggttgagccgctggcggaagaggttatcgccgaaccggtggtggcggaagccgtagcagagcagcctgtggaaggcatcgttgtccagccgcaggagacagaagcgcccgaagaggacgcgccgttaagcgatgaagagctggaagcgcaggcgctggcggccgaagcggcagaagaggcggcggtagtggtgccggcgcccgaggacgaggcgccgcttgaagcgctggctcaggagcaggaaaaaccgacaaaagaaggcttcttcgcccgcctcaaacgtagcctgctgaaaacgaagcaaaatctcggttccggatttatcagcctgttccgcggtaagaagatcgacgatgatctgtttgaagagctggaagaacagctgctgatcgccgacgtcggggtggaaaccacccgcaagatcattaccaacctgacggaaggcgccagccgtaagcagctgcgcgatgcggaagcgctgtacggcctgctgaaagaagagatgggagagattctcgccaaagtagacgagccgttgaacgttgaaggcaaaacgccatttgttattctgatggtcggtgtgaacggggtggggaaaaccactaccatcggcaagctggcgcgtcagtttgaacagcagggtaagtcggtgatgctggcggcgggggataccttccgtgcggcggcggtggaacagctgcaggtctggggccagcgtaataatatcccggtgatcgcccagcacaccggcgccgactccgcctcggtgattttcgacgccattcaggcggcgaaggcgcgccatgttgacgtactgattgccgataccgccgggcgtttgcagaataaatcgcacctgatggaagagctgaagaagattgtccgggtaatgaaaaagctggacgtcgacgcgccgcacgaggtgatgttaaccattgacgccagcaccgggcagaatgctattagccaggccaaactgttccatgaggcggtaggattgaccgggatcaccctgaccaagctggacggcaccgccaaaggcggcgtgatcttctcggtggccgatcagttcggcattccgattcgctatattggcgtcggcgagcgtattgaggatctgcgtccgtttaatgcgggcgactttattgaggcactttttgcccgagaggattaa

SEQ ID NO: 135590 - DNA, 669 bp, Enterobacter cloacae
atgattcgctttgaacaagtcagcaaagcctatctcggtgggagacaagcgctgcagggggtgaccttccacctgcagccgggcgagatggcgtttctgaccggccattccggcgcagggaagagtaccctgctgaagcttatctgtggtatcgaacggcccagcgccgggaaaatcttcttcagcggtcatgaaatcagccgtctgaagagccgtgaggtgccgttcctgcgccgccagatcggtatgattttccaggaccaccatttgctgatggatcgtaccgtgtatgacaacgtggcgatcccgctgattatcgccggcgccagcggcgatgatattcgtcgtcgcgtctcggcggcgctggacaaggttggcctgctggacaaagcgaagaattttcccattcagctctccggcggtgagcagcagcgcgtgggaatcgctcgcgcggtggtcaacaagccggcggtgctgctggcggatgaaccgaccggcaacctcgacgaggcgctctcggaggggattttacgtctgtttgaagagtttaaccgcgtcggggtgacggtactgatggccacgcacgatctggggcttatctccagtcgtccgtaccgcgtgctgacgcttagcgacggccatctgcatggaggcattcggggtgaataa

SEQ ID NO: 135591 - DNA, 1056 bp, Enterobacter cloacae
gtgaataagcgcgacgcaatgaaccagattcgccagttcggcagcaagttcgatcgcctgcgcaacgccgcgggcggcggcggtggcgggcgcaatgcgccaaaacggccgaaagcggcgcctaacccggcctcgcgtaagagcaacgtattcaacgagcaggtgcgctatgcctggcacggcgcgctgcaggatctaaaaagcacgccgctggcgaccttcctgacggtaatggtcatcgccatttcgttgaccctgccaagcgtctgctacatggtctacaaaaacgtcagcagcgcggcgtcccagtattatccctcgccgcagatcaccgtttatctggaaaaaacgctggatgacgatgccgcggcgcgggtggtgggccagctgcaggcggagcagggcgtcgacaaggtaaactatttgtcccgtgacgaggcgctgggggagttccgtaactggtcaggctttggcggcgccctggatatgctggaggagaacccgctgccggcggtcgccatcgtggtgccgaagctggatttccagagcaccgaggcgctgaataccctgcgcgatcgggtatcgcggatccagggtgtcgatgaagtgcggatggacgacagttggtttgcccgtctctcctcgctcaccgggctggtaggacgcgtgtcggcgatgatcggcgtgctgatggtggcggcggtgttcctggtgatcggcaacagcgtgcgcctgagcatcttcgcccgccgcgataccattaacgttcagaagcttatcggcgccaccgacggctttatcctgcgtccgttcctctacggcggagcgatgctgggcttttccggcgcgtttttatcgctgatcctgtcggagattctggtaatgcgcctctcgtcggcggtgaccgaagtggcgaaagtcttcggcactcagtttgagctgagcggcttaggcttcgacgagtgtctgttgatgttgatcgtctgctcgatgatcgggtgggtagccgcctggctggcgacagtgcaacatttacgtcactttactcccgattaa

SEQ ID NO: 135592 - DNA, 855 bp, Enterobacter cloacae
atgaccaaagaaatgcaaactttagctttagcccccgttggtaacctggaatcgtacatccgggccgctaacacttggccgatgctgtcggctgatgaagagcgggagcttgctgaaaagctgcattaccagggcgatctggaagcagcgaaaaagctgattctgtctcacctgcgctttgttgttcacattgctcgtaactactcgggctatggcctgccgcaggcggatctgatccaggaaggcaatatcggcctgatgaaagccgtgcgtcgcttcaacccggaagtgggtgtgcgcctggtctccttcgccgtgcactggattaaagccgaaattcacgaatacgtgctgcgcaactggcgtattgtgaaggtcgctaccaccaaagcacagcgtaagctgttctttaacctgcgtaaaaccaaacagcgtttgggttggttcaaccaggatgaagtggaaatggtggcccgtgagctgggcgtgtcgagcaaagacgtccgcgagatggaatcccgtatggcggcccaggacatgaccttcgacatgtcgtccgacgatgagtccgacagccagccgatggcgccggtcctgtatctgcaggacaaaacgtctaactttgccgacggcatcgaagacgataactgggaagagcaggcggcgaataagctgactgacgcgatgcagggcctggacgagcgtagccaggacatcatccgcgcccgctggctggacgaagataacaagtccacgctgcaggaactggccgaccgctacggcgtctccgcagagcgcgtgcgtcagctggaaaagaacgccatgaaaaaactgcgtgccgctatcgaagcctga

SEQ ID NO: 135593 - DNA, 1524 bp, Enterobacter cloacae
ttgcgttcgctggtgggtgacctggtgctggtccgtctgcaggaagagcgggatcctcttctgcacaaacgcttatataacgcgctgcgccgcgcgatcctcgacggttcgctggcgccgcaaagccgtctgccgccgtcgcgggacctggcgggcgaacttggcgtatcaagaaacaccatattaacaacttatgaacaattgctggcggaaggatatgtggtttcccgtcggggaagcggaacattcgttgcccaaaccgcccctgagagctcattgacggctaaaggtcagcaagaaaacagcagtatcgcagcaccgacggcgcatctttcacgccgaggccaacatctgctcggccaggtcagcgccagcccgcgccagtggggagcgtttatacccggcgtgccggacgttaacgcctttccccacccgctgttcagtaagatccaggcccgcatcagccgtcggcccaaaccggagcggctcagctatagctgcaacggcggcaccccggaactgcagcaggcgctggtggattatctgcgcgtgtcgcgcggcgtccactgtcagtcagatcaaattcttatcaccgaggggatccaccaggcgatcgatctggtcacccgcatgctttgtgataacggcgttctggcgtgggtggaggagccttcctactgggggatccgccacgtgctggcgatgaacgacgttcgggcagagcccctgaccgtggatgccaacggcctgtgcccgccggagacggttgacgatgcgccgaggctgatcttcgttacgccttcccaccagtatcctctgggcgcggtgatgagccttgagcgccgccagcgcctgctggcactcgcccgtcagcaggggagctggatcgtcgaagatgattatgacagcgagtttcgcttttccggtcagccgatccccgccctgcagggtctggtcgccgacgccccggtggtctatatcggcaccttcagcaagacactctatcccggcctgcgcctgggctacgtggtgatcccgcggccgctggtcagcgacctgaagcacgcccatgccgagctttaccgcggcggccattcgctgatccagatggcgctggcggagtttattaccgccggccactattcggcccatatccgccgcatgcggctgctctacagccgtcgccgcgcctttttaactgagcttatccagcggcactgtatgccgtacgccctgtctgacttcagcgataatgccgggctgcatttgatcctcaatttgcccgcagaggctgacgatgtggcgatcgccagagaggccaatgcgcggcacattctggtgcggccgctgtcgcgctactacctgacggcggcgcgcaagaaaggattactgatgggattcgccagccagcccgaagagcagatggcgtcggcgttcagcgtcttactcggctgcctgcagacgcactgcccgcagatgctcctgctccgggaggacgcagaaaaacaaaacgccccaacctga

SEQ ID NO: 135594 - DNA, 1266 bp, Enterobacter cloacae
gtgaaaagctcagaactgaatcaacgtcgccagcaggcgacgccgcgcggcgtaggcgtaatgtgtaactactttgtcgagaaggcggaaaacgccacgctgtgggatatcgaaggcaatgaggtgatcgatttcgccgccgggatcgccgtgttaaataccggtcaccgccatccgaaagtggtcgccgcggttgccgaccagctgcaggcgttcacccacaccgcctatcagattgtgccgtacgaaagctatgtttcgctggcggagcgtatcaacgatctggcgccaattgacgggccggcaaaaacggctttcttcaccaccggcgcggaagcggtcgagaacgcggtgaaaatcgcccgcgcttacaccggtcgtccggggctgattaccttcggcggcggtttccacggccgtacctttatgaccatggccctcaccggtaaggtcgcgccctacaaaatcggcttcgggccattcccgggctcggtgtatcacggtgtctacccgaatgcggcgcatggcgtgaccaccgcggatgcgctgaaaagcctggagcgcattttcaaagcggatattgcgccggaccaggtagcggccatcattctcgagccgatccaaggggaaggcggctttaacgtcgcgccggccgattttatgcaggcgctgcgcgacctgtgcgatacccacggcattctgctgatcgccgatgaagtgcagaccggtttcgcccgcaccggcaagctgttcgccatgcagcactatgaggtgaaaccggatctgatgacgatggcgaaaagcctcgccggcggtttcccgctgtcgggcgtcgttggtcgcgccgaagtgatggatgcgccagcgcctggcgggctgggcggaacctatgccggtaacccgctggcggtggccgcggcgcacgcggtgctggatgtgattgccgaagagcagctgtgtcagcgcgctgagcagctgggtagccatctgcaggaagtgctcaaccaggcgcgcgccacctgtccggcgatcgttgatgtccgcggccgggggtcgatggtggcggtggagtttaacgatccgcaaacaggcgaaccgtcgccggaattcacccgccaggtgcaacagaaagcgcaggagaacggcctgctgctgctgagctgtggcgtctacggcaacgtgatccgcttcctgtatccgttgactatcccggatgcccagttctcgaaagcgctggatattctggcgcgcgtactgaagagctaa

SEQ ID NO: 135595 - DNA, 1245 bp, Enterobacter cloacae
atgtctgaaaactccaccttttctcccgtcctcaccggccgggaacgtacggctgtccctgcaaaatctctgagcttcgtcgaaggggtatcgatgattgtcggtaccaatattggcgcgggcgtcctctctatcgcctatgcgtcaagcaaagcgggctttttaccactgctgttctggctggtgctggtgggtagtctgaccacggtgaccatgctctatgtcgcggaatccacgctgcgcacccgtaaacatctgcagctcagtggattatcgaagcgctacgtcggcggctttggcgcgctgatgatgtttctctccgtctgcgtcaatagcgtcggggcattgacggcgtatatgaccggcagcggtaagctgctgcactcgttgtttggcatctcgccggcgctgggtagcgtgctgtttttcgttccggcggcaggggtactctatctggggctgaaggcgatcggccgcggtgagaaatttatcagcatcggcatggtggtgatgatctcggtgctggtgattgccacgctgttgaaagagaccacccgcgtcggctatctgctcgacggcaactggctgtatatggttccggtcttcaacgtcgtagcattctgcttctcggcacagtatatcgtgccggagatggcgcggggcttcgccgacaaaccggaaaaattgcctaaagccatcatggtcggcatggcgctgacctttaccctgctggcgctggtgccgttgtcggtgatctcgcttaacggtctggacaatatctcggatgtggccaccatctcctgggggcgggcgcttggcgaatgggccttcttctcagccaatctgtttgcgctgtgcgcgatgctgacctcctactggggactgggcggcagcttcctgaccaatatcttcgatcagttccgcctggggaatgacgaacagcccgcccggcgcctgatggtgctgctggtggtggcgatcccgccgttcgtactggcctatagcggcatggtctccttcgtcaacgcgctctattttgccggggtgttcagcggcgtcattttatcgattatgccgatcctgatgctcaagggcgcccgccagcgtggcgatctgaccccgggctggacctgtccggcctggatgacccatccgcttatccaatgcttcattgtgttgttgtatctttgcagcgccgcctacgcgatagcatccgcggtgggctacctacccgcaggctggtaa

SEQ ID NO: 135596 - DNA, 1098 bp, Enterobacter cloacae
atgaagggtaaagcgttactggcaggatgtattgccttagttatgagcagcgcggcgctggcggaagatatcaaaatcgcggtagtcggggcgatgtccggcccggtggcccagtacggcgaccaggagtttaccggcgcagagcaggcggtagcggatatcaatgctaagggcggcatcaagggcaataagctgcagatcgtcaaatatgatgacgcttgcgacccgaaacaggcggtagcggtagccaacaaagtggtcaacgacggcatcaaatacgttattggtcacctgtgttcctcttccactcagccggcgtctgatatctatgaagacgaaggcattctgatgattaccccggcagcgactgctccggagctgacggcgcgcggctataagctgatcctgcgcaccaccggtctggactccgatcaggggccaaccgcggcgaaatacattctcgacaaagtgaagccgcagcgtatcgcagtggtacatgacaaacagcagtacggcgaaggtttggcccgtgcggtgcaggatggcctgaaaaaaggtggggcaaacgtggtcttcttcgacgggatcaccgccggtgagaaagatttctccaccctggtggcgcgcctgaagaaagagaatatcgatttcgtctactacggcggctatcacccggaaatgggccagatcctgcgtcaggcgcgcgccgccggtctgaaaacccagtttatgggcccggaaggcgtagcgaacgtctccctgtctaacatcgccggcgagtcggcggaaggcctgctggtaaccaagccgaagaactacgaccaggtgccggcgaacaaaccgatcgtggacgcgatcaaggcgaagaaacaggatccgagcggcgccttcgtgtggaccacctacgcggcgctgcagtcgctgcaggcaggcctgaatcagtctgacgatccggcggaaatcgctaaatacctgaaaggcgcgacagtagacaccgtgatgggcccgctgtcgtgggatcagaaaggcgacctgaaaggcttcgagttcggggtctttacctggcatgctaatggtacggcgaccgacgccaaataa

SEQ ID NO: 135597 - DNA, 384 bp, Enterobacter cloacae
atgaaactgaccattatccgtttacagcacttcagcgatcaggatcgcattgatctggggaaaatctggccgtcgcaggatctgtcgacgctgacccttgatgaaaaccatcgtctctacgccgcccgctttaacgagcgcctgctgggcgccgtgcgcgttaccctgcgcggcgtcgaaggtgagctcagcgatctgtgcgtgcgtgaagtgacccgccgccgcggcgtcggacaatacttagtggaagagacattgcgtgataacccggcgatcaatagctggcgcgtcgccgaccatggggtggaggaccgcggcgtgatggcggcctttatgcaggcgctcggctttagcgcccagcagaatggttgggaaaagcattaa

SEQ ID NO: 135598 - DNA, 255 bp, Enterobacter cloacae
gtggccgataacgtactgaatgccgtcgttgacgattttgttggccaccgcgaccgcttgcttcggatcgcaggcgtcgtcatattcgacggccaccagcttgtcgcccttaatgccgccgctggcgttgatgtctttaatcgcctgacgcgcgccattgaactccatgtcgccccactgggccactggacccgacatcgcgccgaccacggcgaccttaatatccttggccatcgccgcgtgcgacatcgctaa

SEQ ID NO: 135599 - DNA, 417 bp, Enterobacter cloacae
atgctgcgccaggcgcgctccgtcgggttgaaaaccgtgtttatggggccggaaggggtcggcaacgcctcgctgtccaatatcgcgggcgccgcggcggaaggcatgctggtgacaatgccaaaacgctacgatcaggaccctgccaacagcgccatcgtcaacgcgctgaaagcggagaagaaagatccgagcggaccgtacgtctggatcacctatgccgccgttcagtcgctggcgcaggcgatggacagaaccggcagccagcagccgctggatttaatcaaagatttgaaagcgcacggggcgaaaaccgtgattgggccgctgacctgggatgaaaaaggcgatctgaagggatttgagtttggtgtcttccagtggcacgccgacggctcttcgagcgcggcgaaataa

SEQ ID NO: 135600 - DNA, 927 bp, Enterobacter cloacae
atgtccgagcagtttctctattttctgcagcagatgtttaacggcgtcacgctgggcagtacctatgcgctgatcgccatcggctatacgatggtgtacggcattatcggcatgatcaacttcgcccacggcgaggtctatatgattggcagctatgtctccttcatgatcatcgccgcgctgatgatgatgggcattgacactagctggctgctggtcgccgccggattcgtgggcgccattgtgattgccagcgcctacggctggagcattgagcgcgtggcctatcggccggtgcgtaactccaagcgcctgattgcgctgatctccgccatcgggatgtctatcttcctgcagaactacgtcagcctgacccagggctcccgcgacgtggcgctgccgagcttgtttaacggccagtgggtcgtcggccacagcgacagcttctccgcgacgatcaccaccatgcaactggtgatctgggtggtgacctttatcgccatgctggccctgacgctgtttattcgctactcgcggatggggcgcgcctgccgcgcctgcgcggaagatctgaaaatggccagcctgctcgggattaacaccgaccgcgtcattgccctgacctttgtcatcggcgcagcgatggcggcggtggccggcgtgctgctggggcagttctacggcgtgattaacccctacatcggctttatggccgggatgaaggcgttcaccgccgccgtgctcggcgggatcggcagtatccctggcgcgatgatcggcggcctgatcctgggtattgccgaggcgctctcttccgcctatctcagcaccgaatataaggacgtcgtttccttcgcgctgctgattctggtgctgttagtgatgccgaccggcattctgggccgcccggaggtggaaaaagtatga

SEQ ID NO: 135601 - DNA, 579 bp, Enterobacter cloacae
gtggttcagcagcgcaaaggtatacgcgccgatggcatagaacccgccgtagcccagcaccagcaggccggaaaggccgaccaccacgttcaacccgaggccgaggatgatatagatcatcgtcagggtggcgatatccaccgtgccgcgcgacaccataaacggccaggccacggcaatcaccagcagggcgatcaggaacagcttctgcttcaccgtcgacccgtcaatcgccggcataataaacttcggcccggagacgttcttaaccgctttctggaacagcggccgcagcagctggaagaaaaagaccaccgcggtaccgatgaagatccactgccagcgaatatcggcggcggtatcgaccaccagtttggtgccgttcagctccagctgcacgcccataaagacgcccgccagaatgaagaacatcacggcagagagcagcgccattgcaatttgcatcggtttcatactttttccacctccgggcggcccagaatgccggtcggcatcactaacagcaccagaatcagcagcgcgaaggaaacgacgtccttatattcggtgctgagatag

SEQ ID NO: 135602 - DNA, 714 bp, Enterobacter cloacae
ttgcgcggcgactacctggcgattgtgaccttaggcttcggcgagatcgtgcgcattctgctgctcaacaataccgagatcaccggcgggccgaacggtatcagccagatcccgaaaccgaccttctttggcctcgaatttagccgcagcgcccgcgaaggcggctgggataccttcagcaacttcttcggcgtcaaatacgatccctccgaccgggtgattttcctctacctggtggcgttgctgctggtagtgctcagcctgttcgtcatcaaccgcctgctgcgaatgccgctgggccgggcgtgggaagcgctgcgtgaagatgagatcgcctgtcgttcgctgggcctgagcccgacgcgcatcaagctgaccgcctttaccatcagcgccgcgtttgctggcttcgccggcacgctgttcgccgcgcgccagggcttcgtcagcccggaatcctttaccttcgccgagtcagcctttgtgctggcgatcgtcgtgctgggcgggatgggctcgcagttcgcggtgatcctcgcggctattctgctggtggtctcgcgcgagttgatgcgtgacttcaacgaatacagcatgttaatgctcggcggcctgatggtgctgatgatgatctggcgtccgcaggggcttctgccaatgacgcgcgtgcagttgaagctgaaaaacggtcaggcgaaaggagagcaggcatga

SEQ ID NO: 135603 - DNA, 768 bp, Enterobacter cloacae
atgagtcagccattattatccgttagcggcctgatgatgcgtttcggcggtctgctggccgtcaacaatgtgtcgctggagctcagagagcgcgagatcgtctcgctgatcggccccaacggcgccgggaagaccaccgtctttaactgcctgaccggtttttacaagcccaccggcggcactattctgctgcgcgaccagcacctggaagggctgccgggtcagcagattgcgcggatgggcgtggtgcggaccttccagcacgtgcgcctgttccgcgaaatgacggtgattgaaaacctgctggtggcgcagcatcagcagctgaaaaccgggctcttctccggcctgctgaaaacgccggccttccgtcgggcgcagagcgaagcgctggacagggccgccacctggctggagcgcatcggcctgctggagcatgccaaccgtcaggccagcaacctggcctacggcgaccagcgtcggctggagattgcccgctgcatggtgacccagccggaaattctgatgctcgatgaaccggcggcggggctgaacccgaaagagaccaaagagctggacgagcttatcgccgagctgcgtaaccatcacaacaccaccatcctgcttatcgaacacgatatgaagctggtgatgggcatttccgatcgcatctacgtcgtgaaccagggaacaccgctggccaacgggacgccggaagagattcgtaataacccggacgtgatccgcgcataccttggtgaggcataa

SEQ ID NO: 135604 - DNA, 714 bp, Enterobacter cloacae
atggaaaacgcgatgttaacttttgacaacgtcagcgcccactacggcaagattcaggcgctgcacaacgtcagcctgcatatcaaacagggcgagatcgtcacgcttatcggcgccaacggcgcggggaaaaccaccctacttggtacgctgtgcggcgacccgcgcgcctccagcgggcgcattgtctttgacggtaaggatattaccgactggcaaaccgcgaagatcatgcgcgaggcggtggcgatcgttccggaagggcggcgcgtcttttcgcgtatgacggtggaagagaacctggcgatgggcggtttttttgccgaccgcgatcagttccagacccgcatcaaatgggtgtatgagctgttcccgcgtctgcatgaacgccgtattcagcgcgccggcaccatgtccggcggcgagcagcagatgctggcgatcggtcgcgccctgatgagccaaccgcgcctgctgctgctggatgaaccgtcgctggggctggcgccgattatcattcagcagattttcgacaccatcgagcagctgcgcgagcaagggatgacgatcttcctggttgagcagaacgccaaccaggcgctgaagctggccgaccgcggctatgtgctggagaacggccacgtggtgctggaggacaccggcgacgcgctgttggccaacgaggcggtgcgcagcgcctatctcggcggttaa

SEQ ID NO: 135605 - DNA, 222 bp, Enterobacter cloacae
atgagaacggttaactatagcgaagcccggcaaaatctggccgatgtgctggaaagcgcagtgacaggtgtacctgtgaccattacccgtcgtgggcataaatctgcagtcatcattagtgcagaagagtttgaacgctaccaggcggccagaatggatgatgagttcgcggctatcatggcggttcatggtgatgagatcagggagcttgcggataaatga

SEQ ID NO: 135606 - DNA, 369 bp, Enterobacter cloacae
atgacgctgcagattatctcagcggaagagataatacagtttcacgacaggctgctccgcgtcacgtctggcgttgccggtatgcccgatccggggcgtgccgaagcgataatgtatagggtgctaaacaaaattgaatatgaaggtgtgacagacgtgtggcgactcgctgcgatgcatctgctggcgatttctcgcggtcatatatttaatgatggtaataagcgtacggcactgtttatcaccctgctttttttaaagcgaaatggaattatattgccagcgaatccagacttcgtcggcatgaccgtcgaggcagcagcagggcaacttaccctggaacagattgtcgcgcgtttgcgtggatga

SEQ ID NO: 135607 - DNA, 2022 bp, Enterobacter cloacae; identical to SEQ ID NO: 91719

SEQ ID NO: 135608 - DNA, 1578 bp, Enterobacter cloacae; identical to SEQ ID NO: 91720

SEQ ID NO: 135609 - DNA, 804 bp, Enterobacter cloacae; identical to SEQ ID NO: 91721

SEQ ID NO: 135610 - DNA, 1101 bp, Enterobacter cloacae; identical to SEQ ID NO: 91722

SEQ ID NO: 135611 - DNA, 3357 bp, Enterobacter cloacae
atgaacctcgaccttttgcagttcgatgtgcagagttttaaagtcatgatggacgatctggcgcaggtctggcgcggtgaaacgctggcgccgctcgctatcaccttccgtgattatgtaatggctgaacaggcgcgccgacagacatcggcatggcacgatgcctgggattactggcaggaaaaactgccgcaattgcctttagcgccagagctgccggtggttgaaacacccccggaaacgccacacttcaccaccttcaaatcgacgatcggcaagacagaatggcaggccgtgaaacagcgctggcagcagcaaggcgtcacaccgtctgccgcgctgctcacgctgtttgccgccacccttgagcgctggagccgcaccacggcatttacgctgaacctgacgttcttcaatcgccagccgatccatccgcaaatcaaccagttgattggtgattttacctccgtcacgctggttgattttaacttctcagcgccggtgacgttgcaagagcagatgcaacagacccaacagcgcctctggcaaaacatggcgcacagtgaaatgaacggtgttgaggtgatccgtgagctgggccgcctgcgcgggtcacaacgtcaaccgctaatgccggtggtgtttaccagtatgctggggatgacgctggaaggcatgactatcgatcaggcgatgagccatctgttcggcgaaccctgctatgtgttcacgcaaacgccgcaggtctggctggatcatcaggtcatggagagcgacggcgagttgatgtttagctggtactgcatggacaacgtgctggaacccggcgctgccgaggcgatgtttaatgactattgcgccatcctgcaagccgtcatcgccgcccctgaaagcctgaagactctcgccagcggcatcgccgggcacattccccgtcgacgctggccgctgaacgcgcaggcggactacgacctgcgggatattgagcaggcgacgctcgaataccccggcatccggcaggccagagcggaaataaccgaacagggcgcgttgacgctggatatcgtaatggccgacgatccgtcgccatcagcggcgacgcctgatgagcacgaactcacccaactggcgctgccgttgcctgagcaggcgcagcttgatgagctggaggcgacctggcgctggctggaggcgcgtgcgctacaggggatcgcggctacgctaaatcgtcacggcctgtttaccacgccggagatcgcccatcgctttagcgcaatagtacaggcgctgtccgcgcaagcgtctcaccagcgtctgctgcgccagtggctacagtgtctgacggaaagagagtggttaatccgcgagggtgaaagctggcgctgccgcgttccgctcagcgagattcctgagcctcaggaagcgtgcccgccaagccaatggagccaggcgctggcgcagtatctggaaacctgcatcgcccggcacgacgccctcttctccgggcagtgttctccgctggaattgctgttcaacgagcagcatcgcgtgactgacgcgctgtatcgcgacaaccccgccagcgcctgtctgaatcgctataccgcgcagattgccgccttgtgcggcgcagaacggattctggaggttggcgccggaaccgcagccactaccgcgccggtgctgaaggccacgcggaacacgcgacagtcgtaccacttcacggacgtctccgcgcagttcctcaatgacgccagagcccgtttccatgatgaatcgcgggtgtcttatgccttgttcgacatcaaccagccgctggatttcaccgcccacccggaggcgggttacgacctgatcgttgccgtcaatgtgctccacgacgccagccatgtcgtccagacgttgcgcagattaaaactgttgctgaaagccggcggacgtttgctgatcgttgaagcgacggagcgaaacagcgtattccagctggcgagcgtgggctttattgagggattaagcggataccgcgatttccgccgccgggatgagaaaccgatgctcacccgctccgcatggcaggaggttctcgttcaggccgggtttgcaaacgagctggcgtggcccgcgcaggaatcgtcgccgctgcgccagcatctgctggtggcgcgttcgcctggcgtaaatcgcccggataaaaaagccgtgagccgctatttacagcagcgctttggcaccggtctgcccattttacagatccggcaaagagaagcgttatttacgccgctgcatgccccgtctgatacgccgactgagccagccaaacccacgccagttgccggggggaatccggcgctggaaaaacaggtggctgaactctggcaatcgctgctgtctcgccccgtggcaaggcatcacgactttttcgaactgggcggcgacagcctgatggcgacaaggatggtcgcgcagctaaaccggagagggattgccagggctaaccttcaggatctgttcagccattcgacgctgagcgacttctgcgcccatctacaggcggctacgtcaggagaggacaacccgatacccctttgccagggcgacggtgaggaaaccctgtttgtcttccacgcttcagacggcgatatcagcgcctggctgccgctcgccagcgcgttgaacaggcgcgttttcggcctgcaagcaaaatcgccgcagcgctttgccacgctcgaccagatgatcgatgagtatgtcgggtgcatccgtcgtcagcagcctcacggcccttatgtgctggcgggttggtcgtatggcgcgtttcttgcggcgggcgccgcacagcgcctgtacgccaaaggcgagcaggttcggatggtgttaatcgatcccgtgtgccgacaggatttctgttgcgaaaaccgggcggccctgctgcgcctgttagccgaaggacaaacgcctctggcactgcccgaacatttcgaccagcagacgcccgacagccagcttgccgactttatcagcctcgctaaaacggccggtatggtgtcgcaaaacctgacgctgcaagcggcagaaacgtggctcgacaacatcgcgcatctgctgcgtttactgactgagcatacgccgggcgaaagcgttccggtcccctgtctcatggtgtatgccgccgggagacccgcgcgctggacgccagcagaaaccgagtggcagggctggataaacaacgccgacgacgctgtgattgaagccagccactggcaaatcatgatggaagccccccacgttcaggcttgtgcgcaacacattacgcgctggctttgcgcaacctcaatgcaaccggagaacacgttatga

SEQ ID NO: 135612 - DNA, 6153 bp, Enterobacter cloacae
  misc_feature (6082)..(6091): n is a, c, g, or t
atggataacttgcgcttctcttctgcgccgacagcagattccattgatgcatcgatcgctcaacactacccggactgcgaacctgtcgcggttatcggctacgcctgccattttcctgaatcgccggatggcgaaacgttctggcaaaatctgctggaaggtcgtgaatgcagccgacgctttacgcgcgaagagcttctggccgtcggtctggatgccgccatcattgacgatcctcattatgtcaatatcggtacggtgttagacaacgccgactgcttcgacgccaccctgtttggctattcgcgacaggaagcggagtcgatggacccgcagcagcgcctatttttgcaggcggtctggcatgcgctggaacatgccggttatgcccccggcgccgtcccccataagaccggcgttttcgcctcttcccggatgagtacctaccccggtcgcgaagcattgaacgtgacagaagtcgcgcaggtaaaaggtctgcaatctctgatgggcaatgataaagactatattgccacccgcgccgcgtacaaactcaacctgcacggcccggcgttatcggtacagaccgcctgctccagctcgctggttgccgtgcatctggcctgtgaaagcctgcgcgcaggcgaatccgatatggcggttgccggcggcgtggcgctctctttcccccagcaggcaggctaccgctaccagcccggaatgattttctctcctgatggtcactgtcgtccctttgacgcctcggctgagggcacctgggccggtaacggtctcggctgcgtggtgctgcgtcgcctgagagacgcgctgctgtcaggcgatccgattatctcggtgatcctctccagcgcggtcaacaacgacggcaacagaaaggtcggctataccgccccttccgtcgcagggcaacaggcagtcatcgaagaggcgttaatgctggcggccatcgacgacaggcaggtaggttacattgaaacccacggcaccggcacaccgctgggcgacgcgattgaaattgaagcgttacgcaacgtctatgcgcctcgcccgcaggatcagcgctgtgcgctcggttccgtgaaaagtaacatgggccatctggataccgcggcgggcattgccggactgctgaaaaccgttctggcagtcagtcgcgggcaaattcctcccttactgaattttcacacccccaacccggcgctgaaacttgaagagagcccctttaccataccggtgtcggcacaggcatggcaggacgaaatgcgctatgcgggcgtctcctcctttggtattggcggcaccaactgccatatgatcgtcgcctcgctgcccgacgcgctcaacgcgcgcctccccaatacggatagcggcagaaaaagtaccgcgctgctgctcagcgccgccagcgacagcgcgttgcggcggctggcgacggattatgccggggcgctgagagagaatgcggatgccagctctctggccttcacagccctgcacgcgcgccgtctcgatctccccttccgcctggcggcgccattaaaccgtgaaaccgccgaggcgctcagcgcctgggccggtgagaaatcgggggcgctggtttacagcggccacggcgccagcggcaagcaggtgtggctgtttaccggccagggctcgcactggcgcactatgggtcaaacgatgtaccagcactcaacggcgtttgccgacacgctggatcgctgtttttccgcctgtagcgaaatgctcacgccgtcactgcgcgaagcgatgtttaaccccgattcggcgcaactggacaatatggcctgggcgcagccggcgattgtcgcgtttgaaatcgcgatggcggcgcactggcgtgctgaaggactgaagccagacttcgccattgggcattccgtcggtgaatttgccgctgctgttgtctgcggacactatacgattgaacaggtcatgccactggtttgtcggcgcggcgcgctaatgcagcagtgcgcaagcggcgcgatggtggcggtatttgcagacgaagacacgctgatgccgctggctcgccagtttgagctggatctcgccgccaataacggtacgcaacatacggtattttccgggccggaagcccgtctcgcagtattttgcgccacgctctcgcagcatgacattaactatcgtcgcctgagcgtaaccggtgcggcgcactccgctttactggagccgatactcgatcggttccaggacgcctgcgcgggactgcacgcggagccggggcaaataccgattatttccacgctcaccgccgacgtcattgatgagtcaacgctcaaccaggcggattactggcgccgacacatgcgccagccggtgcgttttatccagagtattcaggtggcgcatcagctcggcgcccgcgtttttctggagatggggcccgatgcccagttggttgcttgcgggcagcgcgaataccgcgataacgcatactggatagccagcgcccggcgtaacaaagaggcgagcgatgtcctcaatcaggccctgctccagctttacgctgccggcgtcgccctaccgtgggccgacctgctggcgggcgatggacaacgtatcgctgcgccatgttatccgtttgatactgagcgttactggaaagagcgcgtctccccggcctgcgagcctgccgacgcagcgctgtctgccgggctggaggtggcgagtcgcgccgcgacagcgctcgatctccctcgcctggaagcgcttaaacagtgcgccacgcgactgcacgccatctacgtcgatcaactggtacaacgctgtaccggcgatgccattgagaacggcgtggacgccatgaccatcatgcgccgtggacgtctgctgccccgctaccagcagctactccagcgcctgctgaataactgcgtggtcgacggcgattaccgctgcaccgacgggcgatacgtccgcgcccgccccattgaacatcaacagcgggaatcactgctgacggaacttgccggttattgtgaaggttttcaggctattcccgacaccatcgcccgtgccggcgatcggttatatgaaatgatgagcggcgcggaagaaccggtggcgattatcttcccgcaaagcgcctccgacggcgtggaagtgctgtatcaggaattcagctttggccgctatttcaaccaaatcgccgccggggtattacgcggcattgtccagacgcgtcagccccgccagccgttgcgtattcttgaagttggcggcggaaccggcggcaccaccgcgtggctgctgccggaactcaacggcgttccggcactggagtaccatttcaccgatatctcggcgctgttcacccgtcgcgcccagcagaaattcgccgactatgattttgtgaagtatagcgagctggatctcgaaaaagaggcgcagtctcagggtttccaggcacagtcttacgatcttatcgtggcagcgaacgtgattcacgccacccgccatattggccgcacgctcgataatctgcgccccctgctcaagccgggcgggcgcctgctgatgcgcgaaatcacccagccaatgcgtctgtttgacttcgttttcggcccgctggttcttccgctacaggatctcgacgcccgcgaaggtgagttattcctcaccaccgctcagtggcaacaacagtgccgccacgccggattcagcaaagtggcgtggctaccgcaggatggcagcccgaccgccgggatgagcgaacatatcattctcgccacgctgcccggtcaggcggttagcgccgtaacattcaccgcgccatcagaacccgtgttggggcaggcgctgacggataacggtgattatctcgccgactggtctgattgcgcaggtcagcccgaacggtttaacgcccgctggcaggaggcctggcgtctgctttcacagcgtcatggcgacgctctgcctgtggaaccgccccccgtcgccgccccggagtggctggggaaggttcgcttaagctggcaaaacgaagccttttcccgcggtcagatgcgcgttgaagcccgtcatcctgctggcgagtggctgccgctatcgcccgccgcgcctcttcctgcgccgcagacgcattatcaatggcgctggacgcccctcaacgtcgccagcattgaccaaccgcttacctttagcttcagcgccggtacgcttgcgcgcagcgacgagctggcgcaatacggcatcattcacgatccgcacgcatcttcgcgactgatgattgttgaggagagcgaggatacgctggccttagcggagaaagtgatagcagcgctcaccgccagcgcagccggattgattgtggttactcgccgcgcgtggcgagtcgaggaaaatgaagcactctctgcatcccatcacgcgctatgggccttgcttcgcgtcgcggccaacgaacagccggaacggttgcttgccgccatcgatctcgccgaaaaccccccgtgggaaacgctgcatcaagggttgagcgcagtctcactatcacagcgctggctcgccgcacggggtgacaccctttggctcccttcactggcgcccaatacgggatgcgccgctgaattaccggcaaacgtgtttaccggcgatagccgctggcatctggtgaccggagcgtttggcggattaggccgccttgccgtgaactggctcagagaaaaaggggcgcgacgcatcgccctgctggcgccgcgcgtggatgagtcatggctacgcgatgcggagggcgggcagacgcgcgtctgccgttgtgatgtgggcgatgccgggcaactggccacggttcttgacgatctggcggccaacggcggcattgccggagcgattcatgccgctggcgtattggctgacgcgcccttgctggagcttgacgaccaccagctggccaccgttttcgcggtaaaagcgcaggcggcaagccagctgttgcaaaccctgcgcaaccacgacggacgctatcttattctctactcttccgctgccgccaccctcggcgcgccgggtcagagcgcccatgcgctggcctgcggctacctggacgggctggcccagcagttttccacccttgatgcgccgaaaacgctctctgtcgcctggggcgcatggggagaaagcggtcgggcggccacgccggaaatgctggcgacgctcgccagccgtggtatgggcgcgttaagcgatgccgaaggctgctggcacctggaacaggcggtgatgcgcggcgccccgtggcgactggcgatgcgcgtttttaccgacaaaatgcccccgttacaacaggctctgtttaacatcagcgccacagaaaaagccgcaacgcctgtcattcctcctgctgatgacaacgcctttaacggcagcctgagcgatgaaacggcggtgatggcatggctgaaaaagcggattgcggttcagctaaggctgagcgatccggcgtcactgcgtccaaaccaggatctgttgcaactcggcatggactcgctgctcttccttgaactcagtagcgatattcagcactacctgggcgtacgcatcaatgcggaacgggcgtggcaggatctgtctcctcatggactcacgcagcttatctgttctaagccagagacgacgcctgccgcttcgcagccggaagtgttgcagcacgacgccgacgagcgttatgcgcccttccctttgacgcccattcagcacgcctactggctggggcgaacccacctcattggctatggcggcgtcgcctgtcacgttctgtttgagtgggataaacgccacgatgagttcgatctcgccatactggagaacgcatggaaccagcttatcgcacgccacgacatgttgcgcatggtggttgatgccgacgggcagcagcgagtcctggcgacaacgccggagtatcacatccagcgcgacgatctgcgcgcgctttccccggaagaacagcgcatcgcgctggaaaaacggcggcatgaactgagctatcgcgttttgcctgccgaccagtggnnnnnnnnnngtggcctctttttgagctggtggtcagcgaaatcgacgattgccattaccgcctgcacatga

SEQ ID NO: 135613 - DNA, 6210 bp, Enterobacter cloacae
  misc_feature (1669)..(1678): n is a, c, g, or t
  misc_feature (6110)..(6119): n is a, c, g, or t
atgatttctggcgcaccatctcaggattcgctgttaccggacaaccgccacgcggctgattaccaacaattacgcgagcggctcatacaggaactgaatttaacgccgcagcagttacatgaagagagcaacctgatccaggccggcctggattccataagattgatgagatggttacactggtttcgtaaaaatggctaccgccttacccttcgcgagctgtatgccgcccccacgctggcggcatggaaccagttaatgctcagccggtcgcctgagaacgcggaagaagaaacgccgcccgacgaatcatcctggccgaacatgaccgaaagtacccccttcccattgacgccagtacagcacgcctacctgacgggccgcatgccggggcagaagcttggcggcgtgggttgccacctgtatcaggagtttgaaggccattgtctgacggcgtcgcagttggagcaggccatcacgaccttgctgcaacgccacccaatgctgcatatcgcctttcgccccgacgggcagcaggtctggctaccgcaaccttactggaacggcgtcaccgttcatgatttacgccataacgacgctgaaagccgccaggcctatctggacgcactgcgccagcgcctgagccaccgtcttttacgcgtggaaatcggcgaaacgtttgattttcagctgacgctcttgccggacaatcaccaccgcctccatgtcaatattgacctgctgattatggatgcctccagctttacgcttttcttcgatgagcttaacgccctgctggccggagaatcgctgccggctatcgacacccgctatgatttccgctcgtatttgctgcaccagcagaagatcaatcaaccactgagagacgacgcgcgcgcttactggctggcgaaagcatcgacgcttccccccgcgcccgtcttgccgctggcctgcgaacccgccacgctacgtgaagtccgtaatacccgacgccgcatgattgtcccggcaacacgctggcacgcctttagcaaccgggccggcgagtatggcgtgacgccgacaatggcgctggcgacctgtttttctgccgtgctggctcgctggggcggcctgacgcgtctgctgcttaacatcaccttattcgaccgccagccgctgcacccggcggttggcgcgatgcttgccgacttcaccaatattcttctgctggataccgcctgcgatggcgataccgtcagcaacctggcgcgtaaaaaccagctcacgtttacggaggactgggagcatcgccactggtccggcgtcgaattactccgtgaactcaaacgccagcagcgctacccccacggcgccccggtggtatttaccagcaatctggggcgttctctctacagcagccgcgcagaatcgccgttgggcgagccggaatggggcatctcgcaaacgccgcaggtctggatagatcatctggcgttcgagcatcacggcgaggtctggctacaatgggacagcaacgacgcgctgttccctccggcgttagtcgaaacattgttcgacgcctactgccagttgattaaccaactctgcgatgacgaaagcgcctggcaaaagccgttcgcagatatgatgcccgccagccagcgcgcgatacgcgaacgggtcnnnnnnnnnnaacgggtcaacgccaccggcgcccccattcccgaaggcttgctgcatgaaggcattttccgtatcgctctgcaacagccgcaggcgttggcggtaacggacatgcgttatcagtggaattatcatgagctgacagactatgcccgccgttgcgcgggcaggttaatcgagtgcggggttcagcccggcgataatgtggctatcacgatgtcgaaaggcgcaggacaacttgttgcggttctggccgtcctgctggccggggcggtttacgttccggtttcgctggatcagcctgccgcacggcgcgagaaaatctacgctgacgccagcgtccggctggtgctcatttgtcagcacgacgccagcgccgggtcagacgatattcccgtccttgcctggcagcaggccattgaggcggagccgatcgccaacccggtagtacgcgcccccacgcaaccggcctacattatctacacctccggctctaccggtacgccgaaaggggtagtcatttctcaccggggagcgcttaacacctgttgcgatatcaatacccgctatcaggttggcccgcatgacagggtgctggccctctccgccctacattttgatttatcggtttacgacatttttggcgtactgcgcgcgggcggcgcgctggtgatggtgatggaaaatcaacggcgcgatcctcacgcatggtgtgagctgatccagcgccatcaggtcacgctctggaacagcgtcccggcgctgttcgatatgctgctgacctggtgtgaaggtttcgccgacgccacgccggaaaacctgcgcgcagtgatgctttccggcgactggatcgggcttgacctccccgcccgttatcgggccttccggccacaaggacaatttatcgcgatgggcggcgccaccgaggcgtctatctggtctaacgcctgcgaaattcacgacgtccccgcccactggcgttccatcccttacggttttccgctaaccaaccaacgctaccgggtggtggatgaacagggccgggactgccctgactgggtgccgggtgaattatggattggcggcattggggtcgcggaaggctatttcaacgatcccctgcgtagcgagcagcaatttttgacgctcccggacgagcgctggtatcgcaccggcgatctcggctgctactggccagatggcacaatcgagttcctcggtcgtcgcgacaagcaggtcaaagtcggaggatatcgcatcgagctgggcgaaatcgaaagcgcgctcagccagctggcgggggtgaaacaagcaaccgttctggcgatcggcgaaaaagaaaaaacgctggcggcatacgttgttcctcaaggcgaggctttttgcattaccgatcatcggaacccggcactgccgcaggcgtggcacacgcttgcgggaacgttgccctgttgcgccatctcgccagagatctccgcagaacaggtagccgatttccttcagcatcgcctgctaaaactgaagccgggtcacaccgctggcgccgatcctctccccctgatgaactcactcgctatccagccgcgctggcaggccgtggtggaacgctggttagcatttctggtgacacaacggcgactgaagcccgctgctgaaggttatcaggtctgcgctggtgaagaacgcgaggatgagcacccgcacttcagcggacatgatttaacgttatcgcaaattcttcgcggtgcccgtaacgaactgtcgttactgaacgacgcgcagtggtcgccggaaagcctggcctttaaccatccggccagcgccccgtatattcaggaactggcgacaatttgccaacagcttgcacagcgcttacagcgcccgatacgcctgcttgaggtgggaacccgcactggccgcgccgcagaatcgctgttagcacagctcaacgccggacagattgagtatgtcgggcttgagcagagccaggagatgctgctgagcgcccggcagaggctcgccccctggcctggcgcccgtctgtccctctggaatgcagacacgctggcggcgcacgctcactcggcggacattatctggcttaataacgccctgcatcgtctgctgccggaagatcccgggctccttgcgacattacaacagcttgccgttcccggcgcgctgctctacgtgatggagtttcgccagttaacgccgtccgccctgctcagcacgctcctgttaaccaatgggcagccggaggccttgctgcataacagcgccgactgggcggcattatttagcgcggccgccttcaactgtcagcatggcgatgaggtcgcggggttacaacgcttcctcgtacaatgtcctgacaggcaggtgcgccgcgatccccgtcaacttcaggccgccctcgctggacgtctgccggggtggatggtgccgcaacggatcgtcttcctcgacgccttaccgctgacggctaatgggaaaattgactaccaggcgctgaagcgtcgtcatacccctgaagcggaaaacccggccgaagcggatttaccccagggcgacattgaaaaacaggttgccgccctctggcagcaactcttatcaactggcaatgtcaccagagaaaccgacttcttccagcaaggcggcgatagcctgctggcgacccgtctgaccgggcaacttcatcaggcaggttatgaagcgcaattaagcgacctgtttaatcatccccggctggcggattttgccgccacgctgcggaaaaccgacgtcccggtcgaacaaccattcgtccactcccctgaagatcgctaccagccctttgcgcttaccgacgtgcagcaggcttacctggtggggcgtcagccgggctttgccctgggcggcgtcggctcacatttctttgttgaatttgaaattgccgatctggacctcacccggctggagacggtctggaaccgattaatcgcccgccacgatatgctgcgcgccatcgtgcgtgatggacagcaacaggtgctcgaacagacgcccccctgggtgatacccgcacacaccctccatacgcctgaagaggcgttgcgggtgcgcgaaaaactggcgcatcaggtactcaaccccgaagtgtggccggtattcgatctccaggtcggatacgtggacgggatgcctgcccgcctgtggctgtgtctggataacctgttgcttgacggtctgagcatgcagatcctgctggcggagctggagcacggctaccgctacccgcaacagctgcttccgccgctgcccgtcaccttcagggattatctgcaacaaccctcgctacagtcgcccaatccagattctctggcatggtggcaggcgcagcttgatgatattcctccggcgcctgcgttgccgctgcgctgcttgcctcaggaggttgaaacaccgcgcttcgcccgcctgaacggcgcgctggacagcacgcgctggcatcggctgaaaaaacgggcggctgacgcccatctcaccccgtcggccgtactgttgtcggtgtggtcaacggttctctctgcatggagtgcacagcctgagttcacgcttaaccttacgcttttcgacaggcgaccgctgcacccgcaaatcaaccagattctgggcgatttcacctcgctgatgctgctgagctggcatcccggcgaaagctggctgcacagcgcgcagtcactacagcagcggctgagccagaacctcaaccaccgcgatgtgtcagccatccgcgtgatgcgtcaactggcgcaacagcaaaacgtgcctgccgttccgatgcccgtcgtctttaccagcgcgctgggctttgagcaggataacttcctcgcccggcgtaatctgctcaaaccggtctggggcatctcccagacgccgcaggtctggctcgatcaccagatttatgaatccgaaggcgaactgcgctttaactgggattttgtcgccgcgctgtttcctgccgggcaggtggagcgccagtttgaacagtattgcgcattgctaaaccgaatggccgaggatgaaagcggctggcaactgccgctcgccgcgctggtgcctcccgttaaacacgcagggcaatgcgcagagcgctcaccgcgcgtatgccctgagcaatctcagccacacattgcggcggacgagagcaccgtcagcctgatttgcgacgccttccgcgaggtggttggcgagtctgtcacgcccgcagaaaacttctttgaggcgggcgcaacgtcgctgaatctggtgcaactgcacgttttgttacaacgtcacgaattttccaccctgacgttgcttgacctcttcacccacccttctcctgctgccctggccgattatctggccggcgtcgccacggtggagaaaacaaaacgacctcgccctgttcgccgtcnnnnnnnnnnttcgccgtcgtcagcggcggatatagcgcgaagcaaactgattttccccggaacgccatcgcgaacgcatggcgttccattgactttgtga

SEQ ID NO: 135614 - DNA, 150 bp, Enterobacter cloacae
atgcaggaagccagaagacgcctggccaacggcaatacctccgtcatgacggtggcggccgatctgggctatgccaacgccagccatttctctgccgccttccagaaacagtttggcgtaaccccttcgacctttaaacgcgtgatgtaa

SEQ ID NO: 135615 - DNA, 708 bp, Enterobacter cloacae
  misc_feature (689)..(698): n is a, c, g, or t
atgacggagtcaccgcaaacgcaatctgaaatctctattcaccagttggtggtcgggaaacctgcaaacgatggcaatattcctgctcagtgtgaactgctgcgctgttcgttgcaggaaggtatggatattttgctctggaggggccattttgcgcggcctgagacgttgcagctacacgacgatctgggcaggattaacttctcgtgcatcctggaaggcacttcgcgctttgcgattcagggactccggcgccacaccgactgggagcttgcgcgcaatcgccattacattacccatacgccagactgtcgcggcagcgcctcctattgtggccgattcgagagcattaccctctccttcagccctgaaaccctcgcgctgtgggtgccggatattagcgcggtcattaagaataagatcgactcccactgctgttgccagcagcagcgttgtaatgctgaaacccacttaacggctcaggccttgcgtcacgcgctgatgcgcatgcacggcggcttcagtcatgaacaaaagccgtcgacgctatggttgcaggggcaaagtctggtcatgctcagtctggtgctggatgaacatcgcgaagacgccagttgcctctcctgccacttcaacccgatggaacgccagaaactgctgcgggcgaaggatctgctgctggctgatcnnnnnnnnnngctgatctga

SEQ ID NO: 135616 - DNA, 1713 bp, Enterobacter cloacae; identical to SEQ ID NO: 104448

SEQ ID NO: 135617 - DNA, 1803 bp, Enterobacter cloacae; identical to SEQ ID NO: 104449

SEQ ID NO: 135618 - DNA, 1281 bp, Enterobacter cloacae; identical to SEQ ID NO: 91728

SEQ ID NO: 135619 - DNA, 1305 bp, Enterobacter cloacae; identical to SEQ ID NO: 91729

SEQ ID NO: 135620 - DNA, 1263 bp, Enterobacter cloacae
atgtcccttaccgacgcaaaaatccgcaccctcaagccttctgataaaccctttaaagtctccgattcccacggtctgtatctgctggtcaagccgggtggctcccgccactggtatctcaaataccgtattagcggtaaagaatcccgcattgcgctgggtgcctatcctgccgtctccctgtctgatgcgcgacagcaacgtgaaggtatccgtaaaatgctggcgctgaatatcaacccggtacagcagcgggctgctgaacgtggctcacgaacaccggataaagtttttaaaaacgtggcgctggcgtggcataaaagtaacaggaaatggtcgcagaacaccgccgaccgtctgcttgccagcctgaacaatcacatctttccggtcatcgggaacctacctgtatcagaacttaaaccccgtcatttcattgacctgctgaaaaggatcgaggaaaaaggtctgctggaggttgcgtcccgcacgcggcagcacctgagtaacataatgcgccatgcggtccatcaggagttaatcgatacgaaccctgcagcaaaccttggcggcgtgaccacacctcctgtcagacggcactatcctgccctgccgctggagcggctgcctgaactgcttgaacgtattggggcatatcatcagggccgtgaactgacccggcatgccgttctgctgatgctgcatgtgttcattcgctccagtgaactgcgtttcgcccgctggtcagagattgatttcacaaaccgagtctggacgatacccgcgacgcgagaacccattattggcgtgcgttattccggccgcggggcaaaaatgcgaatgccgcatatcgtccccctctcagaacagtccatcgccattctgaaacagattaaggatatcaccggtaataatgaactgatcttccccggcgaccataacccgtataagccaatgtgtgaaaacacggtcaataaggcactgcgggtgatgggttacgacacgaaaaaggatatctgcggtcacggcttccgggcaatggcatgcagtgcgctgatggaatcgggtttatgggcaaaggacgcagtagaacgccagatgagtcatcaggagcgcaataccgtgcgcatggcttatattcacaaggcagaacacttggaagcccgcaaggcgatgatgcagtggtggtcggactatctggaagcatgccgagaatcttatgcaccgccttatacaattggtaaaaataagtttatcccatag

SEQ ID NO: 135621 - DNA, 957 bp, Enterobacter cloacae
atgaaaaaattgtttatatccctgctggcggtactgtctgcctcagtagccagtgctgctgattttcctgttactattgaaagttgtgggactcctgtcacattcgccggtccgccgaaaagggctgttatcaacgaccttaatatgtcagaaatggcgtttgcactgcatttacaggatcgtattgttgggctgactggtattagtggctggtacaaaatgacgccggaatttaaaaaggcgatgggctcgatcccagaactggcacccaaatatcccactctggaaacattgctggcagccgaacctgatttctttttcgctggctggaactatgggatgaaggtgggtggcgaagtgacgccggatacgctaagcaaatatggcatcaagacttttgttctgagtgaaagctgtgtgttcaccactgcgcacaaaaataaagccaccatggatctgctgtataacgatgtcctcacgctgggtaagatttttggcaagcgcaatgacgcacagtccctggtcagcggctggaaaaagaggttgaatgaactgccgaagccagcggcaggtacccgtcctttaaaggtgttcgtctacgactcaggcgaggataaaccgtttaccagtggtaaatatgcgatgcctacggccataattgaggcggctggtggtaaaaatgtaatggaggcggtggataccagttggggaacgacttcctgggaaagcgtggccgctactgagccggacttcattattttgttggattaccagacgggcagcggtgcggatgcactgcgtcattttcttgagaatcatccgttaatgaaactgactccggctgttcagcatcatcgatacctgaaattacaatatgctgaactgacaccggggcctgccaacgttgatgcggtggaaaaactcgcgcgggcgatgtacccgtcaacggcgaagtga

SEQ ID NO: 135622 - DNA, 792 bp, Enterobacter cloacae
atggtaggggcgttgttacaaactaccacccgtaacgatctggccgatccttttttgttcgggctatcctccggcgcgtcagcgggggcggtgctggtgatcacccgttttggtgatcgacttggtgtattaacgctccccgtatcggcgtttgttggtggtgtgtgttccgccatagcagtaatgctgttgtttcattttaaaaagcaacgcggagctgagcatctaattctctgcggtcttgccatctcttttttgttcggggcgctgaccagttatttcattttttcgggcgatcagcgagctgccagctctgtgctgttctggtcactgggtggtctgggattagccacctggaataatttgcctttcgcagtgttcagcctggtgttgctgtttgcttttgtcctgttacggtggcgctctctggatggtgtgctggcaggagaacagacagcgttgtcgctggggattaacgtgagtcgtctgcgcatcgagatttttctttgttgcgcactggcaacatcgttgatggtggcattaaccggcgtgattggatttgttggcttaatggtgcctcatctgtgtcggcattttgcaggagttaagcatctgttgttgttacctttgtgtggcgtctggggtgcaatattactgtgtggcggcgatatagtcagccggacgatactggcaccgcaggaactaccaattggcattattacggcgggcattggagggttgtttattatcatgttactcgcacgaaattcgtccagaaatacggcctgttaa

SEQ ID NO: 135623 - DNA, 1245 bp, Enterobacter cloacae
atgcagcgcgtgcccatctatgtgctgagcgccaacggcgaacgcagtccggtcaacgatcacccgctgtgcctgttcaatccgcaggaagatgcgcagatcctccagaaagagtatggcatcccgacccgctatctcggcaccattatgtcgccgtgggcggccaagcgcctgcacgagtttggcggcgatatcactaaattccgcgtggttaaagtctggccatcgattctcgagcaggttgccatcgccaaaaccgaaccgggtgatgaaaacaaccaggatatttcagcgctggtcggtaaggtggatatccgtaagctggaacactatgcgcagaacgacccggacgcctacggctactccggtgcgctgtgccgcgccaaccaggggattatggagttcgtcgagatgtttaaagcgccgattaaggtgctgcatccgctgctgaccgccacccaggaaggtaactataacggcaccgaagggatctccgccctgccgtttaacgggatcatccttgctcactccaacgaatcggaatgggtgaccttccgtaataacaagaacaatgaggccttcctcgaccgcgtctatatcgtcaaggtgccttattgcctgcgtatctccgaagagatccgcatctatgaaaaactgctcaacaacagtgagctgacccatgcgccctgcgccccgggcaccctggaaaccctggcgcgcttttcgattctgtcgcgcctgaaagagccggagaactcgagcatctactcgaagatgcgggtctatgacggcgaaagtctgaaagataccgacccgaaagcgaagtcctatcaggagtatcgcgattacgccggggttgatgaagggatgaacgggctctccacccgctttgcctttaagatcctgtctcgggtatttaacttcgaccacgtcgaggtggccgctaacccggtgcatctgttctatgtgctggagcagcagattgagcgcgaacagttcccacaggagcaggccgagcgctatctggaattcctcaaaggctatctgatcccgaaatacgccgagtttatcggcaaagagatccagaccgcttatctggaatcctactccgagtatggacagaacattttcgatcgctatgtcacctacgctgacttctggatccaggatcaggaataccgcgatccggacaccgggcagctgtttgaccgtgaatcgttgaaatgccgagctggagaaaattga

SEQ ID NO: 135624 - DNA, 258 bp, Enterobacter cloacae
gtgctgcgtgccagagccaacaacagcggacgtaatccgaactggaccagctatgagaaactgcgcacggttattgagaagaaaatgttctccaataccgaagagctgttgccggtcatttcgtttaatgccaaaacctcaaccgatgagcagaaaaaacacgacgactttgtcgaccgcatgatggagaaaggctacacccgcaaacaggttcgcctgctgtgcgagtggtacctgcgggttcgtaaatcgtcctga

SEQ ID NO: 135625 - DNA, 1284 bp, Enterobacter cloacae
atgacctggttcatagaccgacgcctgaacgggaaaaacaaaagcgccgtcaaccgccagcgctttttgcgccgttataaggcgcagattaaacagtcgatctccgaggccatcaacaagcgctcggtgaccgatattgagagcggagaatccgtctcgatcccgacggacgatatcaacgagccgatgtttcatcagggtcgcggcggcctgcgcaaccgcgtccacccgggcaacgaccattttgtgcaaaacgaccgcattgagcgcccgcagggtggtggcggcggcggcggtagcggtcaggggcaagccagcgccgatggtgaaggaaaggatgagtttgtcttccagatctcgaaagatgaatacctggatctgttatttgaagatctggccctgccgaacctgaagaaaaaccagcaccggcagctgaacgagtttaaaacccatcgcgcgggttttacctccaatggggtgccagccaacatcagcgtggtacgttcactgcagaactcgctggcccgccgtacggcgatgaccgccggcaagcgtcgtgaactgcgcgccctggaggaggatctggaagccatcagccgcagcgaaccggtgcagctgctggaggaggagcgcctgcgcaaagagattgccgaactgcgggctaaaatagagcgggtgccgtttatcgacacctttgatttacgctacaaaaattacgaaaaacggccggagccttccagccaggcggtgatgttctgtctgatggacgtctcaggctcgatggaccaggccaccaaagacatggccaagcgcttttatatcctgctgtatctgttcctcagccggacttataaaaacgtcgacgtggtctatatccgccaccatacccaggcaaaagaggtggatgagcacgaattcttctattctcaggaaaccggcggcaccattgtctccagcgccctgaagctgatggatgaagtagtgcaggcccgctatgatccggcgcagtggaacatctacgccgcccaggcgtcggatggcgacaactgggccgatgactccccgctgtgccacgaactgctggcgaagaaaattctgccggtggtgcgttattacagctatatcgaaattacccgccgggcgcatcagaccctgtggcgcgagtatgaacacctgcaggcgacctttgataatttcgccatgcagcatattcgcgaccaggaggatatctacccggtattccgcgaactgtttcacaagcagtcatctaaaagtgaagcttaa

SEQ ID NO: 135626 - DNA, 564 bp, Enterobacter cloacae
atgatgaaatatgtcttatcgctggtggtggtggcgatactcgcaggatgtaccagcacgccaaacttgccgcctcgggataccattgtggcgatgaaacccacaaagtccggtattgtcgccagctcagcgaaatacagttaccgctttgtccgtgacggtgtgcctcaggaatatcagcgttataagaccttttatgaacgctttcaccaacaggcttccggcgtgcgggttaactttgtcgtggtacaacatgaggtgacggcggaatatctggtggtgatggatcagcgcaaactggatgccgggcagcatagcgagctggtgaatcagtatcatgcggtgcaaattgataacgatcgcctcggggtgttgtttaaagcgacaggattttggactgcatcggacgcgtcagatctggccgccgcctaccagttagcgcaccccgttgtggtatcaatcaatgataagaccaaaacgattagctcgcttggcgccgttgccctggccccgttgtttccgttttacatgatgtatggatgtgccaccgggccttgtgtctga

SEQ ID NO: 135627 - DNA, 483 bp, Enterobacter cloacae
atgacccctttttatcaattgacggctacccgcctgcgcggccagcccctctccatggctgactatgctggcaaggtggttctggtggtgaatacggccagccattgtggcttcacaccgcaatacgctggcctggaagcgctctacaaaaagtacgcggctcaggggctggtagtgcttggtttcccgtgcaaccagtttggtaagcaggaacccggcggtgcggatgaaatcgagcagacttgtcacgttaactacggcgtgagcttcccgatgtttgagaaagtggacgtcaacggccccgccgcacacccgctgtttcgttatctgaaacaagcgttgcccggcgtgctcggcggacggatcaagtggaatttcaccaagttcctcatcggtcgcgacggcacacccctcacacgttttgcgccgttcacgacgccggagaaaatggaagcctccattgtcgcggccctcacgcgctga

SEQ ID NO: 135628 - DNA, 312 bp, Enterobacter cloacae
atgattgtcaggacctggcacggctgtgtgccattgcaacatgctgaggggtttgcccgccacctcgagcggaccggcgtggaacacgctcagagcatcgccggcaaccggggggcgctggtgcgccaggaaaaccagggcgaatgggcgcatttctttcttgccacctactggcaggatctcgcggcggtcaaagccttcgctggcgaagactatcacgtcgcggtcacctatccggacgacgacgcattcgaactcctctccgacccctatgtgtttcagcatgaagtcgaggccgtgtcgccgctgtag

SEQ ID NO: 135629 - DNA, 882 bp, Enterobacter cloacae
atgacagcagaatttcattgggatgatgcgcgcatcttcctcgccatcgcccgggcgggaacgctgagcggcgctgccgacaagatgaacatggggattgccacggtctcccgccggctggatcggctggagcaggcgttgaacgttccgctcttcagccgccatcagagcggctaccgcctgaccgacgatggcgaagccctgctcgcgcgggcggaggcgctggaatacgctggccttgcgttcggcgaagcggcgcaactgcaggggcatgtcgccggggttgtccgtctggccacctcggataacctggccacgcattttattctgccctccctgaaagggctcctggaccattatcccgagctgcgggtggaggtgctgagcggtgtgcagccggtgaacctgcaccgtcgggatgccgatctggcgatccgcatggtcaagcctgaggccgggcatctgacgttaaagcggctggggacggtggggtttggcgtctatggcgccgccgactgtctggtcggcgcggacggcctgtcgctgagcgaggcggactttgtgggttggccggaaactcaccagcacctgccggccgcccaatggatcacgcgcaccctgcgcggccggccgtgtaaagtcgaagccaatacgctcgtggcccaggtttccgcagtatccgcgggcctcggattgggcgtcctgccgcactttatggcgcgggccagcggcctgcagtgcctgcagccggagatcggcgcggatcagaccctctggctggtgatgcattctgacctggccggatccagacgcgtgcgggttctcgccgaccatctcatcgctctctttgcggaccatcaagatcggctggcgatgccctga

SEQ ID NO: 135630 - DNA, 1176 bp, Enterobacter cloacae
atgaaagagattgctttacccctccacccggcgccggcgcgcgtctggattgccgtcgttgcgctcgggatctgcgccttttcgatcgtcaccagcgaactggcgccggtgggcatgctcaacgccctggcggcggattttcaccagacggaatccggcgtgggcctcgccgtcaccgcctatggctgggtaggcgccctggcggctctgctttccggcgcaatgccggcgcgtatttcccgcaaggcgctgctggtcgggctgatgctgatcctcgcgttttcctgcctcgccgcaacccggtcttattcgatgttcgccctgatgagcgcccgcatgattggcgccctggcgcatggcgccttctgggccttaattggcattgtcgccgcgcagctggtgccgccgcaccggctggggctggccacggcgatcatttttggcggcgtatcagcggcaagcgtagtgggggtgccgctggcgagctttatcgccaccctggcgggctggcgacccgcgtttatgtcgatggccttgctgtcactagccgccgctgcggtgctgtgctcgacgctgcccccgctggccgccccagcccccgtcaggctgcgtgtttatcgcgatatcttccgcaatccgctgctcggtggcctgtatggcgccacggcctgcatcattaccgctcactttgccgccttcacctacattgaaccgctgctgataaatctgcagggagtcccggcgaccgccctctccggcctgctgctgctgtcaggggtttccgggctgctgggtaacgttatcgcgggtaagcttatcgatcgtcatctgaaggggctgattttcgctgcgctgctgctgagcgggggcgcgctggcgctccttggcgccgcccgtcttgcgccactgccgttctgttttagcgggctactgttagccctgtggggcgccggcatcgcgattgtgttcgtcggcttacagacctggctgctgcgcagcgcgggcgcggtcgcccagccggcgtcagccatttatgtggccatttttaatgccgccatcggcaccggggcgtttgtcggcggccagctgatcgcctcagctggcctgtcgggaatggtgtggcaggcgcttagatttgcgccagcccgccgtcgacatagatctccgcggcgttaa

SEQ ID NO: 135631 - DNA, 561 bp, Enterobacter cloacae
gtgttaagcgaccttgacgcggtatttgcgaccattgccgaagagtccggccggctggatgtgctgttcgccaatgccggcggcggagacatgctgccgctgagcgccatcaccgaagcacacgtcgaccggattttcgccaccaacgtgcgcggggtggtgttcaccgtgcaaaaagcgctgccgctgctcaccgacggcgcctcggtgattttgaccggctctacggcggcggtaaaagggacggctaacttcagcatctatagcgccagtaaggccgcggtacgcagcctggcgcgctcctgggcgctggaggttagcgaccgcgggatccgcatcaatgtggtcagcccggggccggtacgtaccccgggtctgggagggctggtggcggaggcggaccgccagggcttgttcgatgctctggcggccggcgtaccgctcgggcggctgggcgagccggaggagattggccggacggtggtatttttagcgtcggatgagtcgagctttattaacgccgcggagatctatgtcgacggcgggctggcgcaaatctaa

SEQ ID NO: 135632 - DNA, 870 bp, Enterobacter cloacae
atggaccggttttcagctctcaaagccttcactcgcgttgtcgaagccggcagctttacccgcgccgcggactcgctgaatatgcccaacgccaccctcagcaaaaccattcagcaactggaagcgcatcttggggtttccctcctgcagcgcaccacgcggcgtattaccgtgacgccggaaggacgggagtactatgaaaaagcccgctgtctgctggaagacctggaagagatcgacgcgtctttcaataccgcccgcaataagccgaagggccatctacggatcgccatcggcggggactttatgacctcctggccggatatccgtatcgatttgcaggtggccgataagcccgcggacctcatcagcggcaatattgactgcgccatccgcggcggtccgatggaagactcgacgctgatcgcccgtaaaatcggcgaggcgacgctggtcacctgcgccacccctggctatcttcagcgctacggcacccccgcctcgccggatgaactacatcttggccaccggctcatcagctatctgtcgccggccagcggcagagcgtttccgtttcgctttacgcgtcacggcgtcagcaccgagctgaagacagagccccatctcggcatcaatgagagcaacgcgcatattgccgccggcgaggcgggcttaggcattgtgcagacctttacctattcgctgaaaccggcgctggcgagcggcgaactggtggagatcctcagcgcctggcgcccggccccctatccttttcacgttgtctatgcccggcaccggcacgtcccgccccggctccgcgtctttattgactggctggcggcggtttttccggccgcggtgcagggatag

SEQ ID NO: 135633 - DNA, 780 bp, Enterobacter cloacae
gtggacttgtcctgcccgcagcggcagcgaaagctgatggcgctgctgccggtgagcgaggtctggggcatcgggcggcggatcggcaaaaagcttgaagcgatggggatcggcacggtactccagctggcggagagcgatatccgctttatccgcaagcacttcacggtggtgctcgaacgaacggtacgggagctgcgcggcgagccttgcctggcgctggaggagtttgcccccgctaagcaggaaattatctgcagccgctcgttcggggatcggattacggcctatgaggatatgcgccaggcgatctgcagctatgccgcgcgggcagcagaaaagctgcgcggtgagcatcagtactgccggttcgtctccgcctttgtcaaaaccagccccttcgcgctgaatgaaccctattacggcaacagcgcctcgctaaagctgctgacgccgacccaggactcccgggatattatcgccgcggcgacgagctgtctggatgccatctggaaagcggggcatcgctatcagaaggccggcgtgatgctcggcgatttctacagccagggcgtcgcccagctgaatctgttcgacgagcttgctccgcggcacaacagcgccagactgatgcaggttctcgatcagctgaatgcgaaaaacggcaggggggcgctctattttgccggccaggggatccagcagcagtggcagatgaagcgagagatgctctcgccgcgctacaccacgcgatacggcgacctgctccgcgtcagataa

SEQ ID NO: 135634 - DNA, 462 bp, Enterobacter cloacae
atgttcgcgcattgtgatgtgaacgccttctatgccagctgtcagaccgccttccggccagacctgaaggggcggccggtggtggtgctgtcgaacaacgacggctgcgtgatcgcccgctcggcggaggcgaagccgtttgtgaaaatgggcgaaccctactttaagcagaaggctgcgtttcttcgccacggcgtcgtggcgtttagcagtaattatgagctgtatgccgacatgtccagccgggtgatggccaccctggaagagctcaccccgcgctgcgaaatttacagtatcgatgaggccttttgcgatgtcagcggtgtgcgtcattgcagagatctgaccgattttggccgcgaaatccgcgccacggtgctgcagcgtacccatctgacgctgggcgttggcatcgccccgaccaaaaccctggcgaagctggccaaccacgcggcgaagtag

SEQ ID NO: 135635 - DNA, 420 bp, Enterobacter cloacae
atgaacgtttacacgccggttgagctacgtcagattgtctcctttcccttttttgccgacctggtgcagtgcggctttcccagcccggctcaggactatgttgagaagcgaatcgacctcaacgagctgctggtgcagcatcccagcgcgacctattttgtcaaagccgctggcgacagcatgatcgatgccggcattgacgaaggcgatttgctggtggtggacagcgcgcgtaaagcggagcatggcgatatcgtgattgccgccgtcggcggcgagtttacggtaaagaagctgcagcttctgccgcgggtgcagcttaacccgatgaacccggcctattcgcccatcgtggtcggccgcgaggagacgctcgatattttcggcgtcgtaacctacatcatcaaggcggcgggctga

SEQ ID NO: 135636 - DNA, 243 bp, Enterobacter cloacae
atgtttgtggaactgatttatgacaagcgcaattttgccgggctgccgggcgccagagaggccattcttaacgagctgaccaaacgcatgcagcgcattttcccggaggcggaagtgcgggtgaagccgatgatgacgctgccggcgatcaacaccgacgccagcaagcatgaaaaagagctgatcagccgcacggtgcaggagatgtttgaagaggcggatatgtggctcactgaagagtga

SEQ ID NO: 135637 - DNA, 1140 bp, Enterobacter cloacae
atgatgcacgatgcaaccatgcagggttccccacgcaagaaatttaataaaataagggagctcaacagacggcggaattactttactaagaaagtacgtaatgccctgcgggtgggggtggcgaaagcactctgggatcgccgacgccgtcagccggtagatttgtcgtctgcgaaaaccgtcctgttgatgcgcaatgagggggcggtcggcgatgtagtggtggattccgcgctggtgaaatgcctgcatcagtcaggctatatcgttgattttttgctgacgacctctaacagtcaggtgatgcgttataacccgcggatccgccatatttatgaagctgacccggtcacgtccgccgattttttgcgtaaatttaatcataacgttcctcgcgacgttattaatgaactggctaataataagtacgatattattattgacccttcgctgttcgatattcccgtgcatcgcctgcggcttttccgacaaataaaagccaaatcagtgctcgggtttaataaatggccatcgattaagcactactcccactcttttgattttgactgccagcgctggcacgtgacgaaaacgttcgagctgatcgccgattatctccaactggacacccgcgggctggacgcttacgacctggcggtgcccgggccgattatgcaggaggtggcgcagtatctggcgtcgctaagcggaaaagcggtggtgattaatatttttgccggccatgccgaccgcagtctctcgcagacgcagctggcggaactgctcgacaaactgctggcccgccatccggggagcgcggttattctgctcgatcaccggcgcgagatccgcatcccgctgccgccggaggtggtgattaacccatttaacacgttacaccatgcgatagcgctgatcgcccaggcggagctgattatctccccggacacctcggtggtgcacatggcggcggcgtggaacaaaccgctgatcgcggtctataaggacgttctgcttaataaccggctgtgggcgccgggctatgacaacgccaggcagatcattgttaaatgcgggaaggtccatcagcatcgcgggctagtggatagaattatagcggcgctaccggagacgctgtga

SEQ ID NO: 135638 - DNA, 501 bp, Enterobacter cloacae
atgcttgaagcagtagaaggtaatatccaccagcggctgtgcgcgctgctcgacgagcaccgggcccgctaccgggtgatggcgcacgaggcggtcggtcagtgcgaagccgtctcggcaatccgcggcaccgcgcttggccagggcgcgaaagcgttagtctgtaaagtgaaaggaaacggcgtcaaccagcatgtgctggcgatcctcgccgccgatcggcaggccgacctcgccagcctggcccggcatatcggcggcagcaaagcctcgctggccagcccggcggaggtggaggccctcaccgcctgcgtgttcggcgccattccccccttcagtttccatccggcgctgcggctggtggcggacccgctgctgtttgaacgctttccacaaatcgcctttaacgccgggcgcctggaccggtcgatcattctcgacaccgaagactatttacatatcgcccgaccagagatcgcgacctttcgccgtcttagctaa

SEQ ID NO: 135639 - DNA, 447 bp, Enterobacter cloacae
atgtttgataccaccctgttgatcctgctgggtctggcggcgctcggctttatcagtcataacaccaccgtggcgatctccatcctcgtgctgattatcgtgcgcgtcacgccgctgaacgccttctttccctgggttgagaaacagggactgaccgtcgggatcattattctgaccatcggcgtgatggcgcctatcgccagcggcacgctgccgccctcgacgctgatccactcctttatgaactggaaatcgctgctggcgattgcggtcggggtgtttgtttcgtggctcggcgggcgcggcgtctccctgatgggctcccagccgcatctggtggccgggctgctggtcggtacagtactcggcgtcgccctgtttcgcggcgtcccggtcgggccgctgattgccgccgggatcatctcattgtttattgggaagtcgtag

SEQ ID NO: 135640 - DNA, 792 bp, Enterobacter cloacae
atgattggactggggctggatggctatgaaccggacagtggccacgaatcggccattgcctttcgtatccgggtggtggaggcggagcagtatattccggcgcattcccaccgtaaggggcagctgatccttgccctgcacggcgccttgacctgcgaggtggagaacgcaatgtggatggtgccgccgcagtatgcggtgtgggttccggggcagctgtcccacagtaaccgcgctacccccggcgcccaggtatgcttcctgttcatcgagccgggcgccgcgccgatgccggatcgctgctgtacgttaaagatttccccgctggtgcgagagctgatccttactctggcggagcgcggcggaaagtcgctggccgcccccgccacggcccggctggtgcaggttctgtttgatgagctgccccgccagccgcaggagcacctgcaactgccggtatcaaaccacccgaaaattcgtcaaatggtgacgatgatggccgaggatccggcgcgctggcagaccctgagccagtgggcggcggtgtttgcgatgagcgagcggaatctggcccgcctggtcgtgcgcgaaacggggctgagctttcgccgctggcgccatcagctgcagctgatcctcgcgctgcagctgctgatccgcgggcagacggtgcagcagacggctcaggcgctgggctacgattccaccaccgccttcatcaccatgtttaaaaaagggctcgggcagacaccgggccgctatcacggtagcctggctacgacttcccaataa

SEQ ID NO: 135641 - DNA, 1185 bp, Enterobacter cloacae
atgtcttctgtgatctcctctaccggccgccgccccgcgctgctgattgccggtatcctgctcatcgccaccaccctgcgcgtggtctttaccggcgcggcgccgctgctggacgcgattcgtagcgactatggcctgaccaccgcgcagaccgggctgctcactaccctgccgctgctggcctttggccttgtctcgccgctggcggcaggggttgcccgccggttcggcatggaacgcagcctgctgctggcgatgctgctgatctgcgccggcattgccctgcgctccctgccctccgctgcgctgctgtttatcggcacggcggtaatcggctgcggcattgcgctgggtaacgtgctgctgcccgggctgattaaacgggatttctcgcaacatgtcgcgcggatgaccggcgcctattccctgacgatgggcggcgcggcggcgcttggttcggcgctggtggtccccgtggcgatggccggattcggctggcgcggggcgctgctgctgctgatggtcttcccgctactggcgctcctcagctggctgccgcagtcccggcgccgggcggagacgccattgaccggctcaggcgctatgcataaccgggggatctggcggtcggcgctggcctggcaggtgacgctgttcctcggcatcaactcgctggtctattacgtgattatcggctggctgccgtcgattctgcagagtatgggctatagcgaagcgcaggccggctcgctgcatggcctgctgcagctggcgaccgccgcgcccggcctggcgataccgctgatcctgcatcggctgcgcgaccagcgcgggatcgcggtgctggtcgccctgatgtgcgccatcagcgccgccgggctgtggctgttgcctgagctggcgatcggctggacgctgctgttcggctttggctccggagccaccatgatcctcggcctgacgtttatcggcctacgcgccagctcggcgcatcaggccgcggcgctgtcaggaatggcgcagagcgtcggctatctgctggccgcctgcgggccgccgctgatgggcaggatccatgatgccaatggcgactggcatattccgctgctggcggtggcgctgatttcgctggtgatggcggtctgcggcgcgctcgccggacgtgaccgggaaattcacccctga

SEQ ID NO: 135642 - DNA, 693 bp, Enterobacter cloacae
atgaaaactcctttacgcctcgcccttgtcggcgattatcaccccgatattgttgcccatcaggccattcccctggcgatagacgatgccgccgccgtgctggagcagccggtgaaatatgactggctcgccaccccgtcgatcgcctccggcgaggcgctggcggagtacgatgccatctgggtcgttcccggcagcccgtatcgtcacccggaaggcgcgtttaccgcgatccgctatgcccgggaaaacagcattcctttcctcggcacctgcggcggctttcagcacgcggtgattgaatacgcccgcaacgtgctcggctggcaggacgccggacatgcggaaaccgacagcgaagggcggatggtgatcgctcccctcagctgctcgctggtggagacctctgccgtcgtcgagctgcgggcgaatacgctgattgcccgcgcctatggccgggagagcattgaagagggctaccactgccggtacggcgtgagcagcgcgtttgcggcggagctggagcagggcgatctgcgcgtcaccggctgggatgaagagggtgagatccgcgccgtcgagctggtgacgcacccgttttttgtcgccaccttgttccagcatgagcgtcacgcgctggacgggcgtcccgcgccgctggtgcaggcgtttctccgcgccgcggcacaataa

SEQ ID NO: 135643 - DNA, 510 bp, Enterobacter cloacae
atgaaaaataagcttttggtcagcgcctgcctgatgggattccaggtgcggtataacggtagtgagaaggcacagctggcggcgacgctgtcccgctggcagcaggcggggcggctggtgatccactgcccggagctggcggccggtctgcctacgccccgactgccggcggagatcctcggcggcacgggcggcgatgtgcttgccggacgggcgcggatcgtggaaagcgacggccgcgacgtcaccggacattatcagctggccgcctggctggcgctcagcgccgcccgggaagcgggctgtcaggcagcgttactcaccgacggcagccctacctgcggcagcaagtttgtctatgacggttcctttcgcggacggcgtaaagcgggcgcaggggtcgcggccgagctgctgcgcgcccacggcatcacggtattttccgacgggcaaatcccgcagttgctcgcctggatggcacagaaggagcaggatgatgattcagtgtaa

SEQ ID NO: 135644 - DNA, 357 bp, Enterobacter cloacae
atgattcagtgtaaacgggtgtatgacccgcaggaaagcagcgacggctatcgggtgctggtcgaccgtctctggccgcgggggattaaaaaagaggcgctggcctgtgatgagtggtgtaaggagttaacgccttccgctgagctgcgcaaagcctttcacggcgaggcgatcgatttcgcccacttcagccagcgctatcgtcaggagctcgacgcccatcgcgaaacgggcctgcggctggcggcgctggcgcaacgccagccgctgacgctgctgtacgccgcgaagaacaccgagcagaatcatgcccgggtgctggccgcctggctggcggccctgccggttacgatttag

SEQ ID NO: 135645 - DNA, 240 bp, Enterobacter cloacae
atgaaaaagctactggctattctgccactggtattagccggctgtgcccagccgcagcccacagcgccgacgaaaaccatcggcatgcccaaccccgcggcggtatactgtcagcaatccggcggcacccgggtgccggtgcaaacgccgcagggcgtcagcactcagtgcaaactacccagcggcgaaaccctcgacgagtgggcgctgtggcgccgggatcatccggctaaatcgtaa

SEQ ID NO: 135646 - DNA, 1038 bp, Enterobacter cloacae
  misc_feature (372)..(381): n is a, c, g, or t
atgtcagattttattcttgcccgggtgtcgcaaaccctcgctgcggaacaatccctggaaaccctggtgcgccagctgctggagatgctggaggcggtaacgcgaatggagtccacctacctcacccgcattgataccaacgcccagcggcagcagatcatgttcgcccacaacagcagcgaaatgcagatcccggaaggattttccgtcccctgggatgaatccctgtgcaaacgcgcccttgaggatcagtgtacgtttagcaatgacgttgccaaccgctggcactcctgcatcgccgcccaggagctgggaatcgctacttttttaagcattcccgtccgcctggccgacggctccctgttcggcacnnnnnnnnnntctctgttcggcaccctctgcgccaccagccggcaacaacagccttataacctcgaaggcgaacaggtcatgggcctgtttgcgaagctcatttcccactacgtggaaaaagacaccctggtgcaacagctgcaggcggcaaacgtcgcgctggagctgcactcgtctaccgatgagctcacccagcttcccaatcgccgcgcgctgtttaagcagctggcgttacgctttgcctccgcccgcgcccagcagcagcaggtctcgcttatttttatcgatctcgatggtttcaaagccattaacgatcggttcggccatccgtgcggcgacagctttctggtgcaggtcggcaaacgactcaccgctgtcgcgcgccgggaagatatcgttggccgccttggcggcgatgagtttttgatcgtcggtagcgcccagcagcctgccgcacagcaggcgtatgtcacgtccctgcgtcaggctctgtgcggcgtctacttcctcggcgaacagcgtatcgactatgagggcgccagcttcggggtggtcacctgcgatccgcagagtatcgatgttgaagcggccttacgcgctgccgatgaggcgatgtaccaggataagaagtcccgccgccaggagaatttcattcatattgactaa

SEQ ID NO: 135647 - DNA, 264 bp, Enterobacter cloacae
atgattctgcaaaaactcctcagcaataaaaactgcaaaaaatactgtctgtcgctcgcggtggtgtttgctatcgcgctggcggtagtggggcgggcgaccttcgggggcgtggtgagcgagtacaatatgccgtactcagagtggacgacgtccatgttcttcctgcagggggcgatggtgacggtttacagcattgtctttaccgcgctcttcgctatccccctcggctttattttcctcggcgccgatcgtcaggattaa

SEQ ID NO: 135648 - DNA, 639 bp, Enterobacter cloacae
gtgttcgctgagtttggtgttctgaattatttaacctatctggtcggggcggtgtttatcatcctcgttcctggccctaatacgtttttcgtgctgaaaacgggtattgcccacggggtgaagaaaggctatctggcggcggcgggcgtctttattggcgacgcagtgctgatgtttctggccttcgccggggtggcgacgctgattaaaaccacgccggtgttgtttaacgtcgtgcgctacctcggggcaatttacctgctgtggctcgggggcaaaatgctctatgcggtgctgacccagcgcgacggccagtccgacgccagcgcggagccggcgagcgcgatcctcaagcgctccctgaccctgagcctgaccaatccgaaagcgattctgttctatgtgtcgtttttcgtgcagtttatcgatgtcaacgccaaaacccccggcgtggcgttctttatcctggcgctgaccctcgaggtgattagcttctgctatatgagctttttgatcctctccggctcgtttgtcacccgctacgtcaaaacccgcaagaagctggctaaacttggcaacagcctgattggtctggttttcgtcgggttcgccgcgcgcctggctaccctgcagtcctga

SEQ ID NO: 135649 - DNA, 915 bp, Enterobacter cloacae
atggcctgcgtatttaataaacaacttttacacccgcgtaactggctgacctggttcgggctcggcatcctctggttaatcgtgcaactgccttatccgctgctgcattttatcggcaccagcgctggtcgcctttcccgtcgctttcttaaacgccgcgaacatatcgcccggcgtaatatcgaactctgcttcccggacatgtcgccagcggcgcgcgagacgctgatcgatcaaaactttatgtcgctgggaatggggcttatcgaaaccggcatggcctggttctggagcgacgagcgggtcaaaaaatggtttgatgtcgaggggttcgccaaccttaatcacgcgcttagcggtgggaaaggggtaatggtcgtcggcgtgcactttatgtcgctggagctgggcggccgcgcgatggggctgtgtcggccaatgatggccacctaccggccgcataacagcccgctgatggagtgggtgcaaacccgcggtcgcctgcgttcgaacaaagcgatgatcgatcgcaacaacctgaccggtctggtgcatgccttaaaatccggtgaagcggtgtggttcgcgcccgatcaggattacggtcccaagggcagcgtctttgcaccttttttctccgtcccgcaggcggcgaccaccaacggcacctatgtcctgtcccgcttatcgggcgcgaaaatgttgagcatcagcatggtacgtaagctggatcgccggggctatagcctgcatatcagcgaggtgatgaatgactatccgggtgaggataagcagatcgccgccggctatatcaacaaggttattgagcgcgagatcctgcgcgctcccgagcagtatctgtgggtacaccgtcgttttaaaacccgcccgctgggcgaaccttccgtctattaa

SEQ ID NO: 135650 - DNA, 1044 bp, Enterobacter cloacae
atgaattttagagcattacttgccattgcgttattgacgatgagcagcctggcgtttagcgagacgcgtcttccgcatattgttattttagccaccggcggaacgattgctggttcggcggccagcaatacccaaacaaccggctataaagccggggcgattggggtgcagacgctgattaacgccgtgccggaaatgagtaaaatcgctcacgtcgagggcgagcaggtggccaatattggcagtgagaatatgaccagcgatattattctccagctctcgaagcgggtgaatgcgctattggctcgggacgatgtcgatggcgtggtgatcacccatggcacggacacgctggatgaaaccccgtatttcctcaatctgacggtgaaaagcaacaagccggtggtctttaccgcggcgatgcgcccggcgacggcgatcagcgccgacgggccgatgaacctgctggaagcggtcacggtcgccgccgatcctgatgcccggggacgcggggtaatggtggtgcttaacgaccgcatcggcgcggcgcgctttgtcaccaaaactaatgccacttcgctggataccttccgggcgcccgaggagggctatcttggtgtcgtggtgggcggaaaaccccagttcgagacgcgggtggataaaattcacacgctgcgctcggtgttcgatgtgcgtcagctgaaggttctgccgaaggtggtgattatttatggttaccaggacgatccggagtatatgtacgatgcggcgatcgcccatcatgccgacggtattatctacgccggaaccggggcggggtcggtgtcggtacgtagtgccgccggtatcaaaaaagcgcagcaggcgggcatcgtggtggtgcgagcctcccgtaccggcagcggcgtcgtaccgccggatgacagccagcccgggctggtggccgactccctcaacccggcaaaagcgcgtatactgctgatgaccgcgctgacgcagactaaagatccgcagctgattcagcaatatttccatacctactga

SEQ ID NO: 135651 - DNA, 1209 bp, Enterobacter cloacae
atgcgtattgccctgaagtcggccctgatgctgaccaccagagtcatccagatcattaaccctgaactgcaccggcatatgcaacgaacggccttaatcgccctgacgctggcgcaaaggctggaactgcctgacgaacggcagcagaccattttttgcgccgcgctgctgcacgatatcggcgtgctgggggataaacgcaccattcattcgctggatgctatcgataatatccacgacccgcatcagcgccagggtgtggcgatgctggagggattagcgaccttccagcccatcgttccctttattcgcgatcaccattttagcccgaaccaccggggctcccgcgaacagcacattgtctattttgctgatgcctttgaacggctgctgccggccgatagccacgttgccgcctggcccacgcgggcggtggtggatcagttcgtcgctttgcatcgggagatcgatccgccgctctgcgatatcctgtgcgaggtcgctgaaaatgcgaacttctggcagcaccttcaccccggccatattcagcggctgctggagattattggccccatcaacacgcgctatctggatattcacggtctgaaggatgtctgcctgctgattgccaaaatcgtcgacacctacagtagctttaccgccacccatagcatcatggtgggggaaatcgcccgccagcttgcccgctggatgcagctgccggagcccacctgtcagcaaatacagatagccggctatctacacgatattggcaaggtctatatcccactctccattctcgaaaaagagggcgagctggatgatgaggagctgagtcaggtgcgggagcacagctacatgaccggcgaacttctcagcgactatagcgagctcggcgacatcattaactgggcctcgaatcatcatgaaaaaatggacggcagcggctaccctctgcatctcgaaaaggagcacctgaccctcgccgaccggattatctccatcgccgatattttcaccgcgctgaccgaagatcgcccttatcgtaaagggatggcctggcaggaagccttacagattatggaagcggatgttataaatggcgctctggatagcgatgtcttcctcgttttgcgccaccatgcggaaacgctacacgccatcattcttcagacccttgcccctctgcatagcgagcgccgcctctga

SEQ ID NO: 135652 - DNA, 1080 bp, Enterobacter cloacae
gtgagaatcgccaccatcactaactgggcttacgggatcaccgttggcctgacgctggcttccgggagcgctatgctcatggcctccagcgccgaccgcgtcgaacgccaggcggtacagcagcgccaggtctttgataccctctccgacgaggtggaaaacgacgcctgggcgctgtctgacctcgcccggctgtacgtgataaagccttcgccggagacgcttacgcaatatcagcagctgcagcagaccgacaagagcatagagcagcggctgggcggcctgaaagataacggcgccagccgcgaggagctggcgctgctccaggatggcctgcggatcgccaatgagctacaggatgaacagcaggcggccctggcgcatgtcgctcgcggcgatgcgccagcggccatcgcggtgctgtacggcaccgcgtacgaggctgaactggagcgcatgcagacgcagatcgatcgcttccgccagatgcttgagcatcgcgccgccgtcgctatcgaccaggccaccgagcgctcgcggatctggcgtacgctgtcggaaatcatggtcggcctgaccgccctgatgtttttgttcgtcctcggcttcattctcaaacgccgggtgctctacccggtggttcgcctgagcgacgtggtccagcgtctcgcctcccaggattatgcggtagagacgccgcactttacccaggtggatgagattggtgacatggctcaggcgatccgcatttttcgcgagaacggcctggcccgtcagcggctggagcagcagcgcgacgccgactgggcgatccgcgagctgctggcgcgtatgactcagcggctgcagggctgtgaaaccattgaggatgtgattaaggtggcggagcgcagtggctgtcgcccgccggcgagacgacgcccttttctcccgacgactgctgggcgatacggcggggactcagccatccgccggtgcagggcgagcccgatatcacctgctatcatctgccggagacgcacgccggccagtcgctctgcgtaccgctcatcgcccagggcgaagccattggcctgctga

SEQ ID NO: 135653 - DNA, 570 bp, Enterobacter cloacae
atggcggaagcgttgggcctggcgctggccaatcagcgtttgcgcagcgccctgctggaaaaagcgctgttcgattccctgaccggcctgcgtaaccgccatcatcttgacgaagcgctgcattcgcagatggcgctggcggtccatacccatactccgctgagctgtctgatgatcgacatcgatcattttaaaaccatcaatgatcgctatggccatgaggctggggatctggtgattaagagcgttgcgaccattgtgcagcgcgcggtgcgcgatatcggcatggctttccgctacgggggcgaggagtttttagtgctgctccccgggattgacgaagctggggcgcaccagtgcgccagcgagatctacacccaggtgcgcaatatgacgctgcgcgatggtctgaccgagataggccaggtggatgtgtcgattggcatcgccagctacccgcagcacacccaaagcgatagtctgctgcgcgcggcggatgccgcgctgtaccgggcgaaagagctgggccgttcaaggattgtcagctttggccgcctgaagaccagctaa

SEQ ID NO: 135654 - DNA, 891 bp, Enterobacter cloacae
atgtccttgcgagcgttacgccattttgtggtcgttgccgaagagttgcatatgcaccgggcggcggagcggttacatatcgcccagcccgccctcagtcagcagattaagcagcttgagcagcgcctgggcgtggtgctcttttcccgcgctaaccgccgtctgactctgaccgccgcgggcgaggcctttttacacaagacgcggctggcgctggaaatggccgatcaggcggtgctggacgcccagcgcaccgcgcggggcgagcaggggaggctgcatttggggtatgtctccagcgcgatgtacgacagtaaactgccggggctcctgcgccggctgcgcgccgactggccggggattgagctgtcgctggtgcagggggatgtgcaaatgctctacgaagcgctgttggatctgcgtctggatatcgccatcatccgcgcgccgctggcctcgccgccggacgcgctggtggtcaggccgtttgtacgtgaaaagctctgcctggcgctctatcaacagcatccgctggccggcgtgggcgcgcttaatctggcctcattgcgcactgacaactggatctcgcttgacgatccgcagggcaccggactggagcaggtttttatggatgcctgtcgcgtcgcgggctttacgccgcaggtggcgcagcggattaacgacgttacctcgatgattagcctggtctccgccggggtgggagtggcgttggttccgctctcggcgcgggccttacgccttgataacgtggtgtatatcgatctccaggatcggctggcggagagtgagctgagcatggtttaccaccgccatattcgttcggcggtggtaaggaaagttatctcgctgcttaataccgctgagcgatag

SEQ ID NO: 135655 - DNA, 1509 bp, Enterobacter cloacae
atgaccgcaccgattcaggatctgcgcgacgccatcgcgctgctgcaacagcatgacaatcagtatctcgaaaccgatcatccggttgaccctaacgccgagctggccggtgtttatcgccatatcggcgcgggcggcaccgtgaagcgccccactcgcatcgggccggcgatgatgtttaacaatattaagggttatccacactcgcgcattctggtgggtatgcacgccagccgccagcgggccgcgctgctgctgggctgcgaagcctcgcagctggcccttgaagtgggtaaggcggtgaaaaaaccggtcgcgccggtggtcgtcccggccagcagcgccccctgccaggaacagatctttctggccgacgatccggattttgatttgcgcaccctgcttccggcgcccaccaacacccctatcgacgccggccccttcttctgcctgggcctggcgctggccagcgatcccgacgacgcctcgctgaccgacgtcaccatccaccgcttgtgcgttcagggccgggatgagctgtcgatgtttcttgccgccggccgccatatcgaagtgtttcgccagaaggccgaggccgccggcaaaccgctgccgataaccatcaatatgggtctcgatccggccatctatattggcgcctgcttcgaagcccctaccacgccgttcggctataacgagctgggcgtcgccggcgcgctgcgtcaacgtccggtggagctggttcagggcgtcagcgtcccggagaaagccatcgcccgcgccgagatcgttatcgaaggtgagctgttgcctggcgtgcgcgtcagagaggatcagcacaccaatagcggccacgcgatgccggaatttcctggctactgcggcggcgctaatccgtcgctgccggtaatcaaagtcaaagcagtgaccatgcgaaacaatgcgattctgcagaccctggtgggaccgggggaagagcataccaccctcgccggcctgccaacggaagccagtatctggaatgccgtcgaggccgccattccgggctttttacaaaatgtctacgcccacaccgcgggtggcggtaagttcctcgggatcctgcaggtgaaaaaacgtcaacccgccgatgaaggccggcaggggcaggccgcgctgctggcgctggcgacctattccgagctaaaaaatattattctggttgatgaagatgtcgacatctttgacagcgacgatatcctgtgggcgatgaccacccgcatgcagggggacgtcagcattacgacaatccccggcattcgcggtcaccagctggatccgtcccagacgccggaatacagcccgtcgatccgtggaaatggcatcagctgcaagaccatttttgactgcacggtcccctgggcgctgaaatcgcactttgagcgcgcgccgtttgccgacgtcgatccgcgcccgtttgcaccggagtatttcgcccggctggaaaaaaaccagggtagcgcaaaataa

SEQ ID NO: 135656 - DNA, 687 bp, Enterobacter cloacae
atggttgaagaaaacgcgaaaaatacctcctatcgcttcgtactggagcctgctattagcgatgatggcagctgccactcgtgggaattgctcactaaagatattatagcacccgcacgaaataacgcctcagcgcccgcgttttctttctccacgcttaccgaaagcgataagcttgcactatttacccgacaaatcgagttgctttccgtatttgatttttccctggtcgataataagccgatctcgctcaatatcgatgatttattaagccattttattctgacggaccgctatctctgcgattttctgcgctcgtgtaagcatattgctttggagataaatgagaattttcatgagtttatcgccggccgcgagctgacggcgctaagcacgctggcggcgctttgtccggtctggctggatgattttggtcgcgggcgaacctccttcccgctgctggagagattccgcttcgattgcgtcaaagtggataaggattacttctgggataaagaaaacgaccccgctttgcccggtctgttgcagtctattcataccctgaccggccatgtgatcgttgagggtatcgaaactgaaaagcaaaaacggttaatcacttctgccggggacatcataggtcagggccgctactggaaggaagaatatatttttctttgcggttga

SEQ ID NO: 135657 - DNA, 633 bp, Enterobacter cloacae
gtggccgggagaattgattacgatattgaaaaataccagtttaccgaagccggtgagacgccacggctccgggagcagtggcgcgaagtatacctggagtgtcgtcatctgcgggccggggcagaggagcgcctgcgcattgcgttactgaacgtcgactatgtcaccagcttcgagctgccttttcgcctgctgctggtgcgcgcgccgcagctaatcgccgatgttcgcgagacgttgcagcttagccgtaaagccgccgttttcaacggcaaacgttacggctgcgtctatagtttgaaacaggatttacaggctgtcccggaagcctttcattaccgcctggcaaaccgcattcgtcgcgtcgatgcaaccgggctgacggcggccccgtaccagcagattgcccgggagataaagccggcccgggagcggctccgccaggcgctgaacgccggcctgccggtcaccgctctcgacgccttgttctggttcggcagtcagcgagtggcggcggacatcgcgcagttgcgccggtccggcatggcgattgtcacgacggaggtggaggtcagcgacaatttgttcaataccacccgacgagtgcccgtttaccgcctggccagcgagtga

SEQ ID NO: 135658 - DNA, 198 bp, Enterobacter cloacae
atgcctagcgaaaaagcccgcagccttgaccatttctatgaattactggcgacaggacaacacccgaagattgaactcgattttgatgtcgccgcggacgatttttttaaaatcgccaccgagtttggcgatattggcgcgaggatcacccgggttaacgaacgatttattattaagatcaagccgccgaaggcataa

SEQ ID NO: 135659 - DNA, 510 bp, Enterobacter cloacae
gtggtggcctatctgctgctgggcaccacgtggttgattatgaaaagcgaaggcgcgctgcagcagcggatgcgcgagctgacccgcaaggtactgctggcgctgatggcggtgatcgcggtggtcagcgtctggacgccgttgggctggcgctacgtggcggaacgctggtttacgctgcccaatttcttctggttcgtgccggtgccgattctggtgttggctctgagcctgtggatctggcgcctgagcgcgcgccccgccagccacgcccgtccctttatcctgacgctgggcctgatattcctcggcttcagcgggctggggatcagcgtctggccgaacattattccaccgcatatctccctgtgggatgccgctgcgccgccctccagccaggtatttatgctgccgggcgcgctgctcattatcccggtgatcctaatgtataccgcctggagctactacgtctttcgcggcaaagtctccggcagcgagggctatcactga

SEQ ID NO: 135660 - DNA, 459 bp, Enterobacter cloacae
atgctagataaaattgaccgtaagctgctggcgctactgcaggaagattgcaccctctctttgcaggcgctggccgatgccgttaatctgaccaccacgccctgctggaaacgcctgaaacggctcgaagacgagggtattctccgcgggcgcgtcgccctgttggacgcggaaaaggtggggctggggctgacggcgttcgtcctgatcaagacccagcatcacagcagcgactggtactgtcagttcgtgagcgaagtgacgcagatggcggaagtgctcggcttctggcggatggcgggggagtatgactacctgctacgggtgcaggtggctgatatgaaacgctatgacgacttttataaacgtttagtgaacagtgtgcctggtctgtcggatgtcacttcgagttttgccatggaacagataaaatataccaccgccttgcctgtcgaataa

SEQ ID NO: 135661 - DNA, 1815 bp, Enterobacter cloacae
  misc_feature (913)..(922): n is a, c, g, or t
ttgcgattatttgctcaactcagctggtacttccgccgggagtggcgccgctatcttggcgcaattgccctgctggtcattattgccgtcctgcagcttattccgccgaaggtggtgggcattgtggtcgacggcgtgacgcaacagcattacaccgcggagaaggtgtggatgtggatcggcgcgctggtgctgatcgcggtgatggtctacctgctgcgctatgtctggcgcgtgctgttgttcggtgcttcttaccagttggcggttgagctgcgggaagatttttaccggcaactgagccgccagcatccggcgttctatttgcgccatcgcactggggatcttatcgcccgcgccaccaatgacgtggaccgggtggtgtttgccgctggcgaaggagtattaaccctcgtggattccctggtgatgggctgtgcggtattgattgtaatgtcgacgcagattagctggcagcttactctgctggcgctgctgccgatgccgctgatggccctggcgatcaaacgtaacggcgatgcgcttcacgaacgttttcgcgttgctcaggcggccttttccagcctcaacgatcgcacgcaggagagcctgaccagcatccgcatgattaaggcgtttgggctggaggatcgccagtcggcgcagtttgctgccgatgctgccgataccggcgcgaaaaacatgctcgtggcgcgcattgacgcccgcttcgaccccaccatctatatcgccatcggggccgctaacctgctggccatcggcggcggcagctggatggtgatccacggcagcctgaccctgggccagctgaccagcttcgtgatgtatcttggcctgatgatctggccgatgctggcgctggcgtggatgtttaacatcgtggagcgcggtnnnnnnnnnntggcgtggatgtttatcatcgtggagcgcggtagcgcggcctatggtcgtatccgcacgatgcttgaagaggcgccggcggtggatgacgggaccgaggcggtgccggcaggccgcggcctcctgcaggttgctatccgcgatttcatctatccgcaggcgagcaaaccttcgctggagcaggtaaattttactctccagccggggcaaatgctgggcatctgcgggccgacgggcgccggcaaaagcaccattctggcgctgctgcagcgccattttgacgtcactcacggcgagatccgctttcacgatctgccgctgccgattctgcagctcgacagctggcgcgcccggttggcggtggtcaatcagacgccatttttattctccgataccgtcgccaataatatcgcgctgggaaaaccggacgcgacgcaggcgcagattgagcgggttgctcaactggccagcgtgcatgacgacattctgcgtctgcctcagggctacgagaccgaagtgggcgagcgcggcgtgatgctctccggcggccagaaacagcgcatctctattgctcgcgccctgctgctggaggccgaaattttgatcctcgacgatgccttatcggcggtggatggccgcaccgagcaccagatcctgcataacctgcgccagtggggggaggggcggacggtcattatcagcgcccaccgcctgtcggcgctcaccgaggccagtgaaattttggtactgcagcatgggcatattgcccagcgaggccgccacgaggcgctggccgtgcagcccggctggtaccgcgacatgtatcgatatcagcagctggaggccgcgctcgacgaggttccgcagacgcaagaggaggctctggatgcgtag

SEQ ID NO: 135662 - DNA, 1779 bp, Enterobacter cloacae
atgcgtagctttaccgaactctggccgacgcttaaacgcctgctggcctatggttcaccgtggcgcaagccgttggccatcgcggtggcgatgatgtggattgcggcggcggcggaagtgagcggcccgctgcttatcagctatttcatcgacaacatggtggcgaaacatacgctgccgctgaagctggtggccggcctggcggtagcctatatcggcctgcagctgctggcggcgctcctgcactataaccagtcgctgctgtttaaccgcgccgcggtcggcgtcgtccagcagttgcgcagcgacgtgatggatgccgccctgcatcagccgctcagcgagtttgatacccagccggttgggcagcttatctcacgggtaaccaacgatacggaagtcattcgcgatctgtacgtgacggtggtggctacggtactgcgcagcgcagcgctgatcggcgcgatgctggtggcgatgtttagcctcgactggcggatggcgctggtggcgatcgctattttcccggcggtgctgatcgtgatgattatctatcagcgctatagcacgccgatcgtgcggcgggtgcgcgcctggcttgccgacatcaacgatggcttcaacgaagtgatcaacggcatgggcgtcatccagcagttccgccagcaggcgcgctttggcgaacggatgcgcgaggccagctatgcccactatctggcgcggatgcagacgctgcgcctggacggttttctgctgcgcccgctgctgagccttttttcctcgctggtgctgtgcgggctgctgatgctgttcggctttagcgcggtgggcacgatcgaggttggggtcctgtacgcgtttatcagctatcttggacgccttaacgagccgcttatcgagctgaccacccagcagtcgatgctgcagcaggcggtggtcgccggcgagcgcgttttcgagctgatggatcgcccgcgccaggcgtggggtgcggatgacgcgccgctgagcagcggtcgggtggaaattgaccatctctcctttgcttaccggggggaccgtctggttctccaggatatcacgctggatattccctcccgcagcttcgtggcgctggtcggacataccggcagcggaaagagtaccctcgccagtctgatgatgggctattacccgttaacccacggcgagatccgcatcgatggtcgaccgctcgcatccctcagccacagcgcgttgcgtcggggcatcgcgatggtgcaacaggatcccgtagtgctggcggataccttttacgccaacgtcgcgctgggccgggacatcagtgaggcgcaggtttgggaagcgctggaggcggtgcagctggcggcggtggcgcgcagcatgagcgatgggctgtacacccaactgggcgagcagggcaataatctctccgtcgggcagaagcagctgctggcgctggcgcgcgtgctggtggataccccgcaggtactgattctggatgaggcgacggcaaacatcgactccggtaccgagcaggcgatccagcaggcgctggcgaaggtccgccagcataccaccctcgtggttattgcccatcggctgtcgaccattgtggaggccgataccatcctggttctgcatcgaggtcaggctgtcgagcggggcacccatcagcagctgctggcggcgaaaggccgctactggcagatgtatcagctgcagctggccggcgaagagctggcggccagcgccagagaggagtcgctcagcgcctga

SEQ ID NO: 135663 - DNA, 339 bp, Enterobacter cloacae
atgaagctggttaccgtggtaatcaaaccattcaaactggaagacgtgcgtgaagctttgtcttccatcggcattcagggccttacggtcactgaagtcaaaggatttggccgtcagaaaggtcacgcggagctctaccgcggcgccgagtatagcgtcaactttctgccaaaagtgaagattgatgtggcgattgccgacgatcagctggatgaagtcatcgatgtcatcagcaaagcggcttacaccggaaaaattggcgacggcaaaattttcgtcgctgaattgcagcgcgtcattcgcatccgtaccggcgaagctgacgaagcggcactgtaa

SEQ ID NO: 135664 - DNA, 1287 bp, Enterobacter cloacae
atgaaaatggcaacaatgaaatcgggtctgggggcattagcccttctgccggggctggcgatggccgcgcctgcggtggcggacaaagccgataacgcgtttatgatgatttgcaccgcgctggttctgtttatgactatcccggggattgcgctgttttacggcggcctgatccgcggtaagaacgttctgtccatgctgactcaggtgattgtcacctttggcctggtctgcgtattgtgggtgatttatggctataccctggccttcggcaccggcggcagcttcttcggcagctttgactgggtgatgctgaaaaatattgagctgaaagcgctgatgggcaccttctatcagtatatccacgtggcattccagggctcgttcgcctgcatcaccgtcgggctgattgtcggggcgctggcggaacgtattcgtttctccgcggtactgatcttcgtggtggtatggatgacactctcctacgtgccgattgcgcatatggtttggggcggcggtctgctggcgacccatggcgcgctggacttcgccggcggcaccgttgtgcacatcaacgccgcggtcgccgggctggtgggcgcctatatgatgggcaaacgcgtgggcttcggcaaagaagcgttcaaaccgcataacctgccgatggtgttcactggcaccgctatcctctacgtgggctggttcggcttcaacgccggctctgccagcgcagcgaatgaaattgcggccctggcgttcgttaacaccgtcgtggcgaccgctgcggctatcctggcgtggacctttggcgaatgggctctgcgcggcaaaccttcactgctgggcgcctgctccggggcaattgccggtctggttggcgttacgccggcgtgtggttatatcggtgtcggcggggcgctgatcgtcggtatcgcctcgggcctggcgggtatctggggcgtgactgcgctgaaacgctggctgcgtgtggatgatccttgcgacgtcttcggcgttcacggcgtctgcggcatcgtcggctgtatcctgactggtatcttcgcggcgacttctctgggcggcgtcggttatgcggaaggcgtcaccatgggccatcagctgctggtgcaactggaaagtatcgccatcaccgtggtctggtccggcgttgtggcgttcatcggctacaaagtggcggatatgaccgtcgggctgcgcgtgccggaagagcaggagcgcgaagggctggacgtcaacagccatggcgaaaacgcctataacgcctga

SEQ ID NO: 135665 - DNA, 864 bp, Enterobacter cloacae
atgagtcaggcactctctaacctgctggcattattagatctggaaaaaattgaggaagggttgtttcgcgggcagagcgaagacctggggttacgtcaggtttttggcggccaggtagtgggtcaggcgctgtatgcggcaaaagagaccgtgcccgttgagcgtctggttcattcgtttcacagctactttcttcgccccggcgatagccagaagccgatcgtttacgatgtggaggtgctgcgcgacggcaacagcttcagcgcccgtcgggtcgccgccatccagaacgggaagccgattttctatatgaccgcctccttccaggcgccagagaatggctatgagcatcagaaagcaatgccggccgccccctcccctgacggcctgccttcggaaaccgatatcgctcgcaagctggcgcatctcctgccgccgcaggtgaaggacaaattcctctgcgataaaccgctggagatccgtccggtggagtttcataacccaatgaaaggccatatcgccgaaccggtgcgccaggtctggctgcgcgccaacggcgccgtccctgacgatctgcgtattcatcagtatctgctgggctatgcttcagactttaacttcctgccggtggcgctgcagccgcacggcgttggtttccttgagcccggcatgcaggtcgccaccatcgaccactctatgtggttccaccggccgtttaatattaatgaatggctgctgtatagcgtcgaaagcacctcggcctccagcgcccgcggcttcgttcgcggcgaattctacacccaggatggcacgctggttgcctcaacggttcaggaaggggtgatgcgcaaccgcaacgcataa

SEQ ID NO: 135666 - DNA, 492 bp, Enterobacter cloacae
atgaaatttgcctatatgtttagtgctttagccgtcgccgcgacgctgaccgcctgtgctaatcaccactcgaacaattcttcgacgcaggcggccgcgcccgacccttacggtatcgcgacgctgagcgtggcgcagcagcagccgagcgtcacggggacgattaatatccgccagagaatcgctttaccgccggatgcggtactgacggtgaccctgtcggatgcttctctggcagatgcgccagcccgcgtattgtcgcaaaaagcggtgcgtaccgaaggtaaacaggcgccatttaactttgcgctgccttacaacccggcagatattcaaccgaacgctcgcattctgctaagcgcggcgatcacggttaacggtcagttgatgtttattaccgataccgtgcagacggtaataaaccagggcggcactcatgccgacctgacgctggttccggtccagcagaccgccgttcctgtcgcccagtaa

SEQ ID NO: 135667 - DNA, 312 bp, Enterobacter cloacae
atggctccgcacgacacatttccccaacgcgtctggcacatcgtggcgtcgataccggaagggtatgtcacgacctacggcgaggtcgcccggctggcaggttcaccgcgcgcggcgcgccaggtgggcggcgtattgaagcgcctgccggaagggtccaccctgccatggcatcgggtggtcaatcgccatggcgatatctccctcactggccccgatctacagcggcagcgtcaggcgctgctggccgagggtgtgcaggtctccggcagcggccatatcgatctccagcattatcgctgggtttattga

SEQ ID NO: 135668 - DNA, 408 bp, Enterobacter cloacae
atgactgactcatcaccacagaccatcactctgcctttacctgctattgaagggatgactatcgcctttcagggcgtaaactacctgcgtcctgaaaaaatgctcgacttcgcgaccatcagtcccacgccggtgcgggcggttacgccgctggcgctgctctattccaccgtcggcgtgctgcgccaggtggagctacgcaagctgccggtctatatcagcggtcgggtggtgtaccctatctcatcgttaaccatgccgggcctgcgcgcgaggctgatcatcaacgccacttcgcagcggttgaaatttcttgagagtctcatcgccagctcagcctccgacaatgtccatggcatgcagatcctcggcctcgctctgacgttcaccgtcgaacaggccgcctga

SEQ ID NO: 135669 - DNA, 258 bp, Enterobacter cloacae
atgaccacagtggttttgaatgtaaaaattgacgcagagctaaaagaaaagttgcgtcattttgcggaagttaataacgagaacctgggaacggcaacggaaaagctgctgcagctggcttttcagctggaggagtcagcaggtgaggcgggggtgacggaagaggacattgacagccagcataccgaagaggaagcaacgccacttacccctaaagaaatcaaagcattaagaaaacttctgaagaagaaaaaatga

SEQ ID NO: 135670 - DNA, 216 bp, Enterobacter cloacae
atgaaacaacaattctctacagccagcaactatagcgaagcttgcgatatgttgcgctcaggatacgtaaaacacgtccgcctgaactggaatatcggtagtgatgagttctttcgcattgcttccgactggtgtgacaccggcgctaaaatcaaaaaagatgaagatggctttattatttccctgaaagggtttcctattccgcgccagcattaa

SEQ ID NO: 135671 - DNA, 1200 bp, Enterobacter cloacae
  misc_feature (1042)..(1051): n is a, c, g, or t
atgtcagcccgacgctttggaacccaatcgctggtacgcctgctcggcaactggcaggagaccagctcacgcacgccgctatggcgccagctggcggaagcgctccgcctgctgatccttgatggtcgcctgacgctgcaaacgcgcctgcccggcgagcgcgagctggcggcggccctgaacgtcagccggaccaccatcgccagcgccctcggccagttgcgggaggagggctttctctacagccgccaggggagcgggtcacgcattgttttgccggaacgccccgccgatcttcctctgcctgccggcatctcatctacgcttaatctatctaccgccgccctcagcgccgggccggaggtccatcaggccttccagcacgctatgaccctgctgccgccctatctcgcacagactggctatgaccagcaggggctgccggtgctgcgggaggcgattgcccggcgctacagcgaacgcggtctgccgacgcggcccgatgaggtgatggtggtcaacggcgccctcagcgccttcgcgctgatcctgcgcctgttcaccgggccgggcgatcgggtggttattgacgcccccacctatccgatggccatcagcgccattcagggcgcctcctgccgccccgtcggggttgcgcttccgcagcagggatgggactgcgatggactggcggcgactattgcgcagactgcgccgcggctggcgtggctgatgccggattttcacaaccccaccggacgctgtatggatgcccccacccgccagcgggttgcggacatcgccgccaggacgcgaacaacgctggtaatcgacgagaccatggccgacctttggtataacgcgccgccgcccccgccgctggccagcttcaatcccgatgccgcggtgctcaccattggttcggccgggaaaagcttctgggggggactacgtatcggctggatccgcgccagcgcgcggaccatcgcctcgcttattcaggcccgcgattcgctggatttgggtacgccgctgctggagnnnnnnnnnnctggaaaatgccgccacactgctgccgccgcggcgggatatgctcaaggcgcgccgggacatgtgcgaaacgctgatggcggaatattttccccgctggcggttttcgccaccggaaggtgggctctctttttgggtggaacttcctga

SEQ ID NO: 135672 - DNA, 615 bp, Enterobacter cloacae
atgcttcgtcgcctgctgcagttatatattggtctggtgctttacggcgtgtccacggcgctcttcgtgcatgccaatctcggcgccgatccgtgggatgttttccatctcggggtggctaaacagctggggatcagtttcggtacggtgattatcctgaccggcgcggcggtactgctgctgtggatcccgatccggcaaatgccggggctcggcacggtgagcaatgtcatcgtgctgggactagcggcggacgccacgctggccgtcctgccgccgctggagtcgatggtggcgcgcagtgcgctgctggcaggagcgattgtgctgaacgctatcgctaccggaatgtatattggcgcgggctttggccccgggccgcgcgatggcctgatgaccggtctgcatgctcgcactggttggtcactgcgcggtatccggacggcgatcgagctttccgtactgctgattggctggctgctggggggcaaatttggcgtcggaaccgtcatctacgcgctgtcgattgggccgctgatccagctgtgcctaccgtggttcagccagcccgtcagccgcaacgcggtcagccctccccgggaaatagtctcctga

SEQ ID NO: 135673 - DNA, 840 bp, Enterobacter cloacae
atgaacgatttcacttcccttctgcagcagggcaatgcctggctgtttattcccagcgcgatactgctcggtgccctgcacggccttgaaccgggccattcaaaaacgatgatggccgcctttatcgtggcggtacggggaacgttaaaacaggcggtactgctggggctggcggccacggtttcccatacggcagtggtctggctgatcgccatggccggcctgtggtttggccgcggctggaacgcccaaacctctgaaccctggtttcagctggtctcagggattgtcattgtgctgattgcctgctggatgctctggcgcacctggcgcgaatcgcagccccacacgcaccacgatcaccatcacgaacatgatcatcaccacgaacatgatcaccaccatgaccatcaccatgaccatcaccatgcgtcctcatccgccgcgccgctggtggcggaggagtggcaggacgcgcatcagcgggcccatgctcaggagatcaaccggcgctttgatggccgtcaggtgacgaccgggcagatcgtgctgtttggcctgaccggcgggctgatcccctgcccggcgtccattaccgtgctgcttatctgtttacagctgaagaaattctcgctgggcgccacgctggtactgggctttagcgttggtctggcgctgacgctggtggcttccggggccatcgccaccctgagccttaaacatgccacccgccgctggccgtggcttaacgacctctcgcgcaaggcgccctggttctcaggcttactgattattgtggtggggatctacatgatgcttcatggcctgagcggcctgtaa

SEQ ID NO: 135674 - DNA, 321 bp, Enterobacter cloacae
atgatgaaggtcggtaatcacggacagaatgaaacggtggatcgtgcaatgtcacatacagttcgacacaaaaagatgttactgacccggctgaagaaaattcaggggcagagtaccgcgttagagaaaatgcttaatcgcgagcatgagtgcgctgaggtgctacagcagctggcggcgattcgcggcgcggtcaacggtatgatgctgcaggttattcaggggcatcttaccgaccatgtggtgaaagagcctgacgagaagcagcgcgaagcggatctggagacggtgatgcaggtgattaaatcctatctgaagtag

SEQ ID NO: 135675 - DNA, 1560 bp, Enterobacter cloacae
atgaggacccggcatctgatggcgctgtttacaggagtgctgatactggccatcatcctgcccatttcactcagcatctggcaggcggcgcggcaggccaaaatgcagttctatcgtgaactggatgactattccaaccgtatcgtcgttcggacgctgcaggttgccgaccaggcccgggaagcgttacgagaggctgacgcacacaccgccgcctcctgtagccctgaacatctgcttacgctccgccgcatcgcctatacccatcgctacattcaggaagtgctctggctgcgtgattccgtgccgcaatgctcctccctggaagaccatagcgtcgcggtcaccttccccccgccggaccatattgcctccgacggctatcgcacctggctgacctcaattaacgatcttggcctcgatcatcagatgacggccatgggcagccggcagcacatggtgatgatcgaccccgtatcctttattgatgtcgttcccgccagcgaagagaagatccataccatgctgtttggcctggaccaccagaaaatggtgatcagcagtcagccgctgccggcgaaagtctggcaacgcattaaagatccgcatgtggatatgcttactctggataacacagtctaccggatccagcgcattcccgagctgggctctggcatcgtaacctggtcttcaaccttgccgctgcagcagcgcattcgacagcagctgttcttctggctccctgctggcattttcaccagcctgctcgccacctggctgctgctgcgtctgctaaggcacctgcgctcaccgcgcaacagcatgctggacgccctcaattccgaagcgattcaggttcactatcagccgattatttcgttgcaggacgggaaaattgccggggcggaggccctggcccgctggcagcagcccgatggcacttttttatcgccggatatctttattcccctggccgagcagaccgggctcatcacgcagctgacggaagatatcgtcaggaaaatttttgccgatctcggcccctggctgcggcagcggccggaagtgcacatctccatcaacctgtcggtagatgatttacgctcgcccaccctgccgacgttgttgcacaatcagctacagcactggggaatcgccgccgaacagatcatccttgaaatcaccgagcgcggttttgtcgacccggagacgactatgccggtgatcgcccactatcgtcaggccgggcatcggatctcgattgacgatttcggcaccggctactccagcctgagctatctgcagaaactggacgtcgacacgctgaaaatcgataaatcttttgtcgataccctcgagtaccggccgctgacgccgcacattattgaaatggccaaagcgctcaatctggccaccgtcgccgaaggggtggaaaccgaaagccagcgcgactggctgcgccagcacggcgttcagtacgcccaggggtggctttacagcaaagcgctgccaaaagagcagttcattctgtgggcagagcataacctccatgcgcattaa

SEQ ID NO: 135676 - DNA, 1110 bp, Enterobacter cloacae
atgtccaatatacgactgaggaatgtcaccaaaaggttcggcagcacggtgacgctgcaccaggtcaatctcgatattgaagatggcgagtttgccgtcttcgtcggcccttccggttgtggaaaatcgacgctactgcgcatgattgccgggctggaagaggtcagcgaaggagaagtactgatcggcgatgaggtgatgaatgatgtcgtgcccgcccgccgcggcgtggcgatggtcttccagtcctatgcgctctatccgcacatgacggtggcagagaacatgggctacgggctgaaggtgaataaagtgccgaaaacggagatccgtcgccaggtggaaatggtggctaaaacgctgcagctctcgcacctgctggatcgtaaaccgaagcagctctctggcggccagcggcagcgcgtggccattggccgggcgatcgtgcgtaatccccgggtgtttatgttcgatgagccgctctctaaccttgatgcggagctgcgcgtcgatatgcgcctgcatattgcccgtctgcaccaggagctgaagaccactatggtgtatgtcacgcacgatcaggtggaggcgatgacgctggccgataaaatcgtggtcatgaactacgggaaagtcgaacaaatgggttcgccgatggcgctgtactacaatccggtcaacaaattcgtcgccggctttatcggctcgccgaagatgaactttctgccggctatcgtcagcgactggcagccggaacgcttaacggtcaccctcgcgcaggaccatcagctggccctgaatatcgccacccagccgctgaagcccggcgctgcggtgacgctggggatccggccggagcacctcaccccggaagtcaccaccggtaccgtagtggagtttcaatgtgaagtggtggagcgtctgggcaacaatacctatctgttcggccagtgctacggccacgacaacgtcaaggttctgctgcccggcgacgtccatttccgcccctggcagaaaattaagctggctttcgatgagcgcttctgcatggtgtttgatgagaacgacctgcgcatcagcgctgatatcccggctccggatgcacactag

SEQ ID NO: 135677 - DNA, 1233 bp, Enterobacter cloacae
atgaaaaagaacacgcttgctgcactgatccttaccaccctggcggcggggcaactcgccagcctgcaggcgcatgccgccgggcagctcaacgtctgggaggacattaaaaaatccgctggcatcaaaaccgcggttagcgattttgaaaagcagtacaacgtgaaggtcaatctccaggagatgccctacgcccagcaactggaaaaactgcgcctcgacggcccggcgggcattgggccggacgtgctggtgatcccgaatgaccagctcggcggcgccgtggtacagggactactctcgccgctcagcgtcgatcaggcgaaacaggatgcctttacgccagcctccatcaatgccttccgcatggacaacgcgctgtatgggatcccgaaggcggtggaaaccctggtgcttatctacaacaaggacctgatcgacaagccgctggacagcctgcaggcctggctggactactcgaaaacccagcgcgagcagaacaaatacggcctgctcgccaagtttgaccagatctattacagctggggggcgattggcccgatgggcggctatatctttgctaaaaacgacagcggcggctttaacccgcagcaggtgggtctcaatacccccggcgccgtcgaagccgtcaccttcctgaaaaaattctatgccgagaaggtctttccggcggggatcctcggcgataacgggctgaatgccatcgattccctgtttaccgagaaaaaagcggcggcggtgatcaacggcccctgggccttccagccgtatgaagccgctggcattaactatggcgtggcgcccctgccgaccctgccggacggcaagccgatgagctccttcctcggcgtcaaaggctatgtagtatcgacctggagtaaagacaaagcgctggcgcaacagtttatcgagttcatcaaccagccgcagtatgtgaaagcccgctatgtcgccactggcgaaattccgccgctgaaggcgatgattgacgatccggtgattaaaaacgaccaaaaggccagcgccgtcgccatccagtcggcgcgagcggtggcgatgctgggcattcccgagatgggggaagtgtgggggccggccaacgccgcgcttgaactgagcctcaccggtaagcaggcgccgcaggccgcgctcgataacgcggtgaaacagatcacgatgcagatcgaagcgatgcaggccagcaatcagtaa

SEQ ID NO: 135678 - DNA, 1203 bp, Enterobacter cloacae
atgaaaagattcacacccgcatggcttgcggtttgtctggcatgcagtttctccacctcttctctggccgcggacgcgcttgcaacccgcgcgtttcagggcatgccggcggactttatcaaaggagcggatatctccacgctgctggacgccgaaaagcacggggcgacgttctacgatcagaataatcagcgcaaggatccgatcgctattctgaaagagaacggcgtcaactatgtccgcctccgtctgtgggtggatccgcaatcggcgagcggcgaggactatggcggtgggaacaatgatctggccaccaccctggcgctggcgaaacgggcgaaagcccaggggatgaagctgctgcttgattttcactacagcgatttctggaccgatcccggcaagcagttcaagccgaaagcctgggaaaagctggattacccgcagctgaaaacggcgattcatgactatacccgcgataccatcgcccgctttaagcaggcgggcgtgctgccggatatggtgcagatcggcaacgaaatcaacggcggcatcctgtggccggaagggaaaagctgggggcagggcggcggagagttcgaccggctggctggcctgctgaacgcggctatcgctggcctgaaggagaacctgcgccagggcgagcaggtgaaaatcatgctgcatctggccgaagggaccaagaacgataccttccgctggtggtttgatgagatcgacaagcgccatgtaccgtatgacgtgattggtctgtcgatgtacacctactggaatggcccgatcagcgccctgaaggccaatatggatgacatcagcaaacgctataacaaagacgtcatcgtcgtcgaggcggcctatgcctataccctggccaactgcgataacgcggaaaatagtttccaggcaaaagaggaaaaggatgggggatatcccgccagcgtacaggggcaatataactatattcacgatttaatgcaggcggtggttgatgtgccagaccagcgtggcaaaggtattttctattgggagcctacatggattgccgtgccgggaaatacctgggccaccccggcggggatgaaatatatccacgacgagtggaaagagggtaatgcacgtgaaaatcaggcgctatttgattgccatggaaaagtattgccgtcggtaaaagtttttaattaa

SEQ ID NO: 135679 - DNA, 2058 bp, Enterobacter cloacae
atgaataaatttgcacctttacatccgaaggttagtacgctgctgcatggcgcggattataatccggagcaatgggagaatgaccccgatattattgataaagacattgccatgatgcagcaggcaaaatgcaatgtgatgtcggtgggaatatttagctgggcgaaactggagccacgcgaaggggtatttaatttcgcctggctggatattatcctcgataaactgtatgccgccggcattcatgtctttctggccacgccgagcggcgcgcgtccggcgtggatgtcgcagcgctatccgcaggttctgcgggtggggcgcgatcgggtgccggccctgcacggcggccgtcacaaccactgtatgtcgtcaccggtctatcgcgagaaaaccctgcaaatcaataccttgctggcagaacgttattcctcacacccggcggtgctgggctggcatatttccaacgaatatggcggtgaatgccattgcgatctctgccagaaccgttttcgcgactggctgaaggcgcgttaccagaccctggagaacctcaaccaggcctggtggagcaccttctggagtcatacctatactgactggtcgcagattgaatcgcctgcgccgcagggcgagatgtcgatccacggtcttaatcttgactggcatcgctttaacaccgctcaggtgactgatttctgccgccatgaaattgctccgctgaaggcggcgaatgcctccctgccggtgactaccaactttatggagtatttctacgattacgactactggcagctggcggaggcgctggatttcatctcctgggacagctatccgatgtggcaccgcgataaagacgaaaccgcgctggcctgttacaccgcgatgtatcacgacatgatgcgcagcctgaagggcggcaaaccgtttgtgctgatggagtccaccccgggcgccaccaactggcagccgaccagcaaactgaagaagccgggaatgcatattctttcctcgctgcaggcggtggcgcatggcgccgactcggtgcagtatttccagtggcggaaaagccgcggttcggttgagaaatttcacggcgcagtggtcgaccacgtcggacatattgatacccgcattggccgcgaagtctgccagctcggcgagatcctcagcaagctgccggaggtgaggggctgtcgcaccgaggcgaaagtagcgattatcttcgaccagcagaaccgctgggcgctggatgacgcccaggggccgcgcaatcttgggatggaatatgagaagacggtcaacgagcactaccgcccgttctgggagcagggcatggccgtcgatgtgattgacgccgatgtcgatttaacgccgtatcagttagtgattgccccgatgttatatatggtgcgcgacggctttgccggtcgggcggaggcgtttgtcgccaacggcggccacctggtgaccacctactggaccggtatcgtcaatgagtccgatctctgctatctcggcggcttcccgggcccgctgcgcaatctgctggggatctgggcggaagagatcgactgcctgaatgacggcgagtttaatctggtgcaggggcttgccgggaatcagtgcggtctgcagggcccttatcaggtgcgccatctctgcgaactgatccatatcgagagcgcccaggcgctggccacctaccgggatgatttttatgccggacggccggctgtgacggtgaacgcgttcgggaaaggcaaagcctggcatgtggcctcccgcaacgatttagccttccagcgcgatttctttaccgccctgagcaaggagctggccctgccgcgggcgatagcgacggagttaccacccggcgtggtggcgactgcgcgcaccgacggtgacaacgcatttatcttcctgcagaactacagcgcgcaaaaccataccctgaccctgccgcaagggtattgggattgcctgaccgacgcggcggtatcggctccactgaccctgtcggcatgggattgccgtattctccgtcgtcacgcgtaa

SEQ ID NO: 135680 - DNA, 315 bp, Enterobacter cloacae
atggtgagtttaaaatccttcctgcactatttctccccagcgcgtccggcacagccattaagcgaggcggaaaaacagcaaatcgaggcgctgattcaggcctttggtggcgaagcgaatattacgcaagtggacgcctgtattacccgtctgcgggttagcgttcgccatcttgcggccgtggactccgaagcattacagcagcagggcgcgctgggggttattattcttggtcagcaggtgcatgctattttcggtaagcagtccgatgcgctgcgtcagcttctggatgaacattttgccgcccggaaataa

SEQ ID NO: 135681 - DNA, 1272 bp, Enterobacter cloacae
atgaacactacactgcgcgccctttcagtcgcgttagccgctgcgctaatcgctccttccgcgtttgcggccaccgccgcgatcccaacgatcgatttccatggctatatgcgcgccggggttggggtctccggcgacggtagcgaagcggaatggcaaaaaaataagctgggccgtttggggaacgagtcggatacctacggcgagctggagctgggctctgaggtctataagaaagatgacgtcagcttctatctcgacagtatggtcagcatggtctccgacggctctaacgataatgaaaccacgctgaacgatgatgcacagttcggcttacgtcagttgaacctgcagataaaggggctgatccctggcgatccgaatgcggtgatctggggcggtaaacgttactaccagcgccatgatctgcatatcatcgataccaaatactggaacatttccggctccggagccggggtggaaaactacaccctcggcccgggcgccgtctcgctggcctggatccgcggcgatgccaacgatgttgactatcgcgtcgatggcgacagcaacgtcaatatcaactatatcgatttacgctacgcgggctggaagccatgggcgggctcgtggaccgaattcggtatcgactacgcgatgccaaacaccaccaaaaaacaggatagctacggcggactatacgatgctgacaacggcgtcatgctgaccggtgaaatcagtcaggatatgctgggcggctataacaaaaccgtgctgcagtacgccaacaaaggcctggcgcagaacatggtctcccagggcggcggctggtacgatatgtggaactacgtgaacgacgccaccggttatcgcgtgattaacaccggcctgatcccgattactgagaagttttctatcaaccacgttctgacctggggctcggcggatgacattaccgactataccgacaaaacgcggatgctgtcgctggtcgcccgcgggcagtaccagttcaccgactacgtgcgcctgattggcgaagtcggcggtttctatcagaaagacagctacaacaatggcaccagctacaaacaggccggtgagaaatacaccattgcgttgggcctggcggacgggccagactttatgtcacgtccggaattacgcatttttgcttcatatttgaatgattccgaagatggtaaaccgtttgaagaccagacggcgaataatacctggaatttcggcgtgcaggttgaggcctggtggtaa

SEQ ID NO: 135682 - DNA, 1071 bp, Enterobacter cloacae
atgaagtctaaaagcgctactctggaagacgtcgcacgccatgcgggcgtctcttaccagaccgtgtccagggtactcaacaaatcagctaatgtatccgaagcgacgcgtcgcaaggtggagaaatcgatagaggccttacgctatgtgccaaaccggctggcgcagcagctggtggggaaggagagccagacggtcgggctggtgactatttctctggcctggcatgcgccttcccaggtggcggcggcggtaaaacgctatgccaacctggaaggttaccaggttctgatttcgatgatcgatgagagcgtcaaccaaagcatccaggattccatcaatgagctgaaatctcagcgggtggataaagtcattatcaacgtgccgctggagaccgaacaggctcagaaaatcgctgctgacaacgatgatatcgtctgcctgtttctcgacgttgatccctacagctccgtgtttaacgtttcgtttaacccggcggacggcacccgggccagcgtcaaatatctctatgagatggggcatcgggagatcgccctgctggcggggccggacagctcagtctcggccaaactccggttaaaaagctggctggagaccctggatggttacggtctgaagccggtgaccgtcctgcacggcaactgggatgcgcagagcggctacgccggcgcgctgcagatgctgcgcgaaacgcctaatttcagcgctgtgctggtgggtaatgatcagatggcgctgggggtgctcagcgccttccatcagcatcaggtggcggtgccgggtgagaagtcggttattggctatgacgatacctacgaaagctcctttttctatccggcgctgagtaccgtgtcgctcgacctcgacctgcaggggaaagaggcggtgcggcggatcctcgccagcaccagcggggcgcctcatacctcatccattctgccggcgcgcctggtgatacgccattccagcggcgcccgaatcgagcagggaaaagatctgcaggccattgcagaacagctccgcgccatcgcccaccgtctggcaccctga

SEQ ID NO: 135683 - DNA, 264 bp, Enterobacter cloacae
atgaaagcccatatccatcctccctatcgtacggtagtgtttcacgacaccagcgcgaatgagtattttaaagtcggctcaactatccgcaccgatcgcgtgattgaactcgatggcgaaacttttccgtatgtgacgatcgacgtctcttcgaaatcgcatccgtactacacgggcaaacaaaaaaccttcgccaatgaaggcagtgcagcccgattccgccagcgcttcggcggctttattgatgcgaaaaggaaagcatga

SEQ ID NO: 135684 - DNA, 657 bp, Enterobacter cloacae
  misc_feature (624)..(633): n is a, c, g, or t
atgtgcgaatataatcagtttggccaggcgctcggcgtcgcgctgcctgactggcagccgcgcccctggccgacacgacaggtattacagggcagccgttgtcgactcgaaccgctgactcttgctcatgccagcgatctgttcgccgctcaccagctggcgccagacgcccgcagctggacgtggctgctgcgtgaacctgagagcaaccttgcagaattcagtgcctgggtggagcaggtcgccacgctggcagacccgattcattttgccgtcgttgaccagcagcgagggaaagcggtcggctcgctggcgttaatgcgtatcgatatcgctcacggtgtggtagaggtggggcatgtgcatttttcaccgttactgagccgaacggccatggccaccgaagcgcactggctgttgatgcagtatgtctttgatacgctcggctatcgtcgctatgaatggaaatgcaacagtcttaatatcccatcagcccgggcggcaaggcggctggggtttcagtacgaaggacgttttcgccaggcgctggtgagtaaaggacacaaccgggacacggactggttttcggtgatagacggcgaatggccggagctggataacgcnnnnnnnnnnttttgcgcccctgcaccgctttga

SEQ ID NO: 135685 - DNA, 1452 bp, Enterobacter cloacae
atgaatataccggacgaggggttttttacgctgttgacgcaggggatgcggaaccgcacggtcgaaaccttacagcgcgccctttaccacaccttacgtgacgctatcctgcagggaaccctgacggcccgctgccgtttacccggatcgcgggtgatggccgaacggctacacctgtcgcggaatacggtcaatgccgcactggaacagctggcgctggaggggtacctgacacggagccgtcagggaacgcaggtggcaccactcgcctcctgccgccaggaggcgggtcagatgccgcccgtcgtgctgcctgagcggctgcaaaggctgccagccgcgatgcgccgcgactcaccgacgctggcatttacgccaggcatgccggcggtaaactatttcccgctgccgctgtggcggcgactgatggataacgtgctatgcgaagatggtagcgcgctgctgggttatggcgaagccgcgggcgatcctttgctgcgagaggctatcgctcgtcatctggcgctctcccggggcatccggtgcgatatccggcagatcgtcatcaccgaaggcgcgctggaaggcgtcaacttatgcgcctcgctactgaccaacccgggcgacagcgtgtggctggaagaaccgggatacctgggggcgaggagtggctttcagcgggcgggactgcgggtcagaggaatggctgtcgacgatgaagggatgtgtattgctaacggcgtcgcggagccgccccggctcattttcacctctccttcacaccagtatccctgtgggagcatcatgagcgccgggcgccgtctggcgctcgtggaatatgcccgccggcacggggcgtggattgtggaggatgactacgacagcgagtttcgccatagcggagaaccgatcccggcgatgctgggaatggtgcctgatgccccggtggtctatctcggcaccttcagcaaaacgctgtttccggcgttgcgtatcggttttatggttatgccgcccgcgctggcggatgctgctcaggacgccattggcgcgctgctgcgcgggggacaccgtgctgaacagcgggcgctggccagctttatcgagaagggacactatgcgcgccatctggcggcgatgcgccgcctgtaccgtaaacgtcagcaacagctgcgcgaggcgctggcgcaagagataaccgtgccgtgcgacgttctcggcgggggaggggggatgcacctgacggtggcgatggagggcgttaatgaccggacgcttgcgcagcaggcgcgccagtttcagctggcgcccgccgcgttaagccatttctatctcgacccgcagcgagcgcggagcggactggtgcttgggtatggcaatacctctgcttctcgctatttcccggcgctgcggaccctaaatcgtcttattgcgcagcaccggcgcgcgtga

SEQ ID NO: 135686 - DNA, 471 bp, Enterobacter cloacae
atgacagaaatacaacgcctgctgattcacaccattgacgaactcaacgtccaggaaaaacgcgataatcgcccgcgttttagcatcagttttatccgcaatcatccgggactgtttgttgccatgtatgccgcgtttctggcgacgctggtggtcatgctgcgctctgaaacgctggtagactcggtctggttgctggtggtgctgttcattctgttaaacgcctttttcttctttgacgtctatccacgctatcgctacgaggatatcgatgtcctcgactttcgcgtgtgctacaacggggaatggtacaacacccgctttgtcccccggcagctgatcgaccgtatcctgcagtcgccagacgtcgatagcgagcagaaggcgcagctcaaaaagatggtcgccaccaaaggcgagctctccttctacgatgtctttaccctcacgcgcgccggtgctgcgcaataa

SEQ ID NO: 135687 - DNA, 567 bp, Enterobacter cloacae
atgagtgaagaaaaacgcaaaatgatcgccggtgagctctatttatctggcgacccaacgcttcgcgccgatcgcctgcgcgccagacagttgttgcaccgttataatcattccgccccggatgaccaggaacaacgtcagcatattctggccgagctgttcgctcgcgccggcgatgcgtatatcgagccaagctttcgctgcgactatggttataatatttttctcggcgccggtttttacgccaattttgactgcgtgatgctcgacgtctgccctatccatattggcgataactgtatgctggcgccaggcgtccatatttataccgccactcatccgctggacgccgatgcgcgtaatagcggccaggaatacggcaagccggtaactattggccacaatgtgtggattgggggtcgggcagtgatcaatcccggcgtgaccattggcgataatgcggtcattgcgtccggcgcggtggtcaccaaagacgtccctgcctgtaccgtcgtcggcggtaacccggcgcagatcattaagcgccttccgccgacaaatccgtaa

SEQ ID NO: 135688 - DNA, 219 bp, Enterobacter cloacae
atgtctgataagccattaactaaaacagactatttgatgcgcttacgtcgttgccagacaattgacacgctggagcgcgtcattgaaaaaaataaatatgaactgtctgataatgagctggcggtattttactcagctgccgaccatcgtctggcggaactgaccatgaataagctatacgataaaatcccgacttctgtctggaaatttatccgctaa

SEQ ID NO: 135689 - DNA, 375 bp, Enterobacter cloacae
atggacgaatactcgccaaaaagacatgatattgcacagctacgctttctctgcgaaacgctgtatcatgactgccttgcaaacctggaagagagcaaccatggctgggtcaacgacccgacgtcggctgtcaatctccagttaaatgaattgatcgagcacattgccacattcgctcttaattataaaattaagtatgcagaggataataagctgatcgctcaggttgacgaatatctggacgacacttttacgttgttcagtaactacggcattaactctacggatttgcaaaagtggaaaaaatccggtaaccgactatttcgttgctttgtcaacgccagccgggaaaacccggccagtctatcgtgttag

SEQ ID NO: 135690 - DNA, 663 bp, Enterobacter cloacae
atggccatgtctgataacgacgaactccagcaaattgcgcatttgcgccgtgaatacacccgtggcggtttgcgtcgccacgatcttcctgctgaacccctgccgctgtttgaacgctggctgcgtcaggcctgcgatgcgaaacttgccgacccgacggccatggtggttgccaccgtcgatgagcgcggccagccctaccagcgcattgtgttgctgaagcactacgacgaaaaagggttggtgttttataccaacctcggcagccgcaaagcgcatcaaattgaaaacaacccgcaggtcagcctgcttttcccgtggcatatgctggagcgccaggtgatggtaatcggcaaagcggagcgtctgtcgacgctggaagtggtcaaatatttccacagccgtccgcgcgacagccagattggcgcctgggtctcgaagcagtcgagccggatctcagcccgcggcatcctcgaaagcaaattcctcgagctgaagcagaagttccagcagggtgaagtgccgttgccgagcttctggggcggattccgcgtcagcattgagcagatggagttctggcaggggggagaacaccgtctgcacgatcgctttttataccagcgcgatagcggcgcctggaaaatagaccgtctggcgccgtaa

SEQ ID NO: 135691 - DNA, 360 bp, Enterobacter cloacae
gtgcccgccgtgaccgggaaagtcgaaggcaaacgaatgaaaaaaattcttatcgcagttgtaccttttatgctggcgggctgtagctactacaaccagtttgtcgagcggatgcagacggacacgctggagtatcaatgcgaccagaaaccattgacggtccatcgcaataacgcacgccagcaggtcagttttatctatgataatcagcaactgaacctgtctgaggggctgtcggcttccggggcgcgctacaccgacggcgtctatgtgttctggtcaaaaggcgataccgccaccgtctataagcgcgaccgcatcgtccttgataactgtcagctgcagacggccaaacgttga

SEQ ID NO: 135692 - DNA, 1107 bp, Enterobacter cloacae
  misc_feature (994)..(1003): n is a, c, g, or t
atgagatcgggtcgctttattggcgttatgtctggtaccagcctggatggtatcgatgtcgttttggccaccattactgaaaacatggtggcgcagcaggctagtctcacctggcccattccacacgcgataaaagaagagattctggcgatttgccaggggcagtcgctgaccctttcgcagctaggtcgtctggacacccgtctgggacggctgtttgccgatgccgtactggcgctgatgcgccaggaaagtctcaaacccaccgacgtcatcgccatcggctgccatggacagaccgtatggcatgaaccgcagggagaggctccgcataccctgcaaattggtgacaacaaccagatcgccgcccacaccgggataaccgtagtgggggattttcgtcgccgggatatggcgctaggcgggcagggagcgccgctggtgccggcttttcatcatgcgctgctggcccaccccgttgagcgacgtatggtgctcaatatcggcgggatcgctaatgtgtcgctgctggcgccagggcagccggtgcgcggctatgataccgggccgggaaatatgttgctggacgcctggatctggcgccagaagggcaaaccgtacgacaaggacgcccaatgggctagcgaaggtaaagtgctgctgccgctgctgcaggacatgctgagcgatccgtggtttgccttgccggcgccgaaaagcaccggtcgggaatatttcaattacggctggctggagcagcatatggcccgctatccggggctacgcggggaggatgttcaggctacgcttgcggaattgaccgccgtcaccatcagtgagcaggtattgttaagcggcggctgcgagcgtttgttagtgtgcggcggcggcgcgcgtaaccccttgttaatggcgcgcctggcggcgctgctgccgggaaccgaggtctccaccaccgatgaggcggggatcagcggcgatgatatggaagcgnnnnnnnnnncgctggctggtctgccgggcaatctgccctccgtgaccggcgccagcgaagcctcggtgctgggcgccatttttccggctaacccgccgcagaatcggagttaa

SEQ ID NO: 135693 - DNA, 468 bp, Enterobacter cloacae
atgattttacgtgttttggctgtatcgatgattggttttacgctcgcaggctgcgtgagcagcagcggcctgtccggcgacgtttattccgcatctgaagccaaacaggtgcagagcgtgacttacggtactatcgtgcatacgcgcgccgtacagatccagagcggcgacgatagcaatgccatcggggccattggcggtgcggtactgggcgggttccttggaaacaccatcggcggcggtaccggacgctctctggctacggcggcaggtgcggtcgcgggcggcgtagccggtcagggcgttcagggcgcgatgaataaaacgcagggcgttgaactggaaatccgtaaggacgatggcaataccattatggtagtgcagaaacagggcagcactccgttctccgttggtcagcgcgtggccattgccggcagcggcagccaggtcactgtctctccgcgataa

SEQ ID NO: 135694 - DNA, 1362 bp, Enterobacter cloacae
atgcccgaacatgtgcatcatatcgttaaacgtctaatcctttatatttgcatttgtttactggccgggattggcatttccgggatgactgcgttttttcataccagcttcagtagtacttcctcaatattatttccgctgctgaccagtttcctgatggtttttcatattaccattgcctgttttatgggcatgaaatactggagcagcaagcggcgtctgtaccttactccagtctctttcgggtttgcctgctcagcgctgctgatgcttggcacgctcagcagctatccggactggcttacctgcaatccggccccggtcgttaatcaaaatgacgccgttatctattatttcttccgcaatataatgatggctgtgttattcatgtcatctattattttgtactattttcgccagcgcatcatgcattcgtggaaagcacacgttcttacatttacagcatgtatactttttacgttgactattattgatttatcatggctatactccagccattcgccgtggctgagcgtcaattttatcgacgatctgagccatacctttaccccgttgtggcaaagtattatcggctggttgctgatggcagtttggttcatcacgctgattttattaattagcttgagtaaactgcgtaatattttttggttcagcggcgcttttttttgcagcgcttatttgttcacgcttttccagctgctctccaccgcaggggagctggatcagacctggtaccaggcgcgttttttcgaaacgctatgcaccttgttcctgattctggtgctactggttgacgtctttatcctctatcgcgagtctaaccacaaatatgttcattcgtatcagaattcgatccgcgacccgttgacccgcctctacaaccgcagcttcttctacgacacccttaaccaacaactggcgaaggtgaatgcccagcatccgctgtcggtgctcatcagcgacctcgaccatttcaaacgcatcaacgatagctacggccatgtcgcgggcgacaaagtgatccagttcgccgcctcggtgctggaaagccattcgcgggtagatgacgccgccgcacgcatcggcggtgaggaatttgctctgctgctggtcaacaccggtgaaaaagaagcgcaagcgatcgccgagcgtatccgcctggcggtcagtgccggggagagccatttaccggagcgaatgaccatcagcatgggggtgtataccacctacgacaatagcgtgacagcggaagcgtgcgttcagcgcgcggacgaagccatgtatgaagcaaagaataacggacgtaaccaggtgatcgtctggcatcggcagggagggtga

SEQ ID NO: 135695 - DNA, 435 bp, Enterobacter cloacae
ttggaatcgccacttggttctgatctggcacgtttagttcgcgtttggcgcgcgctaatcgaccatcgcctgaaacctctggagttaacgcagacccactgggtcacgctgcataacatccaccagctgccgcctgagcagtcgcagatccagctggcgaaagctatcggtattgaacagccgtcgctggtgcgcacgctcgatcagctggaggagaaagggctcatttctcgccagacctgcgcaagcgatcggcgggccaaacgcatcaagctgacggaaaaagccgaaccgctgatcaacgagatggaagaggtgataggtaagacccgtgatgaaatcctctcaggggtctcgaagcaggaagtggaaaccttgctccacttaatccgtaaacttgaacaaaacatcctcgatctccaggctaaagattaa

SEQ ID NO: 135696 - DNA, 237 bp, Enterobacter cloacae
gtgaaactgagtcttaacacatccggattgccgctgcaggacctagtgttcggcgcatccgtctatttccctccgctgttcaaagccgtcttgttgggtttctttatctggttgtttttacatcgccagctgcgtgactggatgtatgcgggcgacatctggcacccgctactaatggatctctccctgttcgcgctctcggtctgtctggccctggtattactcattgcctggtga

SEQ ID NO: 135697 - DNA, 897 bp, Enterobacter cloacae
atgaaaagattaaaatatctgtcaacgctgctggtcgcggccgtcgccctgattgccgcatggttgttatggaatttctacacacagtcaccctggacccgcgacggcaaagtgcgcgccgagcaggttgggatcacccctcaggtctccggcagtattctgcagttgaacgtaaccgataaccaacgggtcaaagccggggaagtattgtttaccatcgacgacaccccctatcgcatcgcggtgctgaacgcccaggcgcagctggcgaaagcccaggcggaggtggcgaaagcgcaggcggagcaaagcaaggccgccagcgaggctcgccgtcgccgaagcctgtcgcaaaatgccatctcggctgaagaccttgagaacgtcaataccgccctgaataccgccaccaccaccctggctgccgccagagcgggggtcggcgtaaccgaagcggcgctgaaacatgcgcagtggcagctcagccagacggttgtcaaagcgccggtggatggctgggtgaccaacctttccacccgcgtcggtgattacgctaccaccggccatccggtctttgccctggtggacagccattcgttttacgtactgggctacttcgaagagaccaaactgcgccacattcgcatcggcgatccggcacaaattattctctatagcaatcagcagacgctaaagggccatgtcgccagcatcggccgcgcgattgtcgaccagagcgtggaacagggaaccgggctggtggccaacatcaaaccaaatatcccctgggttcgtctcgcccaacgcgttccggtgcgaattgcctttgatacgctgccggccgatgtcaccctggtctccggtaccacctgcactgtctcaattggcgggcagtaa

SEQ ID NO: 135698 - DNA, 2025 bp, Enterobacter cloacae
atgaacctgcagaccctgtcgtggcgcgcactcccctgggttaaagccacccggccgcagtggcggtacgcattgcgcaacggcatcgcgatgtgtcttgcgctgagtatcgcctatgcgctggatcttgatgagccctactgggcgatgacgtccgcggcggtggtcagctttcccaccgtcggcggcgtgatcagtaaaagttttggccgcatcgcaggcagcctgctcggcgcctgcgccgccctgctgcttgccggtcatacactcaacgatccctggctgtttctgttcagtatctccggctggctggcgctctgcacctgggcctgcgccctgttcaccaataacgtcgcctacgcctttcagctggcgggctatacctgcgccatcatcgcctttccggtgattaacatcagcgacagctacgagctgtgggtcatcgcccagtcgcgcgtctgcgaagttatcgtcgggatcctctgcggcgggctaatgatgatgatcctgccaagcacctccgacggcagcaacctgctgacggccctgaaaaccatgcacgcccggctgctggagcacgccagcctgctgtgggtgccggagacgacggatgccattcgcaccgcccatgagagcgtgattggccagatcctgaccatgaacctgctgcgtatccaggccttctggagccactaccgtttccgtcggcagaatcctctgctgaactacctcctgcatcagcagctcagaatgaccagcgtcatctccagtctgcgacggatgctgctgaactggcctgacgcgccggcgaatactcgccaggtactggagtcgctgctcgccgagctcgccacccctcatgccgacagctatcacgttgcgcggatcctggcgccgctggcgccgcggcaggatgccgattaccggcacatcgctttctgggcgcgattgcgctatttctgtcgcatttacctggagagcagccgctggatccgccgcgttgaaaatgcctcggcgatcgccgagttcaatgtgcccgccgccccgccattagcccgccataccgatcaggcggaggcgttgctcaacggtgtccgtaccttttgcgcgctggtggcgattggcgcatgggggatcagtacccagtggaccagctgcgcggcggccctgaccctggcctccatctgctgcgtgctctactccgtatccgcctcgccgtttcgctcgctgacattgctgatgcagactctggtcctgctgtcgctattcagtttcgtggtgaagttcggcctgatggtgcaggtaaccgacctgtggcagtttctgctgttcctgttcccgctcctgaccaccatgcagttactcaaactgcagtggcccaaatacgccggcctgtggggacagcttatcgtctttatgggctcgtttatcgccgtcaccaacccgccggtgtacgattatgcggcctttttcaatgataatttgagcaagattgtcggggtaggctttgcctggctggcctttgcggtactgagtcctggctctgacgcccgcaaagggcgacgccatatcagagcgttacggcgtcactttgtcgatcagctcagccgtcatcctcagcacagtgagcatgaatttgaatcgctggtctatcaccacgtcagtcagctcagccagagtaaggatgccctggcgcgccgctggctgttgcgttggggcgtcgtgctgctcaattgctcgcacgtcgtttggcagcttcgcgaatgggaaacccgctccgatcctctcgcccaggtgcgcgacctgtgcatcaacctgttacgcgatgtgatgagcgagcgcggcgtgcagcagcgtccgctggcctccaccctgcaggagctgcagcggatctgcgacgccctgaaccaccatcatcagccggcggcgcgggaactggccgccgcgatttggcgactgtactgcgccctgtcgcagctggaacaggccccggtggccggcacaattggcgaaggaactacttaa

SEQ ID NO: 135699 - DNA, 522 bp, Enterobacter cloacae
atgcaacgatgtattctcgcgatcttatccctcgcattttgcgctggcgcacaggccgttagtgaagatgtgcaacttaatctcgtgaccacccagggcgtcggtcagaccatcggcagcgtcaaaatcaccgaaaccgaccgcggactcgagttcgcccccactctgcgggcgctaccgccgggtaagcacgggtttcatattcatgccgaaggcagctgccagccggcgatgaaagaaggtaaagccgtggccgccggggcggcgggcggacattacgatccgcagcataccggcaaacacgaagggccgttgggggccgggcatcttggcgacctgcccctgctggtggtcaacgatgcgggcgtagccgaccagccgattattgctccgcgcctgaaaacgctggcggaggtgaaagggaaagcgctgatggtccacgtaggcggggataacatggccgacagcccgcagccgctgggcggcggcggcgaacggtttgcctgcggggtgattaagtag

SEQ ID NO: 135700 - DNA, 897 bp, Enterobacter cloacae
atggttcagcgtattgctatggctccccaggggccggaattttcacgttttgtgatgggctactggcgtctgatggactggaaaatgtcgcctggcgagctggtcagctttattgagcagcatctcgatttaggcgtaaccaccgtcgatcacgccgatatctatggcgattatcagtgtgaggctgcctttggcgaagcgctgaagcgagcgccgcatctgcgtagccggatggaaatcgtcagcaaatgcggtatcgccacccgggcgcgcgctgagaacaccattggccactacattaccgaccgcgatcacatcgtgctcagcgccgagcaatcgctgcgtaatctggcgacggaccatctcgacttgctgctgatccaccggccggacccactgatggacgccgacgaggtagccgaagcttttctcgcgctgcatcatagcggtaaagtgcgccattttggcgtctcgaactttacccccgcccagttcactttgctgcagtcacgtctgccgtttaccctggccaccaaccaggtcgaaatttcaccggtgcatcagccgctgctgctcgacggtactctcgatcagctgcagcaactgcgtattcgtccgatggcgtggtcttgtcttggcggtggtcgcttgtttaacgaagagggcttccaggcgctgcgcgatgagctggcgcaggtggcgcacgagcttaacgccgacagcatcgaacaggtagtttatgcctgggtgctgcgtctgccgtcgcagcctctgccgattattggctcgggcaaaatcgagcgcgtgcgctcggcgattgtggctgaaaaactcagcatgacccgtcagcagtggttccgcatccgtaaagccgcgctcgggtacgacgtaccgtaa

SEQ ID NO: 135701 - DNA, 240 bp, Enterobacter cloacae
gtggcagagcagttagaatttttcccggtgcagagcccgtgccggggaatatgtcagaccgatgagcgcggctactgtcgcggctgtttccgcagccgtgaggaacgttttaactggcaaacgatgagcgatgcgcagaaacaggaggttttgcgtctttgccgccaacggctgctgcgcaaaatacgcgcgaacaggccggagccggcggaagaaccgcagcaaccctcactgttttaa

SEQ ID NO: 135702 - DNA, 600 bp, Enterobacter cloacae
atgaacagacacagcgattgcgatacccgagaacatatcctggccaccggcgagcagctttgcatgcatcgcggttttaccggaatgggcttgagcgaacttctgaagacggcggaggtgcccaagggctccttctaccactactttcgctctaaggaagccttcggcgtcgcgctgcttgaacatcactacaccggatatctgcagcgcctggtcgaccacttcgatcatggcgacggtaactatcgcgatcgcctgctggcctactatcagcacacgctgaatcagttctgccagcaggggattattagcgggtgtcttactgtcaagctatccgcggaggtttgcgatctgtcggaagatatgcgcgccgccatggatcgcggagccagccagattatcgccctgctgggcgacgcgctggagaaaggacgtcaggaaggcagtctcgcatttgacggcgaggccatgaccctgtcgcaggtgctgtattccctgtggctcggggccaacctgcaggccaaaattacacgtagcgcaacgccgctggaaagcgcccttgcccacgccaaacagattattgtagcgcctgcggtataa

SEQ ID NO: 135703 - DNA, 1098 bp, Enterobacter cloacae
atgtcggaagcaaaattattcagcccactgaaagtcggtgcggtcaccgtccctaatcgcgtatttatggcgccgttgacgcgtctgcgcagcattgagccgggcgatatccctactccgctgatgggcgaatactaccgccagcgcgccagttccgggctgatcatcaccgaagcgacgcagatctccgcgcaggccaaaggctacgccggcgcgcctgggctgcacagcccggagcagattgccgcctggcagaaaatcaccgccggcgttcatgccgaaaacggtcatatcgccgtccagctgtggcacaccgggcgtatttcccatagcagcctgcagcctggcggcgccgccccggtagcgccttccgcgctgagcgcgggcacccgtacctcactgcgtgacgaaaacggccacgccattcgcgtcgacacctcaatgccccgcgccctggaaaccgcagagatcccagggatcgtcaacgatttccgtcaggcggtcggcaatgcccgtgacgccggcttcgatctggttgagctgcactcagcccacggctatctgctgcaccagttcctctcgccatcggcgaaccagcgtaccgatcagtacggcggcagcgtggagaaccgtgcccgtctggtgctggaagtggttgacgccgtgagtcaagagtggagcgccgagcgcattggcatccgcgtgtcgccgattggcagcttccagaatgtggataatggcccgaacgaagaagaagacgcgctgtatctgattagcgagctggcgaaacgcggtatcgcctatctgcacatgtccgagccggactgggcgggcggcaaaccttacagtgaagctttccgtcagaaagtccgcgaccgcttcccgggggtgatcattggcgctggcgcttacacagtagaaaaagccaacgatcttatcaataaagggctgattgatgccgtggcctttggccgcgattacatcgccaacccggatctggtggctcgcctgcagaaaaaagcgccgcttaacccgcaacgcccggaatccttctacggcggcggcgcggaaggctacaccgattacccgactctgtaa

SEQ ID NO: 135704 - DNA, 408 bp, Enterobacter cloacae
atgcgcttactccacaccatgctgcgcgttggcgacctgcaacgttctatcgacttctataccaacgtgttgggcatgaagctgctgcgcaccagcgaaaacccggagtacaagtactccctcgcctttgtcggctacggcgaagagagcgaaaccgcggtaatcgaactgacctacaactggggcgtggacagctatgagctgggcaccgcctacggccatatcgcgctgagcgtcgataacgccgccgaagcctgcgaacggatccgtcagaacgggggcaacgtcacccgtgaagccgggccggtaaaaggcggcaccaccgtcatcgccttcgtggaagatccggacggttacaaaatcgagctcattgaagagaaagatgccggcaaaggtctgggcaactaa

SEQ ID NO: 135705 - DNA, 648 bp, Enterobacter cloacae
atgtccgagaacgctcaactgaatggtctgtgcgaccgtttccgcggtttttatccggtggtgatcgatgttgaaaccgcaggatttaacgccaaaaccgacgccctgctggagatcgccgccattacgttgaagatggatgagcacggctggctgatgcccgatgaaacgctgcatttccatgttgaacctttcgagggcgccaatctgcagcccgaagcgctggcttttaacgggattaacccgcatgacccgcagcgcggggccgtcagcgaatacgatgccctgcatgccatcttcaaaatggtgcgcaaagggatgaaagagagcgactgcagccgggcaatcatggtggcgcacaatgccacctttgaccacagcttcaccatgaccgccgccgaacgcgcgggacttaaacgcaaccctttccatccgtttgttaccttcgacaccgccgcgctaagcgggctggcgctgggccagacggtgctgtcgaaagcctgtattgccgcgggtatgccgttcgacggcgcgcaggctcactccgccctgtatgataccgagcagacggcgcagctgttttgcgagatcgtgaaccgctggaagcgtctgggcggctggccgctgccagtggccaccccggagtga

SEQ ID NO: 135706 - DNA, 348 bp, Enterobacter cloacae
atgagctcgactttagaaaagatccaacgccaaatcgctgaaaacccgatcctgttgtacatgaaagggtcgccgaagctgccaagctgcggtttctctgcccaggccgtacaggcgctgtccgcctgtggcgaacgttttgcttacgttgatatcctgcagaacccggatatccgcgccgagctgcctaaatacgccaactggccgactttcccgcagctgtgggtagacggtgaactggtgggcggctgcgatatcgtcatcgaaatgtaccagcgcggtgaactgcagcagctgatcaaagagacggcggcaaagtaccataccgacgagccaaaagcggagtaa

SEQ ID NO: 135707 - DNA, 873 bp, Enterobacter cloacae
gtggcgcggctaaacaaaatcgcgatatcgctctgtgcattactgttcacgtctatctcattcacgccactggctcaggcatcagggcatacgcacgcctccgcttcgccaaaagcgttgcccgcgaaaagtggctcagagcgcaagaaaaaagcaaccagtcaaaaaactaaaaccaccgctaaaaccaccagtaaaaagtcctcgcgcacccggctccctacccgcactaccgcagcaagccaaaccgcacttcatcgtcaggccgccggcgcgacgaaaaaatgcgtgctgcgtaaaggttataaaaagcagtgcgcgaaaacggtcgccgccagcgccgagccgaccctggcgctaaacagcgtcaaaagcaagtgcgtggtgcgcaagggctataaaaaacgctgtaagcccgaggccagcgaagcgaatttaacgatcgccgacgcccacaaggtccgggtgcaaaaagcgcaaagtaccgcgatgaataaactgatgggccagttgggtaaaccctatcgctggggcggcacctcgccgcgcaccgggtttgactgcagcgggctggtctattacgcctataaggacctggtcaagatccacatcccgcgtacggccaacgaaatgtaccacctgcgcgatgcgcgtccggtggatcgtgatgaactgcagagcggcgatttagtcttcttccgcacccgcggacggggcgctgccgaccatgtcggcgtctacgtcggcaacggaaaattcattcagtcgccgcgcacaggtcgtgatattcaaatcacctccctgagcgaggattactgggttcgccattatgtcggcgctcgtcgcgtcatgacgccgaaaaccattcgctga

SEQ ID NO: 135708 - DNA, 486 bp, Enterobacter cloacae
atggcaaaaacagatgaggtggtgagcgcgaaaatgatcccggtggtgcaggggattgttgactggatcgaagcacatattttcgacaccctgtcggtgagcgcgattgcgaaaaagtccggctactcacactggtacttccagcgacaattcgccatggtaacgggctgcacgctggcgagctacgtcagccgacgaaagatgacgattgcgacaatctatttaacgcagacgcaggcgtcgatacagagtatttctcagtgcctgggatacgagggacaagccgctttctgccggacctttcaccgtcactttggcatgtcgccgacccgctatcgtcgtgatacgccgggcaaagagagcaatctgcaatatcccttgcgggtggggatggagatggagcaggagaggcggtctgccgccgcagcggcagaccgggatcagcgaatggttttcggcgtcatgacgcgacgagcgccgacataa

SEQ ID NO: 135709 - DNA, 582 bp, Enterobacter cloacae
atgtcgtttgaattacctgcattaccatatgcaaaagacgccctggcgccgcacatttccgcagaaaccctggaatatcactacggtaaacaccaccaggcgtatgtcactaacctcaacaacctgatcaaaggcactgcgttcgaaggcaaatccctcgaagagatcgtccgcacgtctgaaggtggcgtattcaacaacgcagcgcaggtttggaatcacaccttctactggaactgcctggcgcctaacgccggcggcgaaccggaaggcgaactggcggccgcaatcgccaaatctttcggcaccttcgcggattttaaagccaaatttaccgatgccgcggcgaaaaatttcggcgctggctggacctggctggtcaaaaatgccgacggcagcctggctatcgtctccaccagcaacgccggtaccccgctgaccaccgacgcgaagccgctgctgaccgttgacgtttgggaacacgcctactacatcgactatcgcaacgcccgtccaagctacctggaccacttctgggcgctggttaactggaagtttgttgcggctaacctcgcggcataa

SEQ ID NO: 135710 - DNA, 1167 bp, Enterobacter cloacae
atgaaaatcaactttcctttacttgcgctggcgatcggcgcctttggcatcggtaccaccgagttctccccgatgggattgctgccggtgattgcgaaaggtgtggacgtctcgataccggtagcgggaatgctgatcagtgcgtatgccatcggcgtcatggtcggcgcaccgctgatgacgctgctattgtcgcatcgcgcacggcgcaatgcgctgatttttctgatggggatcttcaccgtcggcaacctgttgtcatccatcgcgccggattacaccacgctgctgctgtcgcggattattaccagcctcaaccacggcgcttttttcggcctgggatcggtggtggcggccagcgtcgtgccaaagcataagcaggccagcgcggtagccactatgtttatgggcctgaccatcgccaacattggcggcgtgccggcggccacctggcttggcgaaaccatcggttggcggatgtccttccttgctactgcgggattaggcctgctggcgatggttagcctgtggttctccctgccgaagggcagcgcgggggaacgtcctgatgtcaaaaaagagctttctgtcctgctgcgcccgcaggtgctctccgcgttgctgaccaccgtgctgggcgccggggcgatgtttacgctgtatacctacatttcgccagtgctcaatacgctgacccacgcttcatcgctgtttataaccgcgatgctggtgctgattggcgtcggtttttcgctaggcaactatctgggcggcaaatttgctgaccggtcggtctccggcacgctgaagggctttctgctgctgctgatggcgatcatgctggcgatcccgctgctggcgcaatcccaggccggggcggccatcagcatgattgtctggggcgcagcaacctttgcggtggttccgccgctgcagatgcgggttatgcgtgtagcgcatgaggcgccggggctctcttcttcggtaaatatcggcgcgttcaacctcggcaacgcgctgggcgccgccgccggtggggcggtgatctctggcggactgggatatgcgtttgtgccggtgatgggcgcgattatcgctggtctggcgctgctgctggtctggtttagcgggcgagcgcagccggaagaggctttcgccagccagtaa

SEQ ID NO: 135711 - DNA, 1026 bp, Enterobacter cloacae
atggcaactattaaagatgtagcgaaacgcgcaaacgtttccactacaactgtgtcacatgtaattaacaaaacccgtttcgttgccgaagagacgcgtaatgcggtatgggcggcgatcaaagagctgcactactcgccgagcgccgtggcgcgcagcctgaaagtcaatcacaccaaatcgattggcctgctggcgaccagtagcgaagccgcctatttcgctgaaattattgagtccgttgaaaagagctgcttccagaagggctatactctgatcctcggtaacgcgtggaacgatctggaaaaacagcgcgcctatctgtcgatgatggcgcaaaagcgcgtagacggtctgctggtgatgtgttccgagtatccggattcggtattgagcatgctggaagagtaccgccatatcccgatggtggtgatggactggggcgaggcgaaagccgacttcaccgatgcggtgatcgataacgccttccagggcggctatatcgccggacgctacctgattgaacgcggccatcgcgaaatcggcgtgatcccgggcccgctggagcgcaacaccggcgcggggcgactggccggcttcatgcaggcgatgaaagaggcgcatatcagcgtgccggaaaactggattgtgcagggcgacttcgagccggagtccggctaccgcgcaatgcagcagatcctaaaccagcagcaccgcccgacggcggtcttctgcggcggcgatatcatggcgatgggcgctatctgcgcggcggatgaaatgggactgcgggtgccgcaggacatttcgctgatcggttatgataatgtgcgcaacgcccgctatttcagcccggcgttaaccaccattcatcagccgaaagattccctgggcgaggccgcatttaacatgctgttggatcgtatcgtcaacaagcgtgaagagtcgcagtctatcgaagtgcaccctcgtctggttgagcgccgctcggtagcggatggcccgtttgtcgattatcgtcgttaa

SEQ ID NO: 135712 - DNA, 1005 bp, Enterobacter cloacae
atgtggtctgaatactctctggaagtggttgatgccgtcgcccgtaacggcagcttcagcgcggccgcgcaggagcttcaccgggtgccttccgcggtcagctataccgtgcgtcagctcgaagagtggctcgccgttcccttatttgagcgtcgccatcgtgatgtggagttgacccccgccggggtctggtttttacaggaagggcgctctgttatcaaaaaaatgcagatcacccgccagcagtgtcagcaaattgcgaacggctggcgcggacagttgtcgatcgcagtggatgatattgtgaaaccggcgcggatgcgtcagatgatcgtcgacttctatcgccattttcccgacgtcgaactgatcgtctttcaggaagtattcaatggtgtatgggatgcgctggccgacggccgcgttgagctggcgattggcgcaacgcgatctattccggtcggcggtcgctatgcgttccgcgatatggggatgctgagctgggactgcgtggtggcgagcgatcatccgctggcaaagatggatggacccctgagcgacgacgtcctgcgtaactggccgtcgctggtgcgggaggatacctcgcgctcgttgcctaaacggacaacatggttgctggataaccagaagagggtagtcgtccctgactgggaatcatcagcaacctgtttgtcggcaggactctgcgtcggcatggtgccgagccatttcgcccgtccatggatagatcgcggcgagtggactgcgctggcgctggaaaatccgttcccggatgccgcctgctgcctgacgtggcagcagaacgatgcctcaccggcgctgaactggatgcttgactatctgggggacagcgacacgctgaatcgggagtggctgcgggcgccggagagatccgcgcccgccagatgccttaacgacgataatcgacaaacgggccatccgctaccgagcggcgctcaaccagacgagggtgcacttcgatag

SEQ ID NO: 135713 - DNA, 1236 bp, Enterobacter cloacae
atgcactccctacactctgcggcatcgtacctgtacaccaactatgagaacgttatgtcacaacccgggaaaggatttttagtctggctggccggcctgagcgtgctgggctttctggccaccgatatgtacctgccggcgtttgccgccatgcagcaggatctcaacacctccgccgcctccattagcgccagcctgagcctgttcctcgccggcttcgcgctgggccagctgttctggggaccgctgtcggaccgctatggacgtaaaccggtgctgctgagcggcctggcgattttcgcggccggctgtctggggatgctgtgggtgcacaacgccaccctgatgctggcgctgcgctttctgcaggcgattggcgtctgtgccgcggccgttacctggcaggcgatggtcgccgattactatcctgcccagcgcacgaaccgcatcttcgccaccattatgccgctggtaggactgtcgccggcgctggccccgctgctgggcagctggctgctggtgcacttcgagtggcaagccatcttcgccaccctgttcgccatcactctgctgctgatgctgcctgccctgcgcctgaaggcagccgcgaagtcagtagtagtgacgcagcaaaaaatcacctttctcgcgctgctgcgctcccgggaatacagcggcaacgtcctgatctacgccgcctgttccgccagcttcttcgcctggcttaccggttcaccttttatcctgcatgaaatgggctatggcccaaccgctatcggcctgagctatattccgcagaccatcgcctttctggtgggaggctatggctgtcgcgcgctgctgcagaaatggtccggtcaacagatgctgccgtggctgctggtgatttttgccgtcagcgtagccgccacctggctggtgggcctgcaaacccatgcctcgctggtggcgttaatgatcccgttctgcatgatggcggtggtcaacggcgggatctaccccatcgtggttgctcaggcgctgaagccttttccgcaggcgaccggccgcgcggcggcgctgcaaaataccctgcagcttggcctgtgcttcctgaccagtctgctggtatccgcgctgatcgccacgccgctgctgaccaccaccagcgtcatgctggtttcgattggcttagccggaataggctatcgcctgcagcagacgccggagctgacaccccactcttcccacgcgtaa

SEQ ID NO: 135714 - DNA, 1149 bp, Enterobacter cloacae
atgagttcatcgtgtatagaagaagtaagtgtaccaaatgatgactggtaccggattgcagctgaattattaggccgtgcgggaattgaaatcaatggctccgcgccgtccgacctgcgggttaaaaatcctctcttttttaaacgggttttgcaggaaggttcgctgggtttaggcgaaagctatatggacggctggtgggaatgcgagcgtctggatatattcttccacaaggtgttacgcgccgggttggaaaagcagctcccacaccatttcaaagacacactccgcatcgcaggcgctcgtctgtttaatctacaaagtaaaaaacgtgcctggattgtcggtaaagagcactacgacctcggcaacgatctattcagccggatgcttgatccctatatgcaatattcctgcggttactggaaagaggcgcagagcctcgaggccgcccagcaggctaagctggatctcatctgccgcaaactggagctggagccaggcatgcgggtactggatattggctgtggatggggcggtctcgccgaatatatggcgcgaaattatcaggtcagcgtcgtgggtgtaaccatctccgccgagcaacaaaaaatggcccaggcgcgctgcgccgatctcgatgtagagattcgtctccaggattatcgcgatctgcacgacagctttgaccgcatcgtctccgttggcatgtttgagcacgtggggccgaaaaattacgccacctactttgaggttgccgaccgtaatttgaaacccaacggccgctttttactgcacaccattggttccaaggtcaccgaccataacgttgacccgtggatcgataaatatatcttcccgaacggctgcctgccttccgtgcgtcacattgccgaagccagcgagaagcactttgtgatggaagactggcacaacttcggcgccgattatgacacgaccctgatggcctggtatgagcgtttcctcgccagctggccggaaattgccgataactattctgagcgtttcaaacgcatgtttacctattatctgaacgcctgcgccggcgccttccgcgcccgcgacattcagctctggcaggtggtgttctcgcgcggtattgaacatggactgcgcgtcgcccgttaa

SEQ ID NO: 135715 - DNA, 636 bp, Enterobacter cloacae
atgtttactggtattgttcagggaaccgcgaaagtggtctccattgatgataaacccaattttcgcactcacgtggttgagttaccggcacatatgctggaggggctggaaaccggcgcttcggtagccaacaacggctgctgcctgacggtgaccgaaatcaacggcgcgcgcatcagcttcgatctgatgaaagagacgctgcggattaccaatcttggcgatattcaggtcggcgatgaagtgaacgtcgagcgagcggcgaaatttagtgatgaaatcggcgggcatttaatgtccggccacattatgaccaccgcggaaatcgtgaagattctgacttccgaaaataaccgtcagatctggtttaaagtgcaggatccaatgctgatgaaatacatcctctataaaggattcatcggtattgacggcattagtctgacggtgggtgaggtgacggcgacccgtttctgcgtacatcttattccggagacgctgcagcggaccaccctgggagcgaaaaaactgggcgatcgcgtcaatattgagattgatccgcagacccaggcggttgtcgatacggtcgaacgcgtgctggccgcgaaagagatggcggctaaggtcaatgaagcctga

SEQ ID NO: 135716 - DNA, 1374 bp, Enterobacter cloacae
gtgcagaagtatttcgttgaagcgcgtcagttattagctctggctatacccgtcatccttgcgcaggtggcgcagacggcgatgggttttgtcgataccgtgatggcgggtggctacagcgccacggatatggccgccgtggccatcgggacctccatctggctgccggcgatcctcttcggccacggccttctgctggcgctgaccccggtggtggcgcagcttaacggatccgggcggcgagagcgtatcgcgccgcaggtgcgtcagggcttctggctggccggctttgtctcggtgctgatcatggtcgtgctgtggaacgccggatacatcatcagctccatgcataacatcgatccgctgttggcagagaaggcggttggctacctgcgcgcgctgctgtggggcgctccgggctatctgttcttccaggtcgcccgtaaccagtgtgaagggctggcaaaaaccaagcccgggatggtcatgggctttattggattactggtcaacattccggtgaactatatttttatctatggtcatttcggcatgcccgagctgggcggcgtcggctgcggtgtggcgacggcctccgtttactgggtgatgttcgccagcatgctgtggtgggtgcgccgggcgcgtacgatgcgcgatatccgctgcgccgagcgcttcagcggccctgattttgccgtcctgttacggctggtgcagctggggctgcccattgctctggcgctgttctttgaagtcactctgtttgccgtcgtcgcgctgctggtctccccgctcgggatcattgacgtcgctggtcaccagatcgcgcttaatttcagctcgctgatgttcgttctgccgctgtcgctggcggcggcggtcaccattcgcgtcggcttccgccttggccagggctcaacgatcgatgcccaggtttcggcccgcaccggcgtgggcgtggggatctgcctggcagtatttaccgctatctttaccgtcctgatgcgtaagcagattgcgctgctgtataacgataatcccgaagtggtgacgctggcctcgcacctgatgctgctggcggctatctatcagatctccgactctattcaggtgatcggcagcggcattctgcgcggctataaagatacgcggtctatctttttcattacctttaccgcgtactgggtgctgggtttgccgagcggctatctgctggcgctgaccgatatgattgtgccccgcatgggacctgccggtttctggtgcggatttatcatcggtctgacctccgccgccatcatgatgatgctgcggatgcgttttctgcagcgccagccttccagcatcatcttacagcgcgctgcgcgctaa

SEQ ID NO: 135717 - DNA, 339 bp, Enterobacter cloacae
atgaaaaaagtattagctctggtcgttgccgctgctatgggtctgtcatcagttgctttcgctgccgatgcggcaagcaccaccccgagtgcagcagccagccacactaccgttcaccataagaaacatcacaaagcggccgcgaaaccggcagccgagcagaaagcgcaggcggcgaagaaacaccacaaagccgctgcaaaaccggcagtagcgcagaaagcgcaggcggcgaagaaacaccataaagccgctgcgaaaccggcagtagcgcagaaagcacaggcggcgaagaaacaccataaaacgacgcaccatgcagctaaaccggcggcataa

SEQ ID NO: 135718 - DNA, 579 bp, Enterobacter cloacae
atgaaatcgattggtattttctgcggttcttcagctggcgaaaatccgctgtacctcgaaaccgcccgtctggttggacgtacgctggcgcagcaggggttggcgcttgtctatggcggcggcaaagttggtctgatgggggcggtcgccgatgcggcgctggaggccggtggcgtggtgatcggcgtgatgccgcgcggcctggtggagcgggaaattgcccaccgcggcttgacggagctgcatgtggtcgaggatatgcacgagcggaaaaccaaaatggcggcgctggcggatggctttattgccctgccgggcggggcggggacgctcgaggagattttcgaacaatggacctgggcgcagctggggatccatgagaaaccgtgcgcgttcctgaatattaaggggtattacgatccgcttcaggcgatggtcgataacatggtacgggaagggtttatgcacccgcgctacgcggagatgctgccgttcgctacctcggcagacgagattatcgccggttttcgcgactatacgccgccggcccgaaaatgggttcagcagccagctatttaa

SEQ ID NO: 135719 - DNA, 885 bp, Enterobacter cloacae
atgcgtcgtaaaatccccagcagcgctgcgctactggcttttgaggccgcggctcgtcacggcaactttgcccgcgcggcggcggagctcgcgttaacggaaggggccatcagccggcagattgcccgtctggaagcgctcctcgacagtaaactcttcgacaggacggggagccgggtgcggctcaatccggcaggcgcccgctatgctcgtcaggtccgcgagatcctcgctcgcctggaacgggacacccatgacgtcagcgggatgcccgtcgatggccgcagcctggagatcgccgtgctccccaccttcgccagccgctggttaattccccggctcgggcgctttgcggcgcagcatccgcatatcgtggtcaatatcgccgcccgcagcgatcccttcattctgccgggaagcggatttgatgccgccatccattttgaacacccggcgtggaccggaatggaggtgacgtttttatttgcggagtatttgctgccggtctgccatgctgcgctgctgacggatgacgatcttccggggctgcttaaccggctaacgcgcattcaccggcggcaaaacccggacgcctggctgcactatgcccgcgagtgcggtctggcgctggataaccccgcccaggggccgcgctacgatctgcatgagatggcgatcgccgcggtacttagccagcagggagtggccctggtgccgaagatgtatgtggaaagcgagctgagcgccggaacgctggttgccccgtggccgggctccccgacgctggctaagcgcttctgcttgatcaaacccggcggcggggagggggagccagcgctgcagatgtttgagcgctggctgcagacggagattgcggcaggttaa

SEQ ID NO: 135720 - DNA, 516 bp, Enterobacter cloacae
atgctctatgtcgtcgaatgcgcctacaccgatccccaaagcgaagcggcgtggaataccttttacaatcaggaaaaactaccggcgctggtctctgtgcccggtttctacgcctcccagcgcttccgcgctcttagcgagggctgcccctgctacctggcgctgcacgatatccacgatgctaccgtcatcgacagcgacgcctaccgccgcaacggcggcggccattttgcccgctggcaatcggcgatcgccgactggcatcgccatctctatctaacgaataatacgctgcgggaggttgccccggatgaagtgctgctgctgggcgataccgcggaggacttgcccgtcgctgcgccgatactcctgcagccaggcggcctggcgaccgaacaaagccggtatgccgccatcgtcccacgagacaacctgcatcacctggccacgactgccgccgtctatatctatcagcccatcaccgcccggttacgcaacccggcgcagcgcgcgtga

SEQ ID NO: 135721 - DNA, 837 bp, Enterobacter cloacae
atgtcacctgctcccttttatacgttgaccgctggcgacctgacggtgactgccgtgagtgatggtctgatgtcagcgccgctgtccttactctcgggtatctcgcgggaggaggcggagcatctgcagcggcattcaggattagcctcaccagagaccattgcgattggcgcctatctgatccgcggtcgcgggaacacggtgctggtggataccggcaccggcggagccaatggcgttggcggcgaacttatcgccaatctggcgcggctcggcgttggtcccgaggagatcgacgccatccttctcacccacgcccatccggaccatatcggcggcctgctgtccgccgctggtacgccagcgtatcccaacgccacggtgttcctgcctacgcgggaaagcgcttactggctggcaacatccacgttcgacaacgccagcgatcgcggccggcgcaacgtgctgcttgttcgccgtgtactggcgaactgcgcggcgcaaatcagcggggttgatgatgaggaggtgatcgccgggatccgcccgtgccccctgcccggccatacgcccgggcataccgggtatcgtctcgaagcgggcgatacctcgctgctgatctggggggatatcgtccatttcccgtccattcagtctgcgcggccagaagcctcggtcgccttcgacgtcgatcctgaacaggcccggcgtaccagggagatcctgctgcgccaggccgccagcgaacggtggttgattgccggtatgcatcttggcctgccgggattcgccagagtggagaacaccgcctctggctattgtctgcgctcggtgtga

SEQ ID NO: 135722 - DNA, 150 bp, Enterobacter cloacae
atggtcattacaactcgtaagcctctgtgcaacaaacgctggtcggccagcccggcctcccaggatcttcagttgactcagctacgtcacccatggatcgccaccaaagccagctgcaaaagtaaaaaaggctggaagagccgcggttaa

SEQ ID NO: 135723 - DNA, 150 bp, Enterobacter cloacae
atgactaaaggctataaactacttggctataagttagcggataatattttctactgcctgcatcatcgggaaattatcacgctgcgcgggacacggacgcaagtccagctacgcactgagagatcccctcataatttccccaaagcgtaa

SEQ ID NO: 135724 - DNA, 615 bp, Enterobacter cloacae
atgacgaaaaatacccccacccctgcaagccgtggtccccatgaccacagcgttcgggaccagattcttgacgcggccatggcgcactttagtcgctatggctatgagaaaacgacggtcaccgatctcgccaaagcgataggcttttccaaagcctatatctataaattctttgactccaagcaggcgattggcgaggcgatttgcgccagccggctggagaagatcatggtggccgtcagcgcggccatcgccgatgcgccgtccgccagcgagaaactgcgccgcctgttccgggcgctgaccgaggccggcagtgaactgtttttcgaggatcgcaaactgtacgacatcgccgccgtcgcggcgcgcgataaatggccttcaacggaacagtatgccggtcatctgcagcagctgattggtcaaatccttgtcgaaggccgccaggcgggtgagttcgagcgcaaaaccccgctggatgaagcgaccctggcggtgtatatggtgatgtgtcctttcatcaatccggtgcagttgcaatacaatctcgacaccgcgcccaccgcggcggtgctgcttgcctccctgatcctgagaagtctctccccctga

SEQ ID NO: 135725 - DNA, 996 bp, Enterobacter cloacae
atgaacagcagcggcaaggtacttattctgggagcaagcgggggcatcggtggggaagtggcgcgccggctggtggcagacaactggcaggttcgggcgctgaagcgcggcgcccagatacgtgatcccgaagatggcatacagtggatagccggcgacgcgctggatggcggccaggtcgcggcggcggctgccggttgcgacgtcatcgtccatgcggtgaatccgccgggctaccggcactggcggcaacaggtactgcctatgctgcgcaacaccctgcaggctgccgaacggcagcgggcgcttgtagtcctgcccggcacggtctacaactatggaccggatgcctttccgctgattgctgaagaggccgcacaacagccggtgacccgcaaaggcgccatccgggtggcgatggagctggcgctgaaggattacgtgcagcgcggcggccgggcgttgattgttcgggcgggcgatttttttggtccacgcgccggaaataactggttttcgcaggggctggtcaagcctggtcagcttccccgcatcattagctacccgggggcgatcggcgtggggcatcagtgggcctggctgcccgacgtcgccgccaccatcgccgcgctgctggcccgcaggcatgagcttgagccgttcgcccgctttcatatgcagggccactgggacccggacggcagcgaaatgagtcaggcgatccagcgggtggtcgcccgctatggcggcagggcggtagcgaagtcctttccctggtggctggtgaagctggcggcgcccttcaacgccaccctgcgcgaaatggtcgagatgcactatctctggcgtctgccggtacgcctgcgcaacgataaactggttgattttttaggcgcggaaccgcataccccgctcgacagcgcggtttatcagacgctgcaaggcctgggttgtctgcccgccggcgcgataaaccaagaggcgggtgaggcgtaa

SEQ ID NO: 135726 - DNA, 912 bp, Enterobacter cloacae
atgaatacctctattccctgggagtggtaccgaacctttctcgccgtcctgcaggaaggctctttatcgggcgcatcgcgtaccctgaacatcactcagccgacggcggggcgccatattgccgggctggaaaacgccctcggccaggccttatttacccgctcgcaaaccggcctgctggcgaccgacgcggcgctggcgctgcgggtgcacgccgaggcgatggacaataccgcccgggcgctggaacgcaccgcggctaacttcagtcgcgaaagagccgagctgcgtggcgtggtgcgggtggccgccagcgaggtggtcggcgccgaggtgctgccgccgctggttgcccggctcaggcaggcgtgcccgaatatcgtcatcgaactgatgctctccaatcggtttcaggatctgcttcaccgggaggcggatattgcggtgcggatggtcgccccgcagcaggagcagcttatcgcccgccgtctcggcaggatcgagcttgggttacatgccaccgccgcctacctgacgcgccagggcctgcccgcgaccctcgacgatctggccagccacgcgctgattggtttcgatagcgccaccccacttgttcgccgggcgctgcaggcttaccctcgttttcagcgtgaggccttcgcgatgcggaccgatagcgacctcgcccagttgagcctgattcgcgccggagcggggatcggcatctgccaggtgccccttgcggatggcattattcccctgcagcgagtgctggcggccgacttttctctgtatcttgatacctggctggtaatgcatgaggatctgcgccacagccctgcctgcaagcgggtatttgattttctcgcccaggggttgcaggcgtatattcgtggcccactggcgagctga

SEQ ID NO: 135727 - DNA, 1017 bp, Enterobacter cloacae
  misc_feature (165)..(174): n is a, c, g, or t
atgaagaaggtcctttgcgcgttaggcttgatgttcaccgccgtcagttccgcgctggcaacaacctaccccctgacgattgaaaactgcggctatcaggagaccttcacccggccgccggagcgcgtggtcgcgctggggcaaaatacggtcgaaattctgctnnnnnnnnnnattctgctgctgctcgggctgcaaaagcaggtggtcgccagcgccttctggccgaccagcgttttaccgcagctggctgagcaaaacgcgaagattaaaaccttgacggtggaaattccgagcctggaatcggtgctggcgcaaaatcctgatttcgttcccgcccagttgccgctgctgctggggccggaaagcaaagtcgccaggcgtgaagatctcgccaccgtcggcgtaaacagctacgtctcaccggggatgtgcgccaccaaaaaggccaccggcgatatgtacggcagccggcaaaagctgtgggatatgacctggctgtatcaggaaattagcgatttttcccgcattttcaacgtcgaagatcgtggtcaggcgctgattgccgatttcaaaaaacgtgaagccgatctgcgccacgaatttggtaaaaacaaaaaagatctctccttcgtcttctggttctccagcgcctcgccttcggccgatgcctatgtcggcggtaaaaacagcgcctccggctttatcgccagcgtgctgggcggtcataatgcgataacctccgagaccgagtggcccacggtgagctgggagagcattatcgccgccaacccggatgtgatcgtggtcgccagtctggaccgtaaccgctgggcgctggataaggccgaggagaagatcaaattcctcaaaagcgatcccgccgtcagccagctggaggcggtgaaaaaaggccatatcgtggtcatggacggtcaggcgatgaatccgaccatccgcacgctttacggcgcggaacaggtgggcgagcagctgagaaaaatggggctgaactga

SEQ ID NO: 135728 - DNA, 1038 bp, Enterobacter cloacae
atgagcgtcgccacgattgagacgcgccgcagcatactgctcaccggctggtgtgtactggcagcgatcgtgctggcgctggtgatcgctgtgggcgtcagcgtcggcgagctggccatcccgctgcagaatgtcttttacgctatcagcaacagaaccggcttaaccgctgagcctctcaaccgtatctatgagagcgttatctgggatttccgcctcagccgcgcactggtcgccgcctgctgcggcgcaggcctcgctatctgcggcgtcgtgctgcaaagcctgctgaaaaatgccctcgcggaaccctacgtcctcggcgtctccgccggggcctccaccggcgcggtgtcgatcgtggtgctgggccttggcgctggcgcaatttccctctcggccggggcctttgccggggccttcgccgccttcgcctttgtcgccttgctgactaacggcgcgcgcggcggcaatgagcgtacgattcttgcgggcgttgccgcctcgcagttatttaacgccatcacggcctataccatcagcacctccgccagcgcgcagcaggcgcgcgatgtgatgttctggctgctgggcagcttcagcggcgttcgctggcccgaattccagttggtcatcgtggtggtgctcgcgggtctggcggtctgcctgtggtatgcccgggcgctggacgcgttcaccttcggcgacgatgccgccgcctcgctggggattgccgtgccacaggtacgcctgatcctcttcaccaccgcggcgctgatcaccgccaccatcgtcagtatggccggctcgatcggctttgtcggcctggtggtgccgcacgtgatgcgcttcttctttggcccgctgcaccgaacgttgctgatcgccagcgcgctggcaggggcgatattgatggtactggcggacattgcgtcgcgcctgctgattgccccgcaaagtctgcccgttggggtagtaaccgccctggttggggtgcctttctttgccgtgattatctaccgctcaaggaataagtga

SEQ ID NO: 135729 - DNA, 762 bp, Enterobacter cloacae
atgagtatttgcgctgaaaatatcacctggaaggcaggcaaaaaggtcatcgtcaataatgtctcgctgcgggtgccgcgaggcgaaacggtcggactgctggggcccaacggctgcggcaaatcctcgctgctgcgcgttctggcgggcctgcgccgcccggatgcaggtcgcgtcaccctcgacggccaggatatcgcccggatggcgaaaaagcagctcgcccgccgcgtggctttcgtcgagcaacacggcatgaccgaggccaatatgcgggtgcgcgacgtcgtgcgcctgggacgcattccccaccactctccgttctcaaactggagcgctcaggatgacgaggcgattgccgccgcgctgcagcgggtagcgatgctggagaaaagcgaacagggatggttaagcctctccggcggcgagcggcagcgggtgcatatcgcccgcgcgctggcgcagagcccgagcgaaatcctgctggatgagccgaccaaccatctggatatacaccatcagatgcagttaatgcagttgatcagcgagctgccggtaaccagcattgtggccattcacgatcttaaccatgccgcgatgttctgcgattcgctgatcgtgatgcagcaggggcagatcctcaccagcgggacgccggaggagattttgtccgaagcgctgctgtgggacgttttccgggtgaaaaccaaaatcgagatctccccttaccacggcaaaaagcacattcatttcatcgtttag

SEQ ID NO: 135730 - DNA, 1233 bp, Enterobacter cloacae
atgcctcttttctccctgcgccctgcggcaaccctctggcctcaggtgttactgggaagccagttcgtttttaatattggcttttacgcggtcgttcctttcctcgccctcttcctgcgcgacgacatgctgctctcaggcggacttatcggcctgatcctcgggctgcgtaccttctctcagcagggcatgtttatcctcggcgggacgctggccgaccgctatggcgctaaggcgatcattctcgccggctgcgtcgttcgcgtcgccggttttctcctgctggcgtgcggggcgtcgctgtggcccattatcctcggcgcctgcctgaccggcgtcggcggcgccctgttctccccgtcgatagaggccctgctggcgcgggccggtacccacagccaggccaacgggaaacgcagccgcgccgagtggtttgcgctgtttgcggtatgcggtgaactgggagcggtgatcggcccggtggccggaggcgtgctgagcgggatcggctttcggcatatcgccctcgccggcgcgggaatatttcttctggcgctggcggtgctctttttctgtctgcccgccgacgggcacacgacaacaacgcgcagacgagtcccatggtggacgcctttgcgccagccgcgctttgtcgcgtttattctcgcctacagctcatggctgttgagctacaaccaactgtacctcgccctgccggtggagatccaacgttccggcggccgcgagcaggatctggcgccgctctttatgctggcctcgctgttgattatcaccctccagctccctctcgcccgcttcgcccggcgaatgggcgccgtgcgcatcctgccggtgggctttctgctgctgtcggcttcctttgccagcgtggcgttattcgccgccgccccacccgccgaaggttggctgcggttaatgccggcggctggttttgtcacgctgctcaccctcggccagatgctgttagtgcccgcagccaaggatctgatcccgctgttcgccgaggagtcgacgctaggcgcccactacggagcgctcgccaccgcaggagggtgcgcggtgttagccgggaatttactgctcggtcatttacttgaccaggcgctcattccgtcgccgcaggcggtttatccctggcttctgctggcgctgtttccgctgtgcagcgccgtcgccctgcgggcgatctgtcgcccgctggcggcaacatga

SEQ ID NO: 135731 - DNA, 1032 bp, Enterobacter cloacae
atgaaaacatggcttccgacatcgaccgccggcagtttaccgaaaccttcctggctggcgcagccagagaccctgtggtcgccctggaaactgtccagcgaagaattactggccggcaaacgcgacgccttgcggttatccctcgacgaccagctgcgggccgggatcgatattgtcagcgacggcgagcaaacgcggcagcactttgtcaccaccttcatcgagcacctcagcggggtggattttgccaaacgcgagatcgtgaaaattcgtaaccgctatgaggccagtgttccgacggtggtgggcgccgtggagcgccagaaaccggtcttcgtggaggacgctcgctatctgcggcagctcaccagtcagccgatcaaatgggcgcttccgggcccgatgaccatgatcgacacgctgtatgacaaccactacaaaagccgggaaaagctggcctgggaatttgccaaaatcctcaatcaggaagcgaaagagttagaggctgcgggggttgatattattcagttcgatgagccggcctttaacgtcttcttcgatgaggtcaacgactgggggatcgccgccttagaacgagccaccgaagggctgaagtgtgagacagcggtgcatatctgctacggctatggcatcaaggccaataccgactggaaaaagacgctgggctccgagtggcgacagtatgaagaggctttcccgcagctgcagaaatcgtcccttgatattatctctctcgagtgccacaactcgcgcgtgccgatggatctgctggagttgatccgcggtaaaaaggtgatggtcggggcgatcgatgtcgccagccatgcgatcgaaaccccggaagaggtggctggaaccctgcgcaaggcgctggcgttcgtcgatgccgacaaactctacccgtccaccaactgcggtatggcgccgctgccgcgccatgtcgcgaccggcaaactgcacgccctgagcgccggcgccgagattattcgtcgcgagctggcggcaaagtaa

SEQ ID NO: 135732 - DNA, 981 bp, Enterobacter cloacae
atgaataataaatttacctatacgattaagcgcacccggtttgatgaaaattataaccctgcggaaaatacgcgtattaccaccaacttcgctaatttagccagaggggtgaaccgtgaggaaaatctgcgcaatacgttaatcatgatgaataaccgttttaatagcctggcccactgggataatccccataacgatcgctatgcggtggaactggatattatttctgtcgagatgaatattgctcaggatagcgccagcttcccggtgattgagatcctgcaaacgcatattgtcgataaaaagagcggggagcgtcatgccggtatcgtcggcaataacttctcctcctatgtgcgggattacgattttagcgtactgcttctggaacataataaggaccagagtcgcttcagcgtaccggaaaactttggcgagctgcacggcaatatctttaaggattttgtgcaatccagcgcctggcgcgccaacttcagcaaggcgccggtgatttgcctgagcgtctccagtaaagatgtttaccatcgcaccggtaacgaacatccggtcctcggcattgaatatgctcaggaaggcgtctcgctgaccgagcgttatttcagcaaaatggggctgcaggtacgctattttatgccaaaaaacagcgtcgcgccgttggccttttattttaccggcgatctgctcagcgattacaccagcctggaactgatcgccaccatcagcacgatggagacgtttcagaaaatatatcgcccggagatctacaatgccaactccccggcggggcaatactatcagcccaatctcagccacctggatcattcattaacaaaaatcgtctatgaccgggaagagcgcagcctgttggcgattgagcaggggaaatttacacaacaacattttatcaacccgcacaagacgttgcttgagcaatggtctgctaatttcgcgctttgctaa

SEQ ID NO: 135733 - DNA, 219 bp, Enterobacter cloacae
atgagagcgagtgtcattgcgttcgggagcctcttaattcagcagtacgctcataatcagcagtacggccatacacatcgacataatactgatatcaacaatcattctgtacgacaaaagctccagctaaacgggtacggcgggcaggtaaaagcccatcttatagtggttaaagagtgtaccctgcctacatccattgaacaaacgtttattgactaa

SEQ ID NO: 135734 - DNA, 309 bp, Enterobacter cloacae
atgaaaaaagctctgcttgccctgttcgctatcgccaccgttaccgccgccagcgcctttgcggctgataaaaccgacgtcccggcgcctgtcgtcgataacggagtccgcccgccgatggagagggatcgtggccccctgccgccgttcccgccgcacagaccggtgctgttttcagccacggtagcaaccgatacgccagcggaaaccattaacaaactgaccgcgctgatccccgccggccaggcgaaacactacgaagtgcacgttgaggtggtgccggttggcgagggaaccgacagacaatag

SEQ ID NO: 135735 - DNA, 249 bp, Enterobacter cloacae
atgggtattctttcctggatcatttttggacttattgccggtattttagccaagtggattatgccgggaaaagatggcggcggatttatcgtgaccgttattttggggatcatcggcgccgtggtcggcggctggatcagtaccctgtttggttttggtaaggtcgatgggtttaatttcggcagcttcgtggtagcggttatcggtgcgctggtggtactgtttatttaccggaaagtgcgtagctaa

SEQ ID NO: 135736 - DNA, 411 bp, Enterobacter cloacae
atgatttggaaacgtcaggccacgctggagcagctcaaccggctcggtgaggggaacatggtagggctgctcgatattcgctttgagaccgttaccgacgatacgctggaggccactatgccggtcgatagccgcacacagcagccgtttggcctgctgcacggcggagcgtcggtggtgctggcggagaccctggggtcggtggcaggctatctgtgcagcgaaggcgaacaaaaggtggtggggctggaggttaacgccaaccacatccgttcggcgcgcgggggccgggtgcgcggcgtctgcaaagcgctgcacgtcgggacgcgccatcaggtctggcaaattgaaatcttcgacgaacagtcgcggttatgttgttcatcacgactaaccaccgcggtaatataa

SEQ ID NO: 135737 - DNA, 3057 bp, Enterobacter cloacae
atgatcccacaaatttctcaggcgccaggggtagttcaactggtgctgaattttttgcaggtactggagcaacagggttttaccggcgataccgccaccagctatgccgacaggctaacgatggccaccgacaacagcgtctatcagctgctgccggatgcggtcatttttccacgatccacggcggacgtggcgctgctggcgcgcgttgccgccgaaccgcgttttaaatcgctgattttcaccccgcgtggcggcggcaccggcactaacggccaggcgctgaacggcgggattatcgtcgatatgtcccgctatatgaaccgcattatcgaaatcaaccccgaagagggctgggtgcgcgttgaagccggggtcatcaaagatcagctgaaccagtttcttaaaccctatggttacttctttgcgcctgagctatccaccagcaaccgcgccacgctgggggggatgattaacaccgacgcgtccggccagggatcgctggtgtacggcaaaacgtcggatcacgtgctcggcctgcgggcggtgctgatgggcggggatatcctcgatacccaggcggtgccggtggcgctggcggagacgctgggcaataccccctcgacggttggccggatctacaacacggtctaccagcgctgcaaggcgcagcgtgacctgatcattgataagtttcccaaactcaaccgcttcctcaccggatacgatctgcgtcacgtctttaacgatgagatgagcgagttcgacctgacccgtattttaaccggttcggaagggacgctggcgtttattaccgaagcgcggctggatatcacccgcctgccgaaggtgcgccgtctggtcaacgtcaaatatgactccttcgactctgcgctgcgcaatgcgccctttatggtcgaagcgaaagccctgtcggtggagaccgtcgattctaaagttctcaatctggcgcgcgaggatatcgtctggcactcggtaagcgaactgatcaccgacgtaccggataaagagatgctcgggctcaatatcgtcgaattcgccggcgatgacgcggcgctgattgaccagcaggttactaccctgtgccagcggctggacgagctgatggccgctagcgaggcgggcgtcattggctggcaggtctgtcacgatcttgaaggcgtggagcgcatctatgccatgcgcaagaaggccgtcggcctgttgggtaatgccaaaggcgccgccaagcctattcctttcgccgaggacacctgcgtaccgcccgaacatctggcggattacatcgtcgagttccgcgcgctgctcgacagccacggcctaagctacggcatgtttggccacgttgatgccggggtgctgcacgtgcgcccggcgctggacatgtgcgatccgcagcaggaggtactgatgaagcagatctccgacgatgtggtggcgctgacggcgaagtatggcggcctgctgtggggcgaacatggcaaagggttccgcgcggagtacagcccggccttctttggcgagacgctgtatgccgagctgcgcaagatcaaagcggtcttcgatcccgataaccgcctgaatccggggaaaatctgtcctccggaaggtatcgacgcgccgatgatgaaagtcgatgcggcgaagcgcggcacctgggatcggcagatccccatcgcggtgcgcagcagctggcgtggggcgatggagtgtaatggcaacgggctgtgcttcaactttgacgtcaagagcccgatgtgtccgtcgatgaaagtcagcaaccagcgcatccactcgccgaaagggcgggcgacgctggtgcgggaatggctgcgcctgctggccgaccgcggcgtcgatcccaaccagctggagaaggcgctgccggagcagggcgtcagcctgcgctcgctggtggcgcgcacgcgcaacagctggcatgcgcgcaaaggcgaatatgacttctcgcatgaggtcaaagaggcgatgtccggctgtctggcctgtaaagcctgttcgacccagtgcccgatcaaaatcgatgttcccgagttccgctcgcgtttcctgcagctgtaccacagccgctatctgcggccggtgcgcgatcatctggtggcctcggtcgaatcttatgcgccgctgatggcgcaggcgccgaagacctttaacttttttattaaccagccgtggctgaaaaagctgtcggagaagcatatcgggatggtcgatctgccgctgctctcggcgccgtcgctgaagcagcagatggccggccaccgctccgccaatatgacccttgagcagctcgaagcgctgagcgccgagcagaaagcgaagatggtgctggtggtgcaggatcccttcaccagctactacgacgcccaggtggtggccgactttatccgtctggtcgaggccttaggctatcagccggtgctcctgccgttctcgccgaacggcaaggcgcagcatatcaaaggcttcctcacccgcttcgcgcgcaccgcgcagaagacggcggacttcctcaaccgcgtggcgcagctgggcatgccgctggtgggcgtcgatccggcgctggtgctctgctaccgcgatgagtacaagcagacgctcggcgacaagcgcggcgatttccaggtgctgttagtccatgagtggttgccgaaggccctaaccagcgacgcccgtcccgatctgggcggtgagccctggtacctgttcggtcactgtaccgaagtgaccgcgctaccggcggcgacaaagcagtgggcagatatttttgcccacttcggcgcgaagctggaaaacgtcagcgttgggtgttgcgggatggctggcacctatggtcatgaagtgaaaaaccacgccaactcgttggccatttacgcgctctcctggcagcaggcgatgcagcggctgccgcgaaaccgctgtctggtgacgggctactcctgccgcagtcaggtgaagcgtattgaaggcagcggcgttcgccacccgctgcaggcgttactggagataatcggatga

SEQ ID NO: 135738 - DNA, 1113 bp, Enterobacter cloacae
atgattaatccccatcagcctcgggacattccgcaaatactgctgtcggtgctgttcctggccctgattatcatatcctgcctgtgggttgtgcagccgtttattctgtccttcgcctgggccggtacggtggtgatcgccacctggccggtgctgctgcgtctgcagcgtgtgctgttcggcaaacgactgctggcggtgctggcgatgaccctgttgctgtttctgctattcgttattcctatcgctctgctggtcaacagcctggtggataacagcgttccgctgatcaaactcatcagcagcggaaatgtgacgctgccggatttcgcctggctcaacagcgtaccgctggtcggcgataaactgtactccgcctggcacggtctgctggatatgggcggctcggcgattatggccaaggttcgtccctatattggcaccaccaccagctggtttgtcggtcaggcggcgcacatcggcaagctgctggtctactgcggtttgatgctgctgttcagcgcgctgctctactggcgcggcgagcaggtggcctacggtttccgctacttcgccacgcgcctcgcggccaaacgcggcgacgccgcggtgctgctggccggccaggccgtgcgcgccgtggcgctgggcgtggtggtcacggccctcactcaggcggtactgggcgggattggccttgccgtctccggcgtgccctacgccgccctgctgaccgtggtgatgatctttacctgtctggtccagctcggccctttactggttttggtgccgtcgattatctggctttactggagcggggacaccacctggggcaccgtgctgctggtctggagctgcgtagtcggcaccatggacaacgttattcgtccggtgctcatccgcatgggcgccgacctgccaatgatccttatcctcaccggcgtcattggcggcctgatcgccttcggcatgatcggcctgtttatcggtccggtgctgctggccgtctcctggcgactgtatgacgcctgggtgcatgaggtgccgccgccgccgaaagaccctgacgtcgtccttgaagagctcagtgagctggaggccggtcgcaagtaa

SEQ ID NO: 135739 - DNA, 2376 bp, Enterobacter cloacae
atgtccaacaatggctcgtcaccgctggtgctttggtataaccaactcggcatgaatgatgtagacagagttgggggcaaaaatgcctcccttggtgaaatgattacgaatctgtccggtatgggtgtttccgtacctaacgggtttgccaccaccgctgatgctttcaatcagttcctggaccaaagcggtgttaaccagcgcatctatgcgctgctggatgaaaccgacattgacgacgtttccgcattagcgaaagcgggcgcgcagatccgacagtggatcatcgatacccccttccagagcgaactggaaaacgcgattcgcgatgcttatgacctgctgtccgccgatgacggcgaggcctcattcgccgtgcgctcttccgccaccgcggaagatatgccggacgcctccttcgccggacagcaagagacattcctcaacgtgcagggctttgacgccgtgctcgttgccgtgaagcacgtgtttgcttcgctgtttaacgatcgcgcaatctcctaccgcgtgcatcagggttacgatcaccgcggcgtggcgctctccgccggggtgcagaggatggtccgctccgatctggcctcctccggcgtcatgttctccatcgataccgaatccggctttgaccaggtggtgtttatcacctcggcgtggggtttgggcgagatggtggtgcagggcgcggtgaacccggacgaattctacgtccacaaaccgacgctggccgctggccgtccggcgatcgtgcgccgcaccatggggtcgaaaaagatccgtatggtttacgcgccgacccaggagcacggtaaacaggtgcgtatcgaagatgtgccgcaggcgcagcgcgatattttctcgttaagcaacgaggaagtgcaggagctggcgaagcaggcggtgcagatcgagaagcactacggccgtccgatggatatcgagtgggcgaaagatggccacaccggtaagctatttatcgtccaggcgcgtcctgaaaccgtgcggtcccgcggccaggtgatggagcgttataccctccacgctcaggggcagatcatcgccgaagggcgcgccatcggccaccgcattggcgccggtccggtcaaggtgatccacgatatcagcgagatgaatcgcattgagccaggcgacgtactggttaccgacatgaccgacccggactgggaaccgatcatgaaaaaagcctcggcgattgtcacccgcggcgggcgtacctgtcacgcggcgattatcgcccgtgagctggggatcccggcagtggtcggctgcggcgatgctaccgatcgcattcaggaaaatcagaatgtcaccgtctcctgcgccgaaggcgacaccggctatgtctacgccgagctgcttgacttcagcgtcaagagctccagcgtcggcgacatgccggatctgccgctgaaggtgatgatgaacgtcggcaacccggatcgcgcgttcgacttcgcctgcctgccgaacgaaggcgtcggtctggcgcggctggaatttatcatcaaccgtatgattggcgttcatccgcgcgcgctgctggagtttgacgaccaggagccgggcctgcagaacgaaatccgcgagctgatgaaaggctacgattcgccgagagagttctacgttggccgcctgaccgaagggatcgccaccctcggcgccgctttctatccgaaacgggtgatcgtgcgtctgtcggacttcaaatcgaacgaatacgccaacctggtgggcggcgagcgctatgagccggaagaagagaacccgatgctcggcttccgcggcgccggacgctacgtttccgaaagcttccgcgactgcttcgccctggagtgcgaagcgatgaagcgcgtgcgtaacgatatggggctgaccaacgttgaagtgatggtcccgttcgtccgtaccgtcgcccaggcgaaagcggtggtcgaagagctggagcgtcaggggctgaagcgcggcgagaacgggctgaagatcattatgatgtgcgagatcccgtcgaacgccttgctggcggagcagttcctcgagtacttcgacggcttctccatcggttcgaacgacatgacccagctggcgctcggtctggaccgcgattccggtgtggtttctgagctgtttgatgaacgcaatgacgcggtgaaagccctgctgtcgatggccatccgcgcggcgaagaaacagggtaaatacgtcggcatctgcggccaggggccgtctgaccatgaggatttcgccgcctggctgatggaagaggggattgatagcttgtccctgaacccggataccgtggtacaaacctggttaggtctggcggaactgaaaaaataa

SEQ ID NO: 135740 - DNA, 834 bp, Enterobacter cloacae
atggaaagtgctgtagatcgccacgtattttatatttctgacggtaccgccatcacggcggaggtgctggggcatgccgtgatgtcgcaattcccggtcgccatcagcagcgtaaccctgccgtttgtggaaaacatcagccgcgcgcgggcggtaaaggagcagatcgacgccatctatcagcaaacgggtattcgcccgctggtgttctactccatcgtcatcccggaaatacgcgacattattctgcaaagcgaaggcttttgtcaggatatcgtgcaggcgctggtggccccgctgcagcaggagctcaacctcgacccgacgccggtggcccaccgcacccacggcctcaaccccggcaacctgattaaatacgatgcgcgtatcgccgccatcgattataccctcgcccatgacgatggcatctcgctgcgcaaccttgaccaggcgcaggtgatcctcctcggcgtctcgcgctgcggcaaaacacccaccagtctgtatctcgccatgcagtacggtattcgcgccgccaactatccgtttatcgccgacgatatggacaatctggtgctgccggcctcgctgaaacccctgcagcataagatgttcggcctgaccatcaatccggagcgtctggcggcgatccgcgaggagcgccgggagaacagccgctacgcctcgctgcgccagtgtcggatggaagtgaccgaagtggaggccctgtatcgcaagaataaaatcccctgcctgaacagcaccaactattccgttgaggaaatagcgacaaaaatcatggacatcatggggctgaatcgcagaatgtactaa

SEQ ID NO: 135741 - DNA, 984 bp, Enterobacter cloacae
  misc_feature (935)..(944): n is a, c, g, or t
atgaataaaacagacgaattgcgtaccgcgcgcattgagagcctggtaacgcccgcggagctggcccagcgccatcccgtgacggccgacgtggctgcccacgtctcggcctcccgccgccgaattgaaaaaatcctcaacggcgaagaccgccgactgctggtgattatcggcccctgctccattcacgacaccgacgcggcgctggagtatgcccgccgcctgcagggcatgcgcgagcgctaccagccgcagctggagatcgtgatgcgcacctactttgaaaaaccgcgtaccgtggtgggctggaaaggcttaatctccgatcccgacctcaacggcagctaccgggtcaaccacggaattgagctggcgcggcgcctgctgctgcaggttaatgagctgggggtaccgacggccaccgagtttctcgatatggtgaccggtcagtttatcgccgatctcatcagctggggggccatcggggcgcgcaccactgaaagccagatccaccgtgaaatggcctcagcgctctcctgcccggttggatttaaaaacggcaccgacggcaatacgcgcatcgcggtggacgccatccgcgcctcccgcgccagccatatgttcctctctccggacaagcaggggcagatgacgatttaccagaccagcggcaatccgtatgggcatattattatgcgcggcggcaaacggccaaactatcacgccgaggatatcgccgccgccggcgaggcgctgcgtgaattcgatctgccggaacagctggtcgttgatttcagccatggcaaccgccagaagcagcaccgccgtcagctggaggtgtgcgccgatatctgtcagcaaattcgcgcgggctccaccgccatcgccgggattatggccgaaagcttcctgcaggaaggcactcagaaaggggnnnnnnnnnncaggaaggcactcagaaagtggtccccggccagccgttga

SEQ ID NO: 135742 - DNA, 228 bp, Enterobacter cloacae
atgattatcattgttgccttgatttttattttgagagctatgacgcgtatggataacactgccacagctgaaaaaccaaaagacaatgccccttatcccgtggcgacggacagagagatcagcagtcgggttctgttaggcagcgaaggacgagtagtgattgagcatggcggccagcgctatctgctgcgccagacccacgccgggaagttaattctgaccaagtaa

SEQ ID NO: 135743 - DNA, 1443 bp, Enterobacter cloacae
atgaccctttcttttaccacccactggcgggatgaactgccggacttttacacttccctgtcaccaacgccgttggataacgcccgactcatctggcgcaacgccccgctggcgcaacagctgggggtgcccgacgccctgtttgcgcctgaaagcggggccggtgtctggggcggcgaagcgctgcttccgggcatgtcgccgctggcgcaggtatacagcggccatcagtttggcgcctgggccggccagctgggcgacggacgcgggatcctgctcggcgagcagcagctggcggatggccgccgttacgactggcatctgaaaggcgccggcctgactccttattcgcggatgggggacggccgcgccgtgctgcgctcgacgatccgggaaagtctggcgtcggaggcgatgcacgctctggggatcccgacgacgcgcgccctggcgatggtgaccagcgataccccggtctaccgcgagcgcgtggagcccggcgcgatgctgatgcgggtggccgagagccatgtgcgcttcggccatttcgaacatttttactatcgccgtgagccgcagaaggtccagcaactggccgactatgttattcgccaccactggccgcagctgcaggatgaggcggataagtacctgttatggttccgtgacattgtcacgcgtaccgcgcagactatcgccagctggcaaaccgtgggctttgcccatggggtgatgaataccgacaacatgtcgattctcggtctgaccatcgactacggcccgtatggcttccttgacgatttccaaccggacttcatctgcaaccactccgattatcaggggcgctacagttttgaaaaccagccggcggtggggctgtggaatctgcagcgtctcgcccaatcgctgtcgccgtttatcagcgctgaagcgttaaacgcggcgctggatgagtatcagcacgccttgctgaccgcttatggccagcggatgcgcgataaactcggcctgttcagccagcagaaaggggataacgacctgctggacgggctgtttgccctgatgatccgcgagaagagcgactatacccggacgttccgcctgctgagccacagcgaacagctcagcgccgcatcgccgctgcgcgatgagtttatcgaccgcgcggcctttgacagctggtttgccgggtatcgtgcgcggctgtgtgatgaacaggtggacgacgcgcagcgccagcagaggatgcagggcgtgaatccggcgctggtgttacgtaactggctggcgcagcgggcgatcgagcaggctgaggcgggcgatatgggcgagctggagcgcctgcatgccgcgctggcagacccctttaccgatcgcgaggacgactacgtccgccgcccgccggactgggggaaacgtctggaagtcagctgctcgagctaa

SEQ ID NO: 135744 - DNA, 465 bp, Enterobacter cloacae
atgcgcttctggttcatgttggcggcggcgttaattttagccggctgcagcagccatcgggcaccgccgccgaatcctcggctggctgactccatcacggtggtggcgaatctgaacgagcagctgcgcagctggcgcggcgcaccgtatcgctacggcggcatgacgccgcgcggcgttgactgctccggcttcgtggtgcgcacgtttcgcgataaatttgccctccagctgccgcgtgaaacccgcgagcaggcggaaatcggcacccgcatcgataagcgcgatctgctgcccggcgatctggtgttcttcaaaaccggctcaggggagagcggcctgcacgttggcatctacgataccgacaaccagtttattcacgcctccaccagccagggcgtcacccgttcctcgctggataacgtctactggaacaaaaagttctggcaggcgcggcgaatctga

SEQ ID NO: 135745 - DNA, 750 bp, Enterobacter cloacae
atgtcgtttctgatgcagctacaggatgtagaagcggtggggcgcctggccccgttttctgcggcttttcgcgccggggagattgtccatctggtggggccgaacggcgcagggaagagcacgctgctgacccgcatggcggggctgtccgacggccccggcacggttcattttaacggccggctgcttgacgagtggccggcgagggagctggcgcgccgtcgcggatatctgtgtcaacaccagaccccgccgttcgccatgccggtatggcactacctggcgctgcatatgcagcagcagggtgatagcgcccgtctgagcgatatcgcggccaggcttggtctggacaataagctgggccgtccggtcaatcagctgtcgggcggcgagtggcagcgcgtgcggctggcggcagtgatcctgcagatcgatcccttgagtaattccgcgggtcagctgctgctgctggatgagccgatgaacagtctggatgtggctcagcaggcggcgctggatcggctgttacacgagctgagcgcggcgggtattgcggtggtgatgagcagccacgatctcaaccataccctgcgccacgccggtcagagctggctgctctgccagggggaagccatcgcctgcggggagaccgccgaggtgctgaatgaggaaaatttaaccgctgcctatgcgatcccgttccagcgcgttgaggtggccggtcatattatgctcatcgcgtcacagtag

SEQ ID NO: 135746 - DNA, 552 bp, Enterobacter cloacae
atgcaacatgacattctgaataccgaagtgacgaccattgatggcgagaaaaccaccctggcatcctttgccggcaaggtgctactgatcgtcaatgtagcctcgaaatgcggcctgacgccgcagtatgagcaactcgaggatctgcaaaagcagtttgccgccgagggcttcagcgtgctggggttcccctgcaaccagttcctcggccaggagccgggcagtgaagaggagattaagaccttctgcagcaccacctacggcgtcaccttcccgctgtttagcaaaattgacgtcaacggcgaacatcgcgcgccgctctatcaaaaactgattgccgccgcaccgaaagcggtggccccggaaggcagcggtttttatgagcggatggccagcaaaggccgggcgccgctgtatgtggacgacattctgtggaacttcgaaaaattcctcgtcgatcgccagggcaacgtcattcagcgcttctctccggatatgacgccggacgatccgcagctggtggcggcgattaaaggagcgctggcgcaataa

SEQ ID NO: 135747 - DNA, 801 bp, Enterobacter cloacae
atgaagaagttgtttagcctggcgttaatcgccacctctgtcgccctgctgagcgcctgctccccggatgaagataataaagtaaaagtcgctatcaataccgggccggacgaagccatctggaaagtggtggagcaggtggcgaaggataaataccacctcgacgtcgaagtggtctccttcaatgattatgtgctgcccaacgaagcgctgaacaacaaagatgtcgatgccaacgccttccagaccctgccgtaccttgaggcgcagtcgaaagaacgcggctataaatttgcggtggtcggtaaaacctttgtcttccctatcgccgcctattctcaccggatcaaaaatatcagcgaactgcccgaaggggcgacggtgaccatctctaatgaaaccaccaccctgggccgcagcctgctgctgcttcaggcgcaggggttactcaagctgaaaccgggcgtcggctatttacccaccacgctggatatcatcgacaatccgaaacagctgaaaattgttgaagtggataccccgcagctgacccgtacccttgacgatccgaacgtcagcctgtcaatcattaacaccaacttctccgcccaggcgggcctgtcggccgcccgcgacggtctgtttatggaggggccggattccccatacgtgaatgcgatagtcgcccgcgaggataataaggacagcaagaaaattcaggaattaaaagccgccttccagaccagcgaagtcgcggaaaaagcgaaggaagtctacaaaggcgacgcgatcaaaggctggtaa

SEQ ID NO: 135748 - DNA, 996 bp, Enterobacter cloacae
atggaatctatgctgactctcgcccatcttcaacagcgccgcagccggcgttggctcttcggattaacgctgttgctgctggtcaccctgctgatcagcctgtgcgcgggggagcaatggatcccgcccggcgagtggctcagcgccaaaggtcagctgtttatctggcagatccgcctgccacgaaccctggcggtgctgctggtgggggcggcgctggcgctctccggggcgattatgcaggcgttgtttgaaaatcctctggcggagccggggctgctgggggtctccaacggcgcgggcgtcgggctgattgccgccgtcctgctgggcaaaggagtcttgcccggctgggcgctcggcctgtgtgccatctttggcgcgctgctgatcacttttattctgctgcgttttgcccgccgccatctgtctaccagccgtctgctgctggcgggggtggcgctggggatcatctgcagcgccctgatgacctgggcagtctacttctccacctcttttgacctgcgtcagctaatgtactggatgatgggcgggtttggcggcgtcgactggcaacagctgtggctgatgatagccctcctgccggtgctctgctgggtctgtctgcagtcgcaacccctgaatttactggcgctgggtgaagtctccgctcgtcagcttgggctgccgctgtggctgtggcgcaaattactggtggtggcgaccggctggatggtcggcgttagcgtggcgctggcgggggcgattggctttatcggtctggtgatcccgcatattctgcggctatgcggcttgagcgatcaccgggtgttgctcccggcctgtatgctggccggggcaagcgccttgctgggggcggatatcattgcccggctggcgctttccgccgcagagctgccgattggcgtggtgacggcgaccctgggcgcgccggtctttatctggttgctgctgcgttcgcgggggcggggatag

SEQ ID NO: 135749 - DNA, 576 bp, Enterobacter cloacae
atggcgatcgttggcgtggtgattaaagccggcttcagcttcgcgataatcgtgatgctgctggtggccctgatgaccggcctggtaggcggcctgcgaccgacgcagatccttcaggccctgtatcacggctgcggccgcctggtgtggatgtttattctctactggctgtacaacccgatccttgagctgatggatggcctgcacgcctatcaggggctgctggagtatactcaaccgctgctggaggggatctccccggcctggctatgctttagcatcttcgcgttcaatattatcggccatgtgcccggtgcggcggtggcccagatgacctttactcataaaatctttggcccgatgctgatggccgccggcgtgccgccccaggggaccaccgccgtgctgctggcctcatcccaggtggactggttcgggccgtttccctcatcagatatgttcggccagatggggctggcgcagtctactcatctgaaatatatgctctataacggctggacaatcgtggtggcgaatatcattctctttgcgctgctgtttcagattctggtgtga

SEQ ID NO: 135750 - DNA, 825 bp, Enterobacter cloacae
atgagtgactcaacgctcacaggcaatgcgcctgtcagacgaaatatcacgcggaaaaacgttattattggtctgttattgctgctgttcgtgttgatcgcgctgtggtgccacggtcgaccaggcagcgagcttggtctgctgggatttacgccgctggtggcgctagcgatattatcgctgatcggcgttgatattgtgctggcggtcatctcctcgattattatcgccatgataatgacctcgaccggcctgccggaaatgggcacgatgctggcgaaatccaccgggtcatttattgccaccgttgggcttatcattatgctcggcgccggcgtgggggaagtggccacccgcaccggcgcagcggttgagctggtaaaatttgtcgtccatcgcatcgggttgtcgagtcagacgcgggtgaaattcggcattgtggcgtcatcgattttaatttgcggttcgctgggcactatggccggtggcaatgccattatcgtggcagtaatcattccggtggcggcagcggtacgcttgacgccgccaacggtcgccgcgctgatgatgaccgccggttccgttgggctgtttaccgggcctttcacccccagtaccgtgacgatcctcagcctcggtgggttgagctacccggattatctgctgtacgttggtctgccgatgagcgcggtcacgctgctggccggctgggtaatggcgggacggatccagaagatgaccgaaggcaaactgcgctatgacgtcgatctcgcggaaaagccgcaagaggatcatcgtgatggcgatcgttggcgtggtgattaa

SEQ ID NO: 135751 - DNA, 915 bp, Enterobacter cloacae
atgaaactgcgtcatctggaaatcttctatgccgtcatgacctgcggctctttatcgcgagcggcggaagcgctcaatatctcccagcccgcggccagcaaagcgttaaaaagcgccgaaatgaagctgggttttaccctgtttcagcgggtgcgcggcaagctgctgccgaccagcgaggcgatcacacttttcgaaaaagcgcagagcatttatcaggacctggacaacctgcgcctgctggccgacaacctggctcgcgatccgcgcgccaagatcactttaggctgtctgccaagcctggggttaagcctggtgccggagctggtgaccgacttttatcagcaaaacagcaacctggtgatgacgctcactaccgagcacaccgagacgctggtcaaaaaactggatttgcgcgagatagatttggcgctgacgctacagccggtgcagcagggggagatcctgaccaccctgattgccgaagtaccgctggtgtacatcgaccgtcattatcgtcagggggcggtggagatcgaccagatcgaccagcagcgctggatctcgccgggaccgcactcgctctctgccgccatcgccacccgtcgcgacttttccaccacccggctaaacgtccagacctactatatggccaccgagttcgtgaagcgcggcatgggctgcagcatcactgatatcttctccgcccagcacaacctggccccggagatgatccatcccattacgccgccgatggcgattaacctctgtctgttacgccgggccgacgtttccctgagcccgatggcgcaaaagttcgtcgattttctctgccagcgtctgcgccagcagctcaaggagattaacctgcggttataccctgaccataaaaagtcaattgcgccgctggggtaa

SEQ ID NO: 135752 - DNA, 1254 bp, Enterobacter cloacae
atgaacaaacgcattgtcattatcggcggcggcgtggtcggtctggccacggcatgggaactgatcaagcgcggccatcaggtgcaattactggagcgcaatgccgaaccgggcagcgccaccagttttgccaacggcggacaattaagttaccgctacgtcgccccccttgccgacagcggcgttcccctgcagggaatgaaatggatgggcaaagccgattcgccgctgaatatgcgtctcaggatgtctctccagcagtggcgctggctgctgcagtttctgcgcgcctgtaataaccagaccaataaaatgaatggcgaccatattttacgcctgtcgctgctcagccgtcaggtcatgcaggcgtggcgggatgaggataatcttgccgatttccactggcggcgcagcggaaaattaattatccatcgtcgcgaatatgattttaataaagcagcaaaagggattgatcctcagtatcagcaggcgctgaatgctgaagcctgcctgcagctggagccggcgctcaaacatattagtccttctctgcagggcggaatctattcgccaggcgatgaaacggcagattgtcatcagttctgccttgccctgctcgacaagctcaatgccagcagcgactttagcctgctgacccagtgtgaggtgcggcgactcaataagcgcgggggacgcatcagcagcctggagaccagtcaggggaccctcaccggcgatgagtatgtcgtcgccgccggtaacggcagtagttctctgcttgggcatctgggggttcgcgtgccgctgtgcgccctgaaggggtacagcctgaccctgccctatcctgaaaaagcaggtattgcccctgacatcagcgtcaccgactacgggcacaaaatcgtttatgcccgccttggccaacagctgcgcatcgcggcgatggtggacatcggctacgacggcgacgaactgcgcgaatgccgcattcaggcgctgaagaacatcgtcgcccgcagctttcctgaactggaggggctggacgaggccgaagtctggaccggcatgcgcccgtcaacgccagcaggcccgccgatgctggggcgcgccggctaccccaacctgtggatgaacctcggccagggtagcctcggctttactctcgccgccggcagcgcggtggtgctgggcgcgttaatcgataatcagatgccagacatttctttagaaggtctcacatggaaacaaaccgcatga

SEQ ID NO: 135753 - DNA, 369 bp, Enterobacter cloacae
atggaaacaaaccgcatgacaattattcgcaataatccacaacctcgtcttgccgccagcgttgcgtatggcgatctgctgttcctctccggacagacgccaaaaagcaatgaagacgatatcgttttacaaacccgtgaagtactggagaagatcgacgcgctgctggccgcagccgggagcgacaagcagcacattctctccgcgcagatctggttgaaaaatatcgagcgtgactttgccgcattcaatgaggtgtgggtgcaatggatgccggaaggctatagcccggcgcgagcggccgtgcaggcggagatggcgcgaccagaaatcctggtggagatcatgctcaccgccgtcaaagcgtaa

SEQ ID NO: 135754 - DNA, 279 bp, Enterobacter cloacae
atgtcagaatatctgtttgataagcttgggcttagcaagcgggatgccaaagaactggtcgagttgtttttcgaagagatccgtcgtgctctggaaaacggagaacaggtcaaactctccgggttcggcaacttcgatttgcgggataaaaaccaacgcccgggacgtaacccgaagacgggggaggatattcccattacagcccggcgcgtggtgaccttcagacccggtcagaagctgaaaagccgtgtcgaaaacgcgtcgccgaaagacaaataa

SEQ ID NO: 135755 - DNA, 1149 bp, Enterobacter cloacae
atgctgaagaacaagtcgatcaaagatcgtctggttccaatcatcgccgacgaagcgcgtactttcggtatggaaggtctgttccgtcagatcggtatctacagcccgaacggccagcagtacaccccgcaggaccgtgagcaggttgcatactacaaagaagacgagaaaggtcagatccttcaggaaggtatcaacgaactgggtgcaggcgcatcctggctggctgctgcgacctcttacagcaccaacaacctgccgatgatcccgttctacatctactactccatgttcgggttccagcgtatcggtgacctgtgctggcaggcaggcgatcagcaggctcgcggcttcctgatcgggggtacttctggtcgtacgaccctgaacggtgaaggtctacagcacgaagatggtcacagccacattcagtctctgactatccctaactgtatctcttacgacccgtcttacgcgtacgaagtggcagtcatcatgcatgacggcttgcagcgcatgtacggtgaagcgcaagagaacatttactactacatcaccaccctgaacgaaaactaccacatgccggcaatgccagcaggtgccgaggaaggtatccgtaaaggtatctacaaactcgaaaccatcgaaggtagcaaaggtaaagttcagctgctgggctccggttctatcctgcgtcacgttcgtgaagcagcgcagatcctggcgaaagactacggtgtgggttccgatgtgtactctgttacctccttcactgaactggcgcgtgatggccaggattgtgagcgctggaacatgctgcacccaatggaaaccccacgcgttccgtacatcgctcaggtgatgaacgacgcgccagcggtggcgtctactgactatatgaaactgttcgctgagcaggttcgtacttacgttccagctgatgattatcgcgtactgggtactgacggcttcggtcgttctgacagccgcgaaaacctgcgtcaccacttcgaagttgatgcttcctacgtggttgtagcagcactgggcgaactggctaaacgtggcgaaatcgataagaaagtggttgcagacgcaatcaccaaattcaacatcgatgcagataaagttaacccgcgtctggcgtaa

SEQ ID NO: 135756 - DNA, 1236 bp, Enterobacter cloacae
atgtggaatatctggccgtttggccgtaagtctgaaccctccgaacagcgcagtatgaccattgatgagtggctggcgatggcagggattccaaatactggatcaggcgagtatgtgtctgcgggtactgcggaatctctgccggcggtcatgaacgccgtatcagttatcagtgaggcggtggcaacaatgccctgctatctctaccgcgtccgtaatgataatggtcgtgaggcgcgagaatggctgagtaatcacccagtggattttctcctgaacgagcagccgaacgactgccagacgccttatcagtttaaacgcacgatgatgcgccattgtctgctgaatggtaacgcctatgcggtgatcaagtggggccgcgacggccagccgcaatccctgcacccgtatgcgccgggggcggttgttcccgagcgtatcggccagcataagtacaaatacaccgttacagagccgtttaccggggctgtgcgcacctatctacaggaagagattctgcatctgcgttactccaccgatgatggctttctggggcgttcgcctatcaccgtctgccgtgaggcgctggggttaggtctggcacagcagcgccacggtgccagcattatgaaagatggcatgatggcggctggcgtggtggtcactaaagagtggctcgatagcgtgaagggcaaacaggcgatggatgcactggatcgctacaagggcgccagaaatgccggtaaaacaccgatccttgaaggtggcatggactacaagcagcttggcatgagcaatcaggatgccgaatggctggcgtcgcgccggttctccattgaagacattgcccgcatgttcaacgtgtcgcccatcttcctgcaggaatacagcaacagcacctacagcaatttcagcgaagcgagccgcgcctttctcaccatgaccatgcgcccgtggctggcgaacttcgagcaacaaatcaaatctgctttgctggtggcctctccggttccgggaacccgctatcaggtggagtttgactctgctgaccttctccgtgccacacctaccgagcgttacgccacttatgagcgaggcattaagaacgggatcatgaacccgaacgaagcccgtgagcgcgaggggatgccgccgcgtgaaggtggtgacgaattcagccaggcatggaagcaggaagtgaagatcagcaaagacggcaaggaaggtgacgcatga

SEQ ID NO: 135757 - DNA, 336 bp, Enterobacter cloacae
atggtcgcgcaggccgtcccagcggtagctgtcgagatcctgcttcagggtcgcgcacagcttctgctccgcctgattattcggggtgagatcgtcatcgagaaaggccagcagatcctgctgcgacggctcggtgctggccagcgccgtcaggttgcgcggacagacgtagcgtccgcggccaaaggcggcggtaaagcgcaggtcgggaatgattttacgcagcagcggcaggtccttactgtagatttgatcctgcagggcgacgttggcggtgctgaccaccagcgttttttgttcctcgcgggcgatggcgatgcccgggatcagatatga

SEQ ID NO: 135758 - DNA, 1347 bp, Enterobacter cloacae
  misc_feature (295)..(304): n is a, c, g, or t
atgtcttttgattcccttggcctgaatcccgatatcctgcgcgctgtcgctgagcagggctacgttgagccgacccctatccagcagcaggcgatcccggcggtactgcagggccgtgacctgatggccagcgcccagaccggcaccggtaaaacggcgggctttaccctgccgctgctgcagcgcctgatccagaatgagccgcacgcaaagggccgtcgtccggtgcgcgcgctgatcctgaccccgacccgtgagctggcggcgcaggtgggcgagaacgtccgcgattacnnnnnnnnnngctcgctggtggttttcggcggcgtgagcatcaacccgcagatgatgaagctgcgcggcggcgtcgacatcctcgtcgccaccccgggccgtctgctggatcttgaacatcagaacgccgtcagtcttgataaagttgaaatcctcgtgctggacgaagcggaccgtatgctggatatgggctttatccatgacatccgtcgcgtactggctaaactgccggcgcgtcgacagaatctgctgttctcggcgaccttctccgacgagatcaagggcctggccgagaaactgctgcacaacccgctggaagtggaagtggcgcgtcgtaacaccgcgtccgagcagatcacccagcacgtccattttgttgacaagaaccgcaagcgtgaactgctgtcgcagcttatcggcgaaggcaactggcagcaggtgctggtgtttacccgtaccaagcatggcgccaaccacctcgcggaacagctcaacaaagacggcatccgcagcgcggcgatccatggcaacaagagccagggagcgcgtacccgcgcgctggccgactttaaatccggcggcattcgcgtgctggtggcgaccgatatcgccgcccgcggtctggatatcgaagagctgccgcacgtggtgaactacgagctgccgaacgtaccggaagattacgtccaccgtatcggccgtaccggtcgcgcggcggccaccggcgaagccttatcattggtgtgcgtggatgagcataagctgctgcgcgatatcgagcgcctgctgaaaaaagagatcccgcgcatcgcgattgccggctatgagccggatccgtccattaaagccgaacctatccagaacggtcgccagcagcgcggcggcggtcgtgggcaaggtcagggacgcggcggccagggtcagggacgcagcggacagccgcgcagccagaataatgccccgcgccgtcaggacggcgaggcgccgaaagcgcgcactcaggacggcaaaccgccgcgccgccgtcgcccgcgtaaaccggctggcgaataa

SEQ ID NO: 135759 - DNA, 993 bp, Enterobacter cloacae
atgagccagagtcaaccccgtttaaaaacgtcggcgatgatcgcctcgattgctgatgaaggccaggcgaccgtccctgcgcccttcggcgtcgcgctgtcaaaactggcggcgcagcgcccggaaatcgtcggcatgaccgcggacctgtcaaaatataccgacctgcatattttcgcccaggccttcccggatcgctttttccagatgggcatggccgaacagctgctgatggcggcggcaggggggatggcgaaggagggatttattcctttcgccaccacctatgccgcctttgcaacccgtcgcgcctatgattttattcaccaggtcatcgccgaagagcatcttaatgtgaagatctgcgcggcgctgccgggcctgacgaccggctatggccccagccatcaggccaccgaagatctggcgatcatgcgcggtatccccgggatggttatcgtcgatccttgcgatgcgctggagatagagcaggcggtaccggccattgccgatcaccaggggccggtgtatatgcgtctgctgcgcggtaaggtgccgctggtgctggataaatatgactatcagttcgaactgggtaaggcgaagctgctggaggacggcaacgatgtgctgattatctcctccgggctgatgaccatgcgcgcgctggaggcggctgaaaagctgcgggccgataatatcggcgtggcggtcctgcacgtgccgaccatcaaaccgctggatgagaaagcgattattgaacaggcgtcgaagccgggccgcctggtggtaactgcggagaaccacaccgcggtcggcggcctgggggaagcggtggccgcgctgctgatgcgtaagggcgtacgctgtgagctggatagcgtggggctgcccgacgcgttcctgttagccggcgccctgccgaccctccacgatcgctacggcatctccaccgcgaagattgtcgaaaaaattaagtatcgtctgcgttaa

SEQ ID NO: 135760 - DNA, 867 bp, Enterobacter cloacae
  misc_feature (732)..(741): n is a, c, g, or t
atgaagatgaccgaatcacaaaaagtcgccgcggcggcgtggcgtattcgccgttacgccctgcaaatgggagaagtgcaggggcagggctatatcggccaggcgctgggctatgccgatgtgctcgccaccgccttcagccatgccatgacctatcgcccggaagatcccgagtgggaggggcgcgatcgcttcctgctctctcatggccattacgctatcgcttattatgccgcgctgctggaggcgggcattatcccggaagccgaactggaaacctacggctccgacgacagccgcctgccgatgtccggcatggcgacctacaccccggggatggagatgtccggcggctcgctggggcaggggctgtctatcgccgtcggcatggcgctcgggctgcggcagaaacagagcaaggcctgggtctacaactccatgtccgatggggagctggacgaaggggcgacctgggaggcggcgatgtcggcggctcactatggcctgagcaacctgattaaccttgtcgatgtcaacaaacagcaggctgacggcgattcacgcaaaatcctcggctttgagccgctgcaggataaatgggccgccttcggctggtacgtacagcgcgtggacggtaacgatctgccggcggtgatggccgcctttgacaacgcgaaaagttattccggcaatcagccgcgggtcattttatgcgacacgctgatgggcaannnnnnnnnnctgatggacaaaggggtgccgttccttgaaacccgcgataaaaaccattttattcgcgtcgatgccgacgaatggcaaaaagcgatcgtggtgctggacgctaacaaaccggaaggagtgctgtaa

SEQ ID NO: 135761 - DNA, 750 bp, Enterobacter cloacae
atgttattaaaagataaagtcgccattattactggcgcggcctccgcacgcggtttgggcttcgcgactgcgaaattattcgccgaaaacggcgcgaaagtggtcattatcgacctcaatggcgaagccagtaaaaccgccgcggcggcattaggcgaaggccatctcggcctggcggccaacgtcgctgatgaagtgcaggtgcaggcggccatcgaacagatcctggcgaaatacggtcgggttgatgtactggtcaataacgccgggattacccagccgctgaagctgatggatatcaagcgcgccaactatgacgcggtgcttgatgttagcctgcgcggcacgctgctgatgtcgcaggcggttatccccaccatgcgggcgcaaaaatccggcagcatcgtctgcatctcgtccgtctccgcccagcgcggcggcggtatctttggcggaccgcactacagcgcggcaaaagccggggtgctgggtctggcgcgggcgatggcgcgcgagcttggcccggataacgtccgcgttaactgcatcaccccggggctgattcagaccgacattaccgccggcaagctgactgatgacatgacggccaacattcttgccggcattccgatgaaccgccttggcgacgcgatagacatcgcgcgcgccgcgctgttcctcggcagcgatctttcctcctactccaccggcatcaccctggacgttaacggcggcatgttaattcactaa

SEQ ID NO: 135762 - DNA, 1332 bp, Enterobacter cloacae
atgtcacgtatagatacgctggtctgtactgacgccaggaaaacgaaatatcgtttcgtggttttgacgatgatttttctggtgtatgccatcaattacgccgaccgaacgaatattggcgcggtactgcctttcatcattgatgagtttcatatcaataattttgaagccggggccatcgccagtatgtttttcctcggctatgcggtaagccagatcccggccggctttttcattgccaaacgcggtacccgggggctggtatcgctctccattttcggcttctccgcctttacctggctgatgggcacggtgagctccgtgtttggcctgaagctggtgcggctgggactggggctgagcgaagggccttgcccggtggggctggcttccaccataaataactggtttccaccaaaagagaaagccacagcaaccggcgtttacatcgcggcgaccatgtttgcgccgattattgtgccgccgctggcggtgtggattgcggtaacctggggctggcggtgggtctttttctcttttgctatacccggaattgtggcggccatcgcgtggtatctgctggtcaaatccaagcctgctgagagcggatttgtttcccaaagcgaactggcagagattaatgccgggcgtgaaagtcataataatagcgtacgcgaaaatatcttaattgccgaaagattcacctggctggataaaatcattcgggtaaagaaaatggcgccaattgatacggcgaaaggcttattcacctcaaaaaatattctcggtgactgcctggcgtattttatgatggttagcgtgctgtacggattattaacctggatccccctgtatttagtcaaagagcgtggctttgatgtaatgagtatgggtttcgtggccagtatgccgtgcatcggcggctttattggcgcgattggcggcgggtgggtttcagataaagtcctgggccgccgacgtaaacccaccatgatgttcactgcggtgtcaacggtggtcatgatgctaattatgctgaatatcccggcaagcaccctggcggtctgtattggattattttttgtcggcttttgtttaaatatcggctggccagcctttaccgcgtacggtatggccgtttcggatagcaaaacctatccaatcgcctcttccataattaatagcggcggcaacctcggtggatttgtggcgccgatggcggctggtttcttgcttgataaaaccgggagttttaattctgtatttacctattttggtatctgcgccgccattggtttggtggtgattcttttcctcgatgaaccacaataa

SEQ ID NO: 135763 - DNA, 924 bp, Enterobacter cloacae
atgagccaaccgctacccaataaaaatctgccgatgccctctttacgcaatatccaggcttttattgaagtcgccgctaccggcagccttaatctggccgcagagaatctcaatattaccgcctcggcggtcagccatcagatagccagcctggagcactttctggggaaaaaactgttctcccgcagcagcaaaggcgtcacgttaacggcggtgggagaaaaatatctcaaagaggtctccggggcgctgaatatgattggccaggccaccagccaggtgatcaacgatatccatcaggattatttacgcattcattcggcgccgagcttcggcctgctatggctgatgccccgtctggataaattccgccaggcgtggccggcgttaaaaatcagcctgacctgttcatacgaaagcatccagttctcccgggataatattgatatcgatattcgtcacgggctgtcacagtggccgacgctgctggtcagaaccattaaaaatgagcgcgtcctgccctacagcgcagcgtcttatttagcctgccatcctgtgcaggctgtggaagatctgctggcctgcgatctgatccactccgacagcaccttgattaactggagcaactggctgtcgtggcacaaggtccgcggctggcataaaaacttcatttttaatttcgaccggtcatatatgagcatcgaggcggccagaatgggaatgggcgtgatcctcgagagcaatctgctggccggcggacacgtgcgccaggggcagctgacgccggtatttgccgacgagcggagcatgccggtcggcgcgcaccacttcgtcctcccccacgctaatgaacagaaggagaaggtccagcgcttcttcgcctgggtcgccggagagctgaaagaggaagggttccatatttga

SEQ ID NO: 135764 - DNA, 660 bp, Enterobacter cloacae
atgaccagtaaaggcgaacaggcaaaaaatcagattatcgcggccgctatcgcccagtttggcgagtacggccagcacgccaccacccgcgatatcgccgcccaggccgggcagaatatcgccgctatcacctattattttggctcgaaagacgatctgtatcttgcctgcgcccagtggatcgccgattttatcggcgacaattttcgcccgcaggccgaagcggcggagcacctgcttgccggggaagcgccggatcgccaggcgatccgcgacctcatccttagcgcctgccacaacatgatcctgctgctcacccaggacgatacggttaacttaagcaaattcatttcccgtgagcagctggcgccgaccgccgcctaccatttgatccaccagcaggtgattgcccccctgcaccattatctcacccggctgattgccgcctggaccggctgcgaagccagtgatacgcaaatgatcctccatacccacgccctgctgggcgaggtgctcgctttccgtctcgggcgtgaaactatcctgctgcgcaccggctggacgcagtttgacgcgcaaaaaacggaacagattttcgaagtcattacctgtcatatcgatttcatcctgcatgggttatcgcaaaggagtttgggctga

SEQ ID NO: 135765 - DNA, 996 bp, Enterobacter cloacae
atgaaaaaacccgtcgtcgtcattctgctgatcgtgattcttctcgccgcgctgggcggcggctggtggtggtaccagagcagccggcagcagccgctgaccctgtatggcaatgtcgatatccgcaccgtcaacatgagcttccgcgttggcggtaggctggcctcgctgaccgtcgacgaaggcgacagcatccgcgccgggcaaactctcggcgagcttgaccgcgcgccgtatgaaaatgccctgctgcaggcccaggccaatgtctccaccgcccaggcgcagtatgacctgatgatggccggctaccgcgcggaagagattgcccaggccgcggcggcggtgaaacaggcgcaggccgcttacgactatgcgcaaaacttttatcagcgccagctcgggctgcgcgccagcagcgccatttccgccaacgatctggagaatgcccgctcctcgcgcgatcaggcgcaggcaacgctcaaatcggcgcaggataagctgcgtcagtatcgcgccggtaaccgcccgcaggagattgcccaggccaaagccagtctggaacaggcgcaggcggcgctggcccaggccaaactggacctgcacgataccgtgctcaccgccccttctgacggtacgctgatgacccgcgccgtcgagcccggcactatgctcaacgccggcggtaccgtactgacgctgtcgttaacgcatccggtgtgggtccgcgcctatgttgacgagaaaaacctcggccaggcgcagccgggacaagaagtgctgctctataccgacagccggccggataagccctatcacggcaaaatcggttttgtctcgccgagcgctgaattcacgccgaagaccgtcgagaccccggatctgcgcaccgatctggtctaccgtctgcgcattgtggtgactgatgccgacggcgcgctgcgccagggaatgccggtgaccatctcctttagccacgggaacggacatgagtga

SEQ ID NO: 135766 - DNA, 807 bp, Enterobacter cloacae
  misc_feature (652)..(661): n is a, c, g, or t
atgagtgagaccgtcatcgccttaaacggcctgagccgccgttttcccggtatggacaggccagcggtagcgccgctcacctgcacgatccgcgccggctacgtcaccgggctggtggggcccgacggcgcggggaaaaccaccctgatgcgaatgctcgccggattgctcaaacctgatgagggccgcgccagcgtgataggcttcgacccgctaaaagacgacagcgccctgcactcggtgctcggctatatgccgcagaagttcggtctgtatgaagatctgacggtgatggaaaacctgaccctgtacgccgacctgcgcagcgtcaccggcgaggcgcggaagaaaattttcgatcgcctgctggagttcacctctcttggtccattcaccgaacggctggcaggcaagctttccggcgggatgaagcaaaagctgggcctcgcctgtaccctggtgggcgatccgaaagtactgctgctcgatgagcccggcgtcggcgtcgaccctatctcgcgccgcgagctatggcagatggtgcacgagctggccggcgacggcatgctgatcctgtggagcacctcctatctcgatgaagccgagcagtgtcgcgacgtgctgctgatgaacgaaggcaaactgctgtacnnnnnnnnnnctgctgatgaacgaaggcaaactgctctaccagggcgagccgacggcgctgacgcaaaccatggccgggcgcagctttctggtttccagcccgcaggaaaacaaccgccgcctgctgcagcgggcgctgaagctgccgcaggttag

SEQ ID NO: 135767 - DNA, 966 bp, Enterobacter cloacae
gtgatccagggcaaatcggtgcgtctgatcctgaaaaaggacgcgcgcattgaggacgtccagcagcatggcgacatgccgccgctgcaggtggccgacaccgcgccgcgctttgaagatgcgtttatcgacctgctcggcggcgccgggaccgctgaatcgccgttgggggcgattatccatcgcgttgacggcagcaaagaggaaacggtcattgaagcccagtcgttaacgaaaaagtttggtgatttcgccgctaccgaccatgtcgatttccaggttaagcgcggtgaaattttcggcctgctcggccccaacggcgccgggaaatccaccaccttcaaaatgatgtgcggcctgctggtgcccacctccggcaaagcgctggtgctgggaatggatctcaaggtcagctctggcaaggcgcgccagcatctgggctatatggcgcaaaaattttcgctgtacggcaacctcagcgtcgagcaaaacctgcgctttttctccggcgtctatggcctgcgcggccgggcgcaaaatgaaaaaatcgcccggatgagcgatgcctttggcctgaaaagtatcgcccgccacgccgccgacgagctgccgctcggctacaagcagcggctggcgctggcctgctccctgatgcatgaacccgatattctgtttctcgatgaacccacctccggcgtcgaccccctcacccgccgcgagttctggctacatattaatagcatggttgataaaggcgtgacggtaatggtcaccacccactttatggatgaggcggaatactgcgaccgcatcgggctggtctatcacggcaagcttatcgccagcgggaccccggacgcgctgaaagcccaggcggcggacgacagccagacggacccgaccatggagcaggcgtttattaccctgattaaccgctgggacaaggagaatagccatgggcaatag

SEQ ID NO: 135768 - DNA, 1134 bp, Enterobacter cloacae
atgggcaatagcattctctcctggcggcgggtccgcgccctgtgcgtcaaagagacccggcagattgtgcgcgatcccagcagttggctgatcgcggtggtgatccccctgctgctgctgtttatcttcggctacggcattaacctcgactccagcaggctgcgggtcggcgtattgcttgagcagcagagcgaagaggcgctggatttcgtccataccatgaccggctcgccctatatcgacgccaccgtcagcgacagccgcaggcagctgattgagatgatgcaggccgggcgcatccgcgccatggtggtcattccggtggatttcgaccgccagatggcccgccccggcgccgacgcaccgctgcagctcatcaccgacggcagcgagcccaataccgccaacttcgctcagggctatgtggaaggtatttggcaaatctggcagcagcagcgggcggaagaccgcggcgaaacctttgaaccgctgatcgacgtgcagatgcgctactggtttaacccggcggctattagccagcactttattatccccggggcgatcaccatcatcatgaccgtggtcggcgccatactgacctcgctggtggtggcccgcgaatgggagcgcggcaccatggaggcgctgctgtcaacggagatcacccgcgccgaactgctgctgtgcaagctcattccctactatttcctcggcatgctggcgatgctgttgtgtatgctggtgtcggtatttattctcggcgtgccctatcgcggctcgctgccgatcctgtttgtcatcaccagtctgtttttgctcagcaccctggggatggggctgctgatctcaaccattacccgcaaccagtttaacgccgcgcaggtggcgctgaacgccgcctttttaccgtcgattatgctgtccgggtttattttccagatagacagtatgccggcggtgatccgcgcggtgacctatgtgatcccggcgcgctatttcgttagtactctgcaaagcctgtttctggcgggcaatattccggtggtgctgctggtcaacgtgctgtttttgattgcgtcggcggtgatgtttatcggtctgacgtggctgaaaaccaaacggcgtctggattag

SEQ ID NO: 135769 - DNA, 1107 bp, Enterobacter cloacae
atgtttcaccgtttatggacattaatccgcaaagagctgcagtcgctgctgcgcgagccgcagacgcgggcgattttaatcatgccggtgctgattcaggtgctgctgtttccctttgccgcgacgctggaggtgaccaacgccaccatcgctatctacaacgaggacagcggtcgccacgcggtggaactcactcagcgctttgcccgcgccaaagcctttacccacgtcctgctgctgcaaagcccgcaggcgatccagccgaccatcgatgaacaaaaagctctgctggtggtgcgcttcccggccgatttctcgcgcaatctggataactatcaaaccgccccgctgcagcttctgctcgacggacgcaactccaacagcgcgcaaatcgccgccaactatctgcaacagattgtgaaaaactatcagcaggagctgctggagggtaaagcgaagccgaacaacagcgagctggtggtgcgcaactggtacaacccgaatctcgactataaatggttcgtggtgccgtcgcttatcgccatgatcactaccatcggggtgatgatcgtcacctcgctgtcggtggctcgcgagcgcgagcagggcacccttgaccagctgctggtctcccccctcgccacctggcaaattttcgttggcaaggcggtgccggcgctgatcgtcgccaccctgcaggcaactatcgtgctggcgattggtatctgggcctatcagatcccgtttgccggctcgctgctgctgttctatttcaccatggtgatttacggtctatcgctggtgggctttggcttattgatttcgtcgctgtgcgccacccagcagcaggcgtttatcggcgtgttcgtctttatgatgccggctattctcctgtcggggtacgtctcaccagtggaaaacatgccgcagtggctgcaggatctgacctggataaatcccatccgccactttaccgatatcaccaagcaaatttatctgaaggatgcgagtctggagattgtgtggggaagtttgtggccgctactggtcatagcggccaccaccggctcagcggcgtatgcgatgttccgaaggaagattgcgtaa

SEQ ID NO: 135770 - DNA, 441 bp, Enterobacter cloacae
  misc_feature (375)..(384): n is a, c, g, or t
atgaagtggcaacaacgtgtacgcgtcgcaacgggtcttagttgctggcagattatgttgcatctactggtcgtggcagtactggtgatgggttggatgagcggcgcgctggtgcgcgtcggattgggactgtgcgtcctctacagcgtcacgctgctggcgatgctgtttttacagcgtcaccatgaggcgcgctggcgcgatgtgggagacttccttgaggagctcaccacgacctggtacttcggcgcggccatgatagcgctgtggctgctgtcgcgcgtgctgcacaacaacctgctgctggccctcgccgggctggtgatactggcaggcccggcggtggtctcgctgctggcgaaagataagagccgnnnnnnnnnnaaagcgttcgggctacaacaaggcggcaacgcagcgaatccccagaagcatagataa

SEQ ID NO: 135771 - DNA, 762 bp, Enterobacter cloacae
atggctgagccaacggcgggattttcgttgaacgtgctgacaattaacacccataaaggctttacggcgtttaatcggcgttttattttgcccgaactgcgcgacgccgtgcgcagcgttagcgcggatattgtttgcctgcaggaggtgatgggcgctcatgaggtacatccgctgcacatcgaaaactggccggatacgacccattatgaatttctcgccgacaccatgtggagcgactacgcctacgggcgcaatgcggtttatccggaaggccaccacggcaacgccgtgctgtcgcgctttcccattgaatactacgaaaatcgcgatatctcggtcggcaacggggagaagcgcggcctgctgtactgccgcatcgtgccgccgcggagcgggataactattcacgtgatttgcgtccatctcggtctacgcgccgaccaacggcaggcgcagttgaccatgctggcggagtgggtcaataccctgcccgcgggcgagccggtggtggtggctggcgattttaacgactggcgtcagcaggctaaccagccgttaaaagcccaggccgggctggaagagatctttacccgcgcccgcggacggccggcgcgcacctttccggtcagttttccgctgttgcgcctcgaccgcatttacgtcaagaacgcccacgccagtcgcccgaaggcgctggcccttaaacaatggcggcatctgtccgatcatgcaccccttagcgtggagatacatttgtga

SEQ ID NO: 135772 - DNA, 1245 bp, Enterobacter cloacae
gtgaaatgtcgttggcaggaaggcaaccgcattacgctactggagaatggcgaccagtactacccggcgctgtttgcggccatcggtcgcgccagccggcgggtgatcctcgaatcctttatctggtttgaagatgaggtaggccggcggctgcacgcggtcctgctcgaggctgcccgccgcggcatccaggtggaggtgctcctcgacggctatggttccccggatctcagcgatgaatttgtcggcgagctcaccgccgctggtgtgattttccgctactacgatccgcgtcctaagctgatggggatgcgcaccaatctgttccgtcgcatgcaccgtaaaatcgtggtaatcgacgacaccaccgcctttgtcggcggtattaactactccgccgaacatatgagcgactacggtccggaggcgaagcaggattatgcggtgcaggtcgaagggccggtggtgctcgacatcctgcagttcgagctggaaaacctgcccaacagcgaaaccgcccgccgctggtggcgacgtcgtcgccaccagccggagattaaccagacccccggcgaggcgcaggcgctgttcgtctggcgcgacaaccaggatcaccgcgacgatattgaacgccactatctgaagatgctgaccagcgcccgccgggaagtgattatcgctaacgcctattttttccccggctaccgcctgctgcatgcgatgcgcaatgccgcgcggcgcggagtacgggttaagctgatcgtgcagggcgaaccggatattcccattgtgaagtttggcgcccacctgctctatcactatctcgttaagggcggggtgcagatttacgaatatcgccgtcgcccgctgcatggcaaggtcgctctggcagacgaccactgggccaccgttgggtcaagcaacctggatccgctcagcctgtcgctgaatctggaagccaatctgatcatccacgatcgggtgtttaaccagacgctgcgcgataatctcaacgggcttatcgcccgggattgccagcggatcgataaaacgatgctgccgaaacgcaactggtggcggctgggcgtcagcgtgatggctttccactttctacgccacttcccggcatgggtcggctggttaccggctcataccccgcggctggccagagtcagcccgccggtccagccggaaattgaaactcaggaccgcgtcgagtctccagccagggataatccactatga

SEQ ID NO: 135773 - DNA, 966 bp, Enterobacter cloacae
atgagcaaatcacatccccgctggcggatggcgaaaagagtgctgaccgtgctcttttttatcgccgtcatcgtcctgttggtgatctacgcgcaaaaagtcgactggcaggacgtgtggaaggtgatccgcggctacgatcggctggccttgtttagcgccattgcgctggttatcgtcagctacctcatttacggctgctacgatctgctcggtcgggcctattgcgggcacaagctggcgaaacgccaggtcatgctggtgtcgtttatctgctacgccttcaacctgacactcagcacctgggtcggcgggatcggtatgcgctaccggctgtactcgcggctggggctgaacggcagcaccatcacccgtattttttccttaagcattaccaccaactggttgggctatattctgctgggcggggtgatattcacggcagatctggtgaagctgccgccgcactggtacatcagccagaccactctgcgcattatcggcggggtgatgctgatccttacgctttgctatctgttcggctgcgcgttcgctaaacgccgtcacctgacgattaaaggccagcggctggtgctgccctcctggcgcttcgcgctgctgcagatggggctctcggcggcgaactggatggcgatgggggcgataatctggctgctattgggcagcgagattaactattttctggtattaggggtgctgctggtgagcagtatcgccggggtgattatccatattccggctgggatcggcgtgctggaggcggtgtttatcgccatgctctccggggaagatatttcgaagggcgcgatcattgccgccctgctcgcctggcgcgcgctctattatttcctgccattgctgctggcgacggtggcctatctgctgctggagagccgggcgaaaaagctacggcaaaagaaccagcgcaagctggcccgcgaatga

SEQ ID NO: 135774 - DNA, 705 bp, Enterobacter cloacae
atggacagatatccgcattccgattcaatagtgcagggccgtaccggcctgcagacttacatggcacaggtgtacggctggatgacggtcggcctgctgctgacggcgtttatcgcgtggtttgcagcgaatactccggcggtgatgatgttcgtcttttcgagcaaaatcactttcttcgggctgattattgcccagctggcgctggtgtttgtgctgtcgggaatggtgcaacggctgagcgccgggatggccaccacgctgtttatgctctattcggcgctgaccggactgacgctatcgagcatttttatcgcctatacctattcatcgatcgccagcacctttgtggtcaccggcgggatgtttggggcgatgagcctgtatggttacaccacgaagcgcgatctgagcggcttcggcagcatgctgtttatggggctgattggcatcgtgctggcgtcgctggtcaacctgtggctgaagagcgaggcgctgatgtgggccgtgacctatattggggtggtgctgtttgtcggtctgacggcgtatgacacccagaagctgaaaaacatcggcgagcagattgatacccgcgacagcgccacgctgcgtaaatactcgatcctcggcgccttaacgctgtatctggacttcatcaacctgttcctgatgctgctgcgtattatgggcaaccgccgctaa

SEQ ID NO: 135775 - DNA, 453 bp, Enterobacter cloacae
atgacgcaaacccgtatcgtggtcagcccggcgcgctttagcgtcagtgaggaatatccctggctggcggaacgcgatgaagacggcgcggtggtcaccttcaccggtaaagtgcgtaaccacaacctcggcgacagcgtgaaggcgctgaccctcgagcactatccggggatgactgaaaaatcgctggcggaaattgtcgagctggcgcgcgagcgctggccgctgggccgggtgacggttatccatcgcatcggcgaaatgtggccgggggaagagattgtgtttgtcggcgtcaccagcgctcaccgcggcagcgccttcgccgccggcgagtttattatggattacctgaaaacccgcgcgccgttctggaagcgtgaagcgacgccggatggcgaacgctgggtcgacgcccgcgacagcgatcgccaggcggcagagcgctggtag

SEQ ID NO: 135776 - DNA, 249 bp, Enterobacter cloacae
atgattaaggttctgttttttgcccaggtgcgcgagctggtcggtaccgattcgctgacccttgatgccagcgaactggcgactgtcgaagcggttcgtcagcagcttgccgcccgcggcgatcgctgggcgctggccctggaggagggcaaactgctggcggcggttaaccagacgctaacctctttcgaacatccagtggccagcggcgacgaagtggcgttcttcccaccggtaacggggggctga

SEQ ID NO: 135777 - DNA, 489 bp, Enterobacter cloacae
atgtcacaactgacccatattaacgccgcgggtgaagcccatatggtcgatgtctccggcaaagcggaaacggtgcgcgaagcgcgcgccgaggcttatgtcgaaatgcaggcgacgaccctggcgatgattatcgacggcagccaccataaaggcgacgtgtttgccaccgcgcgtatcgccgggatccaggcggccaaacgcacctgggagctgatcccgctgtgtcatccgctgatgctcagcaaagtggaagtcaatctgcaggcgcagccggaacataaccgggtgcgcattgaatcgctctgccgactcaccgggaaaaccggcgtcgagatggaagcattgaccgccgcctcggttgccgcgctgaccatttacgatatgtgcaaagcggtgcagaaggatatggtgattggcccggtgcgcctgctggcgaaaagcggcggcaagtccggcgattttaaggtgggtgaatgccatgattaa

SEQ ID NO: 135778 - DNA, 906 bp, Enterobacter cloacae
atgcgcaatcgtacattcgctgacctcgatcgggtggtagcgctcggcggcgggcatggtttgggccgggtgatgtcctccctctcctcgctcggctcacggctgaccggcattgtcaccaccaccgataacgggggttccaccgggcggatccgtcgttcggaaggtggcattgcctggggcgatatgcgcaattgcatcaatcagttaattgccgagccgagcgtagcgtcggcgatgtttgagtatcgttttggcggtaacggcgagctttccgggcataacctcggaaatttgatgttaaaggcgctggatcacctgagcgtgcggccgttagaggcgatcaatttgatcagaaacctgctgaaagtggacgctttcctgatcccgatgtcagaacaaccggtggatttgatggcgctcgatcatgaaggccatgaagtttatggcgaagtgaatattgatcagcttgataatgtgccgcaggagctgatgctcaccccgccggtaccggccacccgcgaggcggtggaggctattgccgaagccgatttgatcctcattgggccgggcagtttttacaccagcctgctgccgatcctgttgctcgacgagatggcccaggcgttgcgccgcaccccggcgccgatggtttttatcgataacctcggcaaagagcatagcccggccgcgaggctgtcgctggcggagcgcatcgcgattatggagcgctatgtaggcaaacgggtggtggatgcggtgatcgccggtccaaaagccgatatcagcggcatcgacgaccggttggtgatccagacgccgctggaggccagcgacgttccctatcgtcatgaccgggcgctgctccgcggggcgctggagaaagcgatccagctgccgggctga

SEQ ID NO: 135779 - DNA, 1641 bp, Enterobacter cloacae
atgtcgttattgcctctgcgtcggccggtggtcagccgcacgacttatctgattctctttgcttgctatatcggtatctgtctcaacctggctttttatcgccaggttttcccgttactgccggtaaatagcctgcataactggctggtattcctcagtatgccgatcgtggccattagcgtgatgaatatcctcaccactctcgcctcgttcctgaagctggaccggctggtgattagcctgttcattctgctcagcgcctcggcgcaatatttcatctggaactttggcgtggtgatcgaccgcagcatgatcaccaatatcctcgacaccactccggcggaaagctttgctctactctccggcgaaatgattgccgtcctcggcctttccggggttttggcggtattcgtcgcctggtgggtgaaaatccgtaagcccgccacgcggtggcgcggcgcggcgatgcgcctgctcaatatcgccgtttcggcgctgctgattattctggtggccgcgctgttctacaaagattacgcctcggtgttccgtaacaacaaagagctggtgaaatccctgagcccttccaacagcattgtggccgtgaactcctggtatgctcatcatcggatggacaacctgccgctggtgaagattggcgaagatgccacgcagaaagcggtgatgcataacgctccccgtaagaacctgacgatcgtcgtgctcggcgagacttcgcgagcggataacttctcactgggcggctattcgcgcgacaccaacccgctgatgcggcaggacggcgtgatctattttccgcataccacttcctgcggcacggcaaccgcagtttccgtgccgtgcatgttctccaatatgccgcgcgcgcattatgacgaagagctggcgcaccatcaggaaggcgtcctggatattctacagcgcgcagggatccaggtactgtggaacgataatgacggcggctgcaaaggcgcctgcgaccgggtaccacaccagaacgtcaccgacctgaagctcaccgggcagtgcatcgatggcgagtgctacgatgacgtcctgttccataatctcgacagctatatcgataacctgcaacaggatggcattattgtgctgcataccatcggcagccacggtccgacgtactacaatcgctatccagcggcgtttcgcaaattcacgccgacctgcgacaccaatgagatccagggctgtacccgggagcagttgaccaatacctatgacaacaccatcctttatgtcgactatgtcgttgataaagcgataaaactactgcaatctaaacaggataaatttaccactagcctggtttatttgtccgaccacggcgaatcgctgggagaagatggcgtctatttgcatggtctgccgtattccatcgcgccggatacgcagaaacatgtgccgatggcgctgtggctctccgccgactaccagcagcgctacggtatttccgcgcactgtctgcagcagcgggcgcaaaaagagaattactcgcaggataatctgttctccaccctgctcggcctgctcggcgtcagcacccgcgagtaccaggcggcagatgatatcttaacgccatgtagagaggctggttga

SEQ ID NO: 135780 - DNA, 672 bp, Enterobacter cloacae
atgaaaatcttagtcattgaagacgatgcgctgctgttgcaggggttaattctggcgatgcaaagtgaaggatacgtgtgcgacggcgtctccaccgcgcacgaagccgcgctatcgctggccagcaatcattacagcctgatcgtgctggatctcggcctgccggatgaagacgggctgcattttctcacccgtatgcggcgggagaagatgacccagccggtgctgatcctcaccgcccgcgatacgcttgaggatcgcattagcggtctcgataccggagcggatgactacctggtaaaaccctttgccctggaggaactcaatgcgcgcattcgcgccctgctccgccggcataacaaccagggcgataatgaaatcagcgtcggcaatctgcgccttaacgtcactcgccgcctggtgtggctgggtgaaacggcgctggatcttacgccgaaagagtatgccctgctgtcgcggctgatgatgaaagccggtagcccggtgcaccgcgagatcctctacaacgacatttacagctgggacaacgagccggcgaccaataccctggaagtgcatattcacaacctacgcgaaaagattggcaaatcgcggatccgcaccgtccggggctttggctatatgctggctaacaacatcgacacggaatag

SEQ ID NO: 135781 - DNA, 1098 bp, Enterobacter cloacae
atggctctgtttgcaactgaaacctggaccatgcgccaccggctgctgctgaccatcggcgccatcctggtggtctgccagctgataagcgtcttctggctatggcatgagagcaaagagcagatccagctgctggtggccagcgccatcgaagggcacaacaaccagaaacatgtggagcatgaggtacgggaagcggttgccagcctgctggtgccgagcctgctgatcgttggcctggcgctgtatatcagcatgctggcggtgcgcaagatcacccgcccgctttcacgtctgcaaagcgaactggagaaccgcacgccggacaacctcacccctatcgtactcagcgaatcggtgcccgaagtcacggcggtgaccaccgccctgaatcagttggtttcccgcctcaatctgaccctcgaccgcgagcggctgtttaccgccgacgtggcgcatgagctacgcaccccgctggccgggctgcggctgcaccttgagctgctggcgaaagtgcatggcatgggcgtcgacccgctgatccagcgtctcgatcagatgaccaccagcatttcccagctgctgcagctggcgcgcgtcggccagtccttctccgccggcagctaccagcaggtgctgttgctggatgacgtggtaaaaccgctgcaggacgaactggaggctatgctggcgcagcgtcagcaacggctgctgctgacggatatcgaaaacgagaccgtcgtctctggcgatgcgacgttaatccgcgtgatcctgcgcaatctggtggagaatgctcaccgctacagccctgaagggtcgacgatccgcgtgtcggtgaaagcaggcctgatgccggtgatggcggtggaagatgaagggccggggatcgatgaggcgaaaagcggcgaactcagtaaagccttcgtgcgcatggacagtcgctacggcggcattggcctcggactgagcatcgtcacgcgcatcgctcagctgcatgacgcccagttttttttgcataaccgacagccagggccaggggtccgcgcgtgggtgctattcccgcagcgcgggggtcagaacgtcagcacccattga

SEQ ID NO: 135782 - DNA, 2022 bp, Enterobacter cloacae
atgagtaaatcgtttgtactgcattccgcctttcgcccctccggagaccaaccggaagccatccgccgcctggaagaggggctggaggatgggcttgcgcatcagacgctactgggggttaccggctccggtaaaacctttaccatcgccaacgtgattgccgacctgcagcggccgacgatggtgctggcgccaaacaaaaccctggcggctcagctctacggcgagatgaaagagtttttcccggagaatgccgtcgagtatttcgtctcctactacgattactatcagccggaagcctacgttcccagctcagataccttcattgagaaggacgcctcggttaacgaacatattgagcagatgcgtctgtcggccaccaaagcgctgctcgagcggcgcgacgtagtggtggtggcgtcagtctcggcgatctacggcctcggcgacccggacctgtatctgaaaatgatgttgcatctaacggtcggtatgctgattgaccagcgagcgatcctgcgtcgtctggccgaactgcagtatacccgcaacgatcaggccttccagcgcggcacttttcgcgtgcgcggcgaggtgatcgacgtcttcccggcggaatccgacgatatcgctctgcgcattgagctgtttgacgaagaggtcgagcgtctgtcgctgttcgacccgctcaccggccacgtcgaagggacggtgccgcgctataccatttatcccaagacccactacgtgacgccgcgggagcgcatcgtccaggcgatggaagagatcaagctggagctggcggagcggcgcaaggtgctgctggccaacaacaagctgctggaagagcagcgcttaacccagcgtacccagtttgacctcgaaatgatgaacgagctgggttactgctcgggcattgaaaactactcgcgctttctctccgggcgcgggcccggcgagccgccgccgaccctgttcgactatctgccggcggatggcctgttggtgattgacgaatcccacgtcacggtgccgcagatcggcggtatgtaccggggcgaccgggcgcgcaaagagacgctggtggaatacggtttccgcctgccgtcggcgctggataaccggccgatgaagtttgaagaatttgaagcgctggcgccgcaaaccatctatgtgtcggcgaccccgggcgcctatgagctggataaatccggcggcgaggttgtggatcaggtggtgcggccgaccggtctgcttgacccaatcatcgaagtgcgcccggtggcgactcaggtcgacgatctgctgtcagagatccgcctgcgcacggccatcaacgagcgcgtgctggtcaccactctcaccaagcggatggcggaggacttaaccgagtaccttgaggagcacggcgagcgcgtgcgctatctgcactcggatatcgacaccgtcgagcgcatggaaatcatccgcgacctgcgtcttggcgagtttgacgtgctggtggggatcaacctgctgcgtgaggggctggatatgcctgaggtgtcgttggtggcgatcctggatgcggataaagagggcttcctgcgttctgaacgctcgctgatccagaccatcggccgcgcggcgcgcaacgtcaacggcaaggccatcctctacggcgataagatcaccccctccatggccaaagccattggcgagaccgagcgtcgacgggagaaacagcagcgctacaacgaagagcacggcattgtgccgcaggggctcaataagaaagtggtggatatcctgcagctgggccagggcctggcgaaaaccaaagccaaagggcgcggtaaagcgaaggccgttgagcctgccgggcttagcgctgtggatatgacgccaaaagcgctgcagcagaaaatccacgagctggaagggcagatgatgcagcacgcgcagaacctcgagtttgaggaggcggcgcaaatacgcgaccagctgcatcagctgcgcgagctgtttatcgccgcctcctga

SEQ ID NO: 135783 - DNA, 381 bp, Enterobacter cloacae
  misc_feature (34)..(43): n is a, c, g, or t
atgagcattttcccgagctctatgccctacggcnnnnnnnnnnccctacggcagcgcaaaggcgcctcgctgagcgacgacgatcagtaccagctggcgctggccagggcgctgatcgtccagccgcggctgctgatccttgatgaaccctcgcgcggcagagggccgcgctgcctgcaaaagctggcggatctgctgttgcggttaaatcgcgatatcggcctgacggtgctgctcgccgagcagcacctgccctttatccgccgggtggcggatcgcttctgtgtcttgcaccggggccgtaacgtcgccgaaggcgatattatggcgctggatgagccgctgctggcgcagtggataacgccggatccagcgccctga

SEQ ID NO: 135784 - DNA, 255 bp, Enterobacter cloacae
atgcttaccgctcaggcggtacgccaggcgggactaccgctggcggggtggatcgccaatgacgtacagccgccgggcaagcgccacgccgaatatctggcgacgctgaaaaaccgactggccgcgccgttcctcggcgaaataccgtggcttgccgacatcgcgcagcgcgacgatctcggccagtatctggacctcagggcgctggatccggcgttatccactgcgccagcagcggctcatccagcgccataa

SEQ ID NO: 135785 - DNA, 534 bp, Enterobacter cloacae
gtgaaaactttaattctcttctccacccgcgacgggcagacccgtgaaatcgcttcgtttctcgcctctgagcttaaagagctgggcatcgatgcggacaccctgaacctgaaccgtaccgatgtcgtcgaatggcatcactacgatcgggtggtcattggcgcgtcgattcgctacgggcactttcatccggcggtggaccgctttgtgaaaaagcatctggcagcattgcaggcgctgccgggggcattcttttcggttaacctggtggcgcgtaaacccgagaagcgcacgccgcagaccaacagctatacgcgtaagtttctgctgaactcgccgtggcagccgcagagctgcgcggtatttgccggcgcgctgcgctacccgcgctacagctggtacgatcggtttatgatccgcctgattatgaaaatgaccgggggtgaaacggatacccgcaaagaagtggtctataccgactggcaacaggtatcccggtttgctcgggaaatcgcacaaatggcgcgcaaatag

SEQ ID NO: 135786 - DNA, 1452 bp, Enterobacter cloacae
atgcattttcgcgccataacccgaatcgttggactgctggtcatcttgttttcggggacgatgatcgtcccgggattagtggcactgatatatcgcgatggcgcgggacgggccttcactcaaaccttctttgtcgctctggcgatcggctccatgctgtggtggccgaaccgtaagcaaaaaggcgaactgaaatctcgcgaagggtttctgatcgtggtgctgttctggaccgtgctggggagcgtgggggccttgccctttatcttctccgaacagccgaacctgacggtgacggatgccttcttcgagtcattttccggcctgacgacgaccggggcgaccactctggtggggctggactcgcttccgcacgctatcctcttttatcgccagatgctgcagtggttcggcggcatggggatcattgtgctggcggtagcgattctgcctatcctcggcgtcggggggatgcagctctaccgcgcggaaatgcccggcccgctgaaggataacaagatgcgtccgcgtattgccgagacggcgaagacattgtggctcatctatgtgttactcacgatcgcctgcgcattggcgctctggtttgccggtatgccggcgttcgatgcgatcgggcacagtttcgccaccatcgccatcggcggtttctcgactcacgatgccagcgtcggttatttcaacagcccgatgatcaactccatcattgccatcttcctgctgatctccggctgtaactacggtctgcatttttcgttgttgagcggacgcagcctgaaggtgtactggcgcgaccccgaatttaggatgttcattggcgtccagttgacgctggtcatcgtctgtacgctggtgctatggcttcataacgtgtacggctcggtgttgacgacgctgaaccaggcgtttttccaggtggtgtcgatggcgaccaccgcggggttcaccaccgatagcattgcacgctggccgctgttccttccggtgctgttgctgtgctccgcatttatcggcggctgcgctggctccacgggcggtggattaaaagtgatccgtatcctgttgctgttcaagcagggcaaccgtgagctgaagcggctggtgcacccgaatgcggtgtatagcattaaattaggtaaccgcgcgctgccggaacgtattctggaagcggtatggggattcttctccgcctatgcgctggtctttatcattagtatgctggcgattatcgccaccggggtggatgacttctctgctttcgcctccgtggtggcgacattgaacaacctcgggcctgggctcggcgtcgtcgcggataactttgccaccatgaacccggtcgcgaaatggatcctgattgctaatatgctgtttggtcgtctggaagtgttcaccttactggtgctctttacccccactttctggcgcgaataa

SEQ ID NO: 135787 - DNA, 615 bp, Enterobacter cloacae
atggagagctggttaatcccggcggcgccggttaccgtcgttgaggagattaaaaaaagccgttttatcacgctgttggcgcataccgacggcgtggcggcggcaaaagcttttgtcgagtccgtcagagcggatcaccctgatgcccgccaccactgcgtggcgtgggtcgcggggccgcctgatgattcgcaacagctggggttttcagacgatggcgaaccggcgggaacggcgggtaaaccgatgctggcgcagctgatgggaagcggcgtcggcgagataaccgctgtcgtcgtgcgttactacggtggtatcctgctgggcaccggtggtctggttaaggcctatggcggcggggtgcatcaggcgctggcgcagctgacgacgctgcgcaagacgccgttaacggcatatactttgcagtgtgagtatgggcaactggccggcgttgaagcgctgctcgcccaattctccgggaacgtcgttgaaagcgaatatctggcgtcagttcggctgcgcgtggcgcttccccaggccgaagtggcggctttttcagcaagactggctgattttagtcgtggttcattgcaattactgaagattaacgaataa

SEQ ID NO: 135788 - DNA, 1332 bp, Enterobacter cloacae
atggaatccctggccgcgctctataaaaatcatattgttaccctacaagaacgtacccgcgacgtcctggcccgttttcaaatggatgctctgctgattcactccggcgagctggttaacgtcttccttgatgaccatccctacccgttcaaggtcaatccgcagttcaaagcctgggtgcctgtgactcaggtgcctaactgctggctgctggtggacggtgtgaataaaccgaagctgtggttctatctgccggtagattactggcataacgttgagccgttgccgacctctttctggaccgaagagatagacgtgatcgcgctaccgaaggccgatggcatcggcagccagctgcctgccgctcgcggtaatattggctatatcggcccggtgcctgagcgcgcgctgggcctgggtatcgccgcggataagatcaacccgaaaggggttatcgactacctgcattactaccgggcttacaaaaccgattacgagctggcctgcatgcgtgaagcgcagaagtcggcggtgaatggtcatcgtgcggcctacgaagctttccagtcggggatgagcgaattcgatatcaaccaggcctatctcaccgccaccggccatcgtgataccgacgtgccttacagcaatattgtcgcgctgaatgagcatgcctccgtcctgcactacaccaaactggaccatcgtgccccggcggagatgcgcagtttcctgctcgacgccggcgcggaatataacggctatgccgcagatctgacgcgcacctgggcggcgcacggcgataacgacttagcccatctgatcaaagacgttaacgatgagcagcaggcgctgattagtaccatgaaggccggtaccagttacattgattaccatatccagttccatcagcgtatcgcgaagctgttgcgtaaacaccagttggttactgacatgagcgaagaggcgatggtggagaatgacctgaccgggccgtttatgccgcacgggattggccatccgctgggtctgcaggtgcatgatgtcgctggttttatgcaggatgacaccggtacgcatctggcggcgccgtcgaaatacccgtatctgcgctgcacccgtattatcgagccgcggatggtgttaactattgaacccggcatctacttcatcgagtcgttactggcgccgtggcgtgaaggcccgttcagcaagcactttaactggcaaaaaattgacgccatgaagccgttcggtgggatccgtatcgaagataacgtggtgattcacgaaaacagtatcgaaaatatgacgcgcgatctgaagctggcctga

SEQ ID NO: 135789 - DNA, 2190 bp, Enterobacter cloacae
atgctctacaaaggcgacaccctgtacctcgactggctggaagatggcatcgccgaactggtgttcgatgccccaggttcggtcaacaagcttgataccgcaaccgtagccagcctcggtcatgcgctggacgtactggaaaaacaaagcgatctcaaaggtctgctgctgcgctctgaaaaagcggcatttatcgtcggcgcggatatcaccgaattcctctcgctgttcctggtccctgaggagcagttaagccagtggctgcattttgctaacagcgtcttcaatcgtctggaagatctccccgtccccactatctctgccgtcaatggctatgcgctgggcggcggctgcgaatgcgtgctggcgaccgattaccgcctggcgacgccggatctgcgcattggactgccggaaaccaagttgggcattatgcccggcttcggcggttccgtgcgtctgccgcgcctgctcggcgccgatagcgcgctggaaattattgccgccgggaaagacgtcggcgccgatcaagcactgaaaatcggcctggtggatggcgtggtcgctgcggaaaaactacgcgacggcgcgctggcgatcctacgtcaggccatgaatggcgacctggactggaaagcgaaacgtcagccgaagctggagccgctgaagctcagcaaaattgaagccgccatgagcttcacgattgccaaaggcatggtcgcgcaaaccgccgggaagcattacccggcgccgatcaccgcggtcaaaaccattgaagccgccgcgcgtcttggtcgtgaagaagccctggtgctggaaaataaaagctttgtcccgctggcccataccaatgaggcccgcgcgctggttggtatcttcctgaacgaccagtacgtcaaagcgaaagcgaaaaagctgaccaaagatgtcgagacgccgaagcatgctgccgtcctgggcgctggcattatgggcggcggtatcgcttaccagtcggcctggaagggcgtgccggtggtgatgaaagacatcagcgacaaatcgctgaccctgggtatgaccgaagcggcgaaactgctgaataaacagctggaacgcggcaaaatcgacggtctgaagctggccggagtgattagcaccattcagccaacgctggaatacagcggttttgaccgcgtggacgtcgtcgttgaagcggtggtggaaaacccgaaagtgaagaaagccgtactagcggaaaccgagacaaaagtgcgcccggataccgtgctggcgtccaacacctcaacgatccccatcagcgagctggccagcgttctgcagcgcccggaaaacttctgcggtatgcacttctttaacccggtgcatcgcatgccgctggttgaagtgatccgcggcgaaaaaacctcggataataccattgccaaagtggtggcctgggccagcaaaatgggcaaaacgccgattgtggtgaatgattgtcccggcttcttcgtcaaccgggtactgttcccctacttcgccggcttcagccagctgctgcgcgacggggcggacttccgcaaagtcgacaaagtgatggagaaacagtttggctggccgatgggcccggcttatctgctggacgtggtcggcatcgataccgcgcaccatgctcaggcggtcatggcggcgggcttcccgcagcggatgcagaaagattatcgcgacgccatcgacgccctgtttgacgccaaccgtttcggccagaagaacggcctcggcttctggcgctataaagacgacagcaaaggtaagccgaagaaagaagaagatgctgccgtcgacagcctgctggccgacgtcagccagtcgaagcgcgatttcagcgatgaagagattatcgcccgcatgatgatccccatggttaacgaagtcgtccgctgcctggaagaaggcattatcgccagcccggcggaagcggatatggcgctggtatacggcctgggcttccctccgttccacggcggcgcattccgctggctggacaccatcggcagcgcgaagtatctcgatatggcgcagcaataccagcaccttggcccgctgtatgaagtgccagccggtctgcgtgacaaagcgcgccataacgaagcgtattatccccaggtagagccagcccgtccggttggcgctctgaaaacggcttaa

SEQ ID NO: 135790 - DNA, 1476 bp, Enterobacter cloacae
atgaaatatcacgatcttcgcgactttctgacactcctggaacaacagggcgaactaaaacgtatcactctgccggtcgatcctcacctggaaatcaccgaaattgccgaccggactctgcgcgccggcggcccggcgctgctgtttgagaatccgaaaggctataccatgccggtgctgtgcaatctgttcggcacgccgcgtcgcgtggcgttggggatggggcaggaggatgtcagttcgctgcgcgaggtgggtaaactgttggcctttctgaaagaacctgagccgccaaaaggcttccgcgacctgtttgataagctgccgcagttcaagcaagtgctgaatatgccgaccaaacgcctgcgcggcgccccctgtcagcaaaaaatcatccagggcgatgatgtcgatctgaataaaatcccgattatgacctgctggccggaagatgccgcgccgctgatcacctgggggttgacggtaacccgcgggccgcacaaagagcggcagaacctgggaatttatcgccagcagctgatcggcaaaaacaaactgattatgcgctggctgtctcatcgcggcggcgcgctggatttccaggagtggtgcgcggcgcgtccgggcgaacgcttcccggtttccgtggcgcttggcgccgatccggcaaccattcttggcgcggtgacgccggtgcccgataccctgtcggaatatgctttcgcaggcctgctgcgcggcaccaagaccgaagtggttaagtgcgtttccaatgaccttgaagtgccggccagcgcggaaattgtgctagaaggctacattgaggccggtgaaatggcgccggaaggcccgtatggcgaccacaccggttactacaatgaagtagaccagttcccggtgtttacggtaacccatattacccagcgtgaagacgcgatttatcattctacctataccggccgaccgcccgatgagccagcggtgctgggcgtggcgctgaatgaagtcttcgtcccgatcctgcaaaagcagttcccggaaatcgttgatttctatctgccgccggaagggtgctcctatcgcctggcggtggtgaccatgaaaaaacagtacgcgggacatgccaagcgcgtaatgatgggcgtctggtcgttcctgcgccagtttatgtacaccaagttcgtgattgtctgcgatgacgacgtcaacgcacgcgactggaacgatgtgatttgggcgatcactacccgtatggacccggctcgtgatacggtactggtagagaatacgccaattgattatctggattttgcctcgccggtttccggcctgggttcaaaaatggggctggatgccaccaacaaatggcctggcgaaacccagcgtgaatggggtcgcccaatcaaaaaagatcctgccgttacggcgcgtattgacgccatctgggatgaactggccatctttaaacaacagtaa

SEQ ID NO: 135791 - DNA, 489 bp, Enterobacter cloacae
atgcaagcctggtacttactgtattgcaaacgtgggcagctacaacgagcccaggaacatctggaacgtcagtcagttaactgcctgatgccgacgattgcgctggaaaaaatcattcgcggtaaacgcaccatggtcagcgaaccgttgttcccgaactacctgtttattgagttcgatccagaggtgattcataccaccaccatcagcgccactcgcggggttaacaacttcgtgcgctttggcgccctacccgctatcgtcccctcggcggtcatccatcagctttctatctacaaaccggaagggattaccgacccggaaacgccgcatgagggcgatagcgtgctaatcaccgacggcgcgtttgaaggcctggaggcgatcttcaccgagcccgacggcgaagcgcgctctatgttgctgttaaacctgctgaataagcaagtcctgcagagcgttaaaaataccgacttccagaaaatctaa

SEQ ID NO: 135792 - DNA, 792 bp, Enterobacter cloacae
atgtttgatatcggcgttaatctgaccagttcgcagttttcccgcgatcatgatgaggtagtggcgcgcgccctggcggcgggggttaacggcatgctgctgaccggcacaaatttggcggagagccagcaggcgcagaaactggcgagccgctattccggctgctggtccacggcgggggttcatccccatgacggtagcagctggacgccagcggtcgccgaggcgatttataccctcgccggcgagccgcaggtggtggcgataggcgagtgcggtctggattttaaccggaatttttccacgccgcacgagcaggaggtagcgttcagcgcccagttggcgctggccgctgagctgtcgatgccggtgtttttgcactgccgcgacgcccacgatcggtttctgacgctgcttaaaccctggcttgagaagatcccgggcgcggtgctgcactgctttaccggcagccgcagcgaggtgcaggaatgcctggatctgggcctgtttatcggtattaccggttgggtatgcgatgagcggcggggactggagctgcgcgagctgctgccggcgatcccggcggaacgtctgctgctggagaccgatgcgccttatctgctgccgcgcgacctcaagccgaaaccggcctcgcggcgtaacgagcccgcgtatttgccgcatatcctggccagcgtcgcggcctggcgtggcgaggaggcgcaatggctggaggcgcaaacggacgcaaacgtcagggcgctgtttggcgtcgacattaacggcgtttag

SEQ ID NO: 135793 - DNA, 780 bp, Enterobacter cloacae
atgggcgtagacgatacacaaccgctaatttcgcatctgattgagctgcgcaagcgtctgctcaacagcatcattgctattctggtgatcttcctggcgctggtctatttcgccaatgatatctaccagctggtctcggccccgcttatcagtaagatgcctgtgggcgcgacgatgatcgccaccgatgtcgcttcacctttctttacgccgataaagttgaccttcatggtgtcggtgatcctgtcggtgccgattattctttaccaggtatgggccttcgtcgcgccggcgttgtataagcacgaacgccggctggtggtgcctttactggtatccagtaccctgctgttctatatcggcatggctttcgcctattttgtcgtgtttccgctggcgttcggcttcctgacccatgcggcgccggaaggggtgctggtctcgaccgatattcgcagctatctcgacttcgtgatggcgctgtttatggcattcggggtctcctttgaggtgccggtcgccattgtgttgctctgctggatgggcgttaccacgccggaagacttgcgtaaaaaaaggccgtatgtgctggtgggtgccttcgtggtgggcatgctgctgacgccgccggacgtattctcgcagacactgctggccattccgatgtactgtctgtttgaagtcggggtgttcttcgcccgcttctacaccgggaagcgcctgacgcgcgatgacgacgccgcggccgaagctgaagccgcagagcacagagaagagtaa

SEQ ID NO: 135794 - DNA, 537 bp, Enterobacter cloacae
gtgttcgatattggttttagtgaactactgctggtgtttgtgattggcctcattgttctggggccacagcggcttcccgtagcggttaaaacggtagttggctggatccgtacgttacgctcgctggcgaccacggtacaaaatgagctggcccaggagctaaaactgcaggagttccaggagagcctgaagaaggtggaaaaggctagcctgaataacctgacgccggagctgaaagcctcgatggatgaactgcgcgaggccgcggagtcgatgaagcgctcctatagcgcccacgatcccgaaaaagccagcgacgaagccaataccatccttaatccggtggtcaaaggcagcgaagcgcagcgccaggacgtcacgccggcgacggcagaacatcaggccagcgctccggctcatgcgccagatcccgttgccgacgagcaatctgcttcaccggctgaccttcaggcagagaaaacgtccgctacggcggcagttccccattcttcccccgcatcgagtgataaaccgtaa

SEQ ID NO: 135795 - DNA, 252 bp, Enterobacter cloacae
atgggtggtatcagtatttggcagttattaattgttgtcgtcatcgtagttctgctttttgggacgaagaagctgagctcgctggggtctgacttaggggcatctatcaaaggctttaaaaaagccatgagtgatgatgataaacccgaaaagtcggcgccagacgcagatttcacggcgaaaaccatcgccgataaacaggatgatgcaaaaaaagacgagacaaaacgccacgacaaagagcaggtgtaa

SEQ ID NO: 135796 - DNA, 1641 bp, Enterobacter cloacae
atgacgccaggagaattacggcgcctgtatttcatcatccacacctttttgagctacgggctcgatgagctcatccccaaaatgcggatcacgctgccgctgcgtatctggcggcggatgctgttctggatgccaaaccgccatcaggatcagcctcttggcgcccgccttcggctggcgctccaggagttggggccggtgtggataaaattcggccagatgctttccacccgccgggatctctttccgccgcatattgccgatcagctggcgctgttgcaggaccgcgtggcgccctttgaagggaagctcgcgcagcagcagatagagaaagcgatgggggggctgccggtcgagacctggtttgatgatttctccgttgagccgttagcctcggcgtccatcgcccaggtgcataccgcgcgtctgaaggagaatggcaaagaggtggtgatcaaggttatccgcccggatattttgccgatcattaaagcggacatgaagctcatctaccgcctggcgcgctgggtaccgcgtctgctgcctgacggtcgccgtctgcgcccgcaggaggtagttcgtgaatatgaaaaaacgctgctggatgagctgaacctgctgcgggaatccgccaacgctattcagctgcggcgtaatttcgaagacagcccgatgctgtacgtgccggaggtgtaccccgactactgcagcgaaagcatgatggtaatggagcgcatttacggtatcccggtgtccgatgtggaggcgctggaggcccagggcaccaacatgcagctgctggcggagcggggcgtgcaggtcttcttcacccaggtgttccgcgacagcttcttccatgccgatatgcatcctggcaacatattcgtcagctacgagcatccggaagatccgcagtatatcggcatcgactgcggtattgtcggctcactgaacaaagaagataagcgctatctggcggaaaactttatcgcctttttcaaccgcgattatcgtaaagttgccgagctgcacgtcgattccggttgggttccgcccgataccaacgttgaagagtttgagttcgcgatccgcacggtctgcgagccgatctttgagaagccgctggcggagatctccttcggccacgtgctgcttaatctgttcaataccgcgcggcgtttcaatatggaagtccagccgcagctcgttttactacagaagacattactttacgtagaaggggtaggccggcagctctatcctcagttagacttgtggaaaacggcgaagcctttcctcgagtcgtggatcaaagatcaggtcggcattccggcgctggtgcgcgcgtttaaagacaaagcgccgttctggatcgaaagaatgccggaaatacctgagctggtgtatcagagcctgcagcagagcaaacagctgcagaccagcgtcgatactattgtgcgggatatgcatgtgcgtcatgtacgccagggccaatcccgttacctgtttggtataggcgcggttttattgctcagtggtacgctgctctttatccatcgccctgagtggggaatgatgcccggttggctgatggccggcggtgtggtgacctggcttattggctggcggaaaacccactga

SEQ ID NO: 135797 - DNA, 606 bp, Enterobacter cloacae
atgcctttcacacccctggttaccgctggcattgaaacggcgctgaatactttcctctggcgcgacaaagcgcttaaacccgctcgccagcgcctgctgggcaaggtattgcgggtccagctgcaggatttcgccacgcccgtggtgctggtattcagcgaacgccaggttgacgtcctgagcgcctgggaaggagaggccgattgcaccgtgattacccggctcagcgtgctgccaaaactgcgcaatcgtcagcagctcacggcgcttattcgcagcggtgatctggaagtgcagggcgatctgcaggtggtgcagaatatggtctccctgtgcgacctggcagagtttgatcccgctgaactgctggcgccctataccggcgatattgtggccgaaggcgtcggtaaagtcctgcgcggcggcgctcagtttctgctgaagggcgcagaacgccagcagcgctatgtcgcggaagcgatcactgaagagtggcggctggcgccggggccgctggagctggcctggtttgctgaagagacaacggctattgagcgcgcgctggccgcactggaaaaacggctggaaacgctggagggcaaatga

SEQ ID NO: 135798 - DNA, 756 bp, Enterobacter cloacae
atggttgaggattcacaagaaacgacgcactttggctttcagacggtcgctaaagagcagaaagcagatatggtggcgcatgtattccattctgtcgccgcaaaatatgatgtgatgaacgacctgatgtcgtttgggatccatcgtttgtggaagcgtttcaccatcgactgcagcggcgtacgccgcgggcagaccgtgctggatctggctggtggtaccggtgatttgacggccaagttctcccgcctggtaggggaaaccggccgcgtcatgcttgctgatatcaatgattctatgctcaaaatgggccgcgaaaagctgcgcaatatcggcatcgtaggcaacgttgagtatgttcaggccaacgcggaagccctgccttttgctgataatacctttgactgcatcaccatctctttcggtctgcgtaacgtgaccgacaaagagaaagcgctgcgttcgatgtatcgcgtgctgaagccgggcggacgtctgctggtgctggagttttctaaacccattatcgaaccgctgagcaaagcctacgacgcttactccttccatatcctgccgaaggtgggcgagctggtggcaaaagatggcgacagctatcgctacctggcggaatctattcgtatgcatccggaccaggaaaccctgaaagggatgatgcaggatgcgggcttcgaaaacgtggattactacaacctgacggcgggtatcgttgctttgcatcgcggttacaagttctga

SEQ ID NO: 135799 - DNA, 1449 bp, Enterobacter cloacae
gtggatctctccattattatcagcgcggttatcgcactggcagccgggttaatggtcggctggctggcgaccaaagcgcgcgccgatcaaattcgggccgatctcatcgaggaacggcgagagttggatattgagctgagcgccgcccgccagcaactggcgcaggaggcccactggcgtgaggagtgtgagctgctgaacaacgagctgcgcagcctacgggatatcaatacctcgctcgaggccgatctccgtgaggtcaccacccggctcgaatccacccagctgcatgcggaagataagatccgccagatgatgaacagcgagcagcgccttagcgagcagtttgaaaacctcgccaaccgtattttcgaacacagcaaccggcgggtcgatgagcaaaaccgccagagcctgcatggcctgctgacgccgctacgcgaacagctggacgggttccgccgccaggtgcaggagagctttggccaggaggcgcgtgaaagacataccctggcgcatgagatccgcaatctgcagcagttgaacgcgcagatggcacaggaggcgctgaacctgaccaaagcgctgaagggggataacaaaactcagggcaactggggggaagtggtcttaacccgcgtgctggaggcctccggcctgcgcgaaggctatgagtaccagactcaggtcagtattgagaccgacaaccgctcgcggatgcagccggacgttatcgtgcgcctgccgcagggtaaggacgtggtgatcgacgccaaaatgaccctggtcgcctatgagcgctatttcaacgccgaagacgactacacccgcgaagtcgcgctgcaggaacaccttgcctcggtgcgtaaccatattcgcctgctgggacgcaaggattatcaacagctgcctggcctgcgctcgctcgactatgtgctgatgtttattcccgttgagccggcgttcctgctggccatcgatcgccagcctgagctcatcagcgaggcgctgcaaaataatattatgctggttagcccgacgacgctgctggtagccctgcgcactatcgccaatctgtggcgctatgagcaccagagtcgtaacgcgcaaaagattgccgagcgggcggggcgcctttacgacaaaatgcgcctgtttgtggatgatatgtccgccatcggccagagcctggataaggcgcaagagagctatcgccaggcgatgaaaaagctcgcttccgggcgtggtaatctgctggcccaggcggaggcctttcgcggcctgggcgtggaggtcaagcgcgggattaatcctgatttagtcgaacaagctacggctcaggacgagcaatatcgtctcgaagatgaggataacctgccggaaaatgacgcattttcacccgactctgccgagacggtgcgtagccgggaggcggctccgccatgctga

SEQ ID NO: 135800 - DNA, 762 bp, Enterobacter cloacae
atgtccaagtctgatgtttttcatctcggcctcaccaagaacgatttacaaggggctacgctggctatcgtccctggcgatccggagcgtgtggaaaagatcgccgcgctgatggataagccggttaaactggcatctcaccgcgaatttacctcctggcgcgcggagctggacggcaaaccagtgatcgtctgctctaccggcatcggcggcccgtcgacttccatcgccgtggaagagctggcgcagctgggggtgcgtaccttcctgcgtatcggcaccacaggcgcgattcaaccgcacatcaacgttggcgatgtgttggtgactaccgcctccgttcgtctggacggcgccagcctgcacttcgcgccgatggaattcccggccgtcgcagacttcgcctgcaccaccgcgctggtggaagcggcgaaatcaatcggcgccaccacccatatcggcgtaaccgcttcctcggataccttctacccgggccaggagcgttacgacaccttctccggccgcgtggtgagccgcttcaagggctcaatggaagagtggcaggcaatgggcgtgatgaactatgaaatggaatccgccacgctgctgaccatgtgcgccagccagggcctgcgcgccgggatggtggctggggttatcgtgaaccgtacccagcaagagatccctaacgccgaaaccatgaagcaaaccgaaagccacgcggtgaaaatcgtcgtggaagcggcgcgtcgtctgctgtaa

SEQ ID NO: 135801 - DNA, 813 bp, Enterobacter cloacae
atgaccaccaccaagcaacctggattcgcacctgcagcttcaccacacgccgcaaccgccgttcatacgccggaagagcatattatcgccggagagacgtcgattccctctcagggtgaaaacatgccggcctaccacgcccgcccgaaaaatgccgacggtccgctgccgatcgttatcgtggtacaggaaattttcggcgtgcatgaacatattcgcgatctttgtcgccgcctggcacaggaaggctatctggctatcgcgcctgaattgtacttccgtcagggcgatccgaatgagtaccacgatatcccgaccctgttcaaagagctggtcagcaaggtgccggacgcgcaggtgctggcggatctcgaccacgtcgccagctgggcggcgcgccacggcggcgatgcccatcgtctgctgatcaccggcttctgctggggcggacgcattacctggctgtatgccgcgcataacccgcagcttaaagcggcggtggcctggtacggtaagctggtgggagaaaaatcactgaattcgccgaagcacccggtagatatcgccgtcgatctcaacgccccggtgcttggtctgtacggcgctaaagacgccagcattccgcaggacaccgtcgagactatgcgtcaggcgctgcgggcagccaacgccacggcggaaatcgtggtctatcccgaagccgatcatgcctttaacgccgactatcgcgccagctatcatgaagagtcagccaaagacggctggcagcggatgctcgcctggtttgctcagtatggcggtaaaaaagggtaa

SEQ ID NO: 135802 - DNA, 2265 bp, Enterobacter cloacae
atgacaattattaaccacaccctcggttttcctcgcgttggcctgcgccgcgagctgaaaaaagcgcaagagagctactgggcgggcaacgccactcgcgaggaactgctggcggtaggccgtgagctgcgcgcccgtcactgggagcagcagaaacaggcgggcgttgatctgctgccggtgggggatttcgcctggtacgaccatgttctgactaccagcctgctgcttggcaacgtgccggctcgtcatcagaacaaagacggatccatcgacatcgatacactgttccgcattggccgcggccgcgcgccgactggcgaaccggccgccgctgcggaaatgaccaaatggtttaacaccaactatcactatatggtgccggagttcgtgaagggccagcagttcaaactgagctggacccaactgctggatgaagtagacgaagcgctggcgctgggccacaagatcaagcccgtgctgctggggccggtaacctatctgtggctgggtaaagtgaaaggtgaaccgtttgaccgcctgaccctgctgaatgccatcctgccggtttaccagcaggtgctggccgaactggcgaagcgcggcatcgattgggtgcagattgatgaaccggcgctggtgctggagctgccgccagcgtggctggaggcctttcaaccggcttatgacgccctgcagggccaggtgaagctgctgctgactacctattttgaaggcgttagcgacaatctcgcgaccattgctgcgctaccggtccaggggctgcacgtcgatctggtgcacggcaaagatgatgttgccgaactgcacaaccgcctgccggccgactggctgctgtccgcgggcttgatcaatgggcgtaacgtctggcgcgccgatctcaccgaaaagtatgcgcaaattaaagacctcgtcggtaagcgcgagctatgggtcgcgtcatcctgctctctgctgcatagcccgatcgatctgagcgtggagacgcgccttgatgcggaagtgaagagctggtttgccttcgcgctgcagaaatgcggtgagctggcgctgctgcgcgatgcgctgaacagcggcgatacggcggcgattaccgagtggagcgcgccaatccaggcccgtcgccattcgacccgcgtgcacaacgcggaggtggaaaaacggctggcggcgatcactgctcaggacagccagcgcgccagcccctatgaggttcgcgcgcaggcacagcgccagcgctttaacctgccgaaatggccgactaccaccatcgggtcattcccgcaaacgaccgagatccgcggcctgcgcctggacttcaaaaagggtaaccttgacgccagtcattatcggacggggattgcggaacatattaagcaggcgatcgtcgagcaggagcggttaggtttagacgtactggtgcacggggaggccgagcggaacgacatggtggaatacttcggcgaacatctggacggttttatcttcacgcaaaacggctgggtgcagagctatggttcccgctgcgtgaagccgccggtggtgatcggcgacgtcagccgtccgcaggcgatcaccgtcgactgggcgaagtacgcgcagtcgctgaccgacaagccggtgaaagggatgctcactggaccggtgaccattctgtgctggtccttcccgcgggaggatgtcagccgtgaaaccatcgcgaaacagattgcgctggccctgcgtgatgaagtggcggatctggaggcggcggggatcggcatcatccagattgatgagccggcgctgcgcgaagggttaccgctgaagcgcagcgactgggatgcctatctgcagtggggtgtggaagccttccgccttaatgctgcggtcgccaaagacgacacgcagatccatacccatatgtgctattgcgagttcaatgacatcatggactccattgccgcgctggacgctgacgtgatcaccattgaaacctcgcggtccgatatggagctgctggagtcgttcgaagcgttcgagtaccccaatgagatcgggccgggagtatatgatattcactcgccaaacgtgccgagcgtggagtggatcgaagcgctgctgaagaaagccgcgcagcgtatcccggtggagcgactgtgggttaacccggactgcggcctgaaaactcgcggctggccggaaacccgcgccgcgctggcgaatatggtgcaagcggcgcgaaatctgcgccagtccgcctaa

SEQ ID NO: 135803 - DNA, 954 bp, Enterobacter cloacae
atgatcgaaattaaacatctgaaaacgctgcaagcgttgcggaacagcggttcactggcgggtgcggcagcggccctgcaccagacccagtccgccttgtctcaccagttcagcgatctggaacagcgccttggctttcgtctctttgtgcgtaagagccagccgctgcgttttactcctcagggggaaatcctcttacagctggccaaccaggtgctgccgcagatcgctcgcgccctgcaggactgtaacgaaccacagcagacccggctgaggctggctatcgaatgtcacagctgtattcagtggctgacgccggcgctggagaatttccgcgcccgctggccacatgtggaggtcgacttccattccggcgtcaccttcgacccacagcctgcgctgcagcagggtgaactggatctggtgatgacctccgatattctgccgcgcagcggcctgcactactcgccgatgtttgattttgaggtgcgtctggtgctggcgcccgagcatccgttagctatgaagacgctggttaccccggaggatctggccgcggaaacgctgttgatttatcccgtgcagcgcgggcgcctcgatatctggcgccacttcctgcagccggccggcatcagcccgcagctgaaaagcgtcgataacacgctgttgttgatccagatggtggctgcccggatgggcatcgccgcgctgccgcactgggtggtggaaagctttgaacgccagggcctggtggtcaccaaaaccctgggtgaggggttatggagccggttgtacgcggccgttcgcgatggcgaacagcgtcaaccggtcaccgaagcgtttattcgctctgcgcggaaccacgcctgcgatcatctgccgtttgtccggagtgcggagcgacccagcggcgatggacccacagcgaggccaggatcaccaacgctccgctaa

SEQ ID NO: 135804 - DNA, 900 bp, Enterobacter cloacae
gtggcgctgttaattatcaccactatcctgtgggccttttcttttagcctgattggcgaatacctggccggtagcgtcgacagctatttttcggtgctgatgcgcgtgggcctggcggcgctggtgttcctgcctttcctgcgcacgcgcggccagtcgccgcgcacgatcgtgctctatatgctggtgggcgcgatgcagctaggcatcatgtacctgctggctttccgcgcctatctctatctgacggtctcggaatttctgctgtttaccgtgtttactcccctgtatatcacactgatctacgacctgctcagcggacgtaagctgcgctggggctatctgctgagtgccgcgctggcggtgctgggggcggcgattatccgctatgacaaagtcagcgatcatttctggaccgggctgttactggtacagctgtcaaacctctgcttcgccatcggtatggtggggtataagcgtctgatggaggtgcgtccgatgccgcagcacaatgcctttgcctggttctatgtcggggcctttatcgtggcggtggcggcgtggtttatgctcggcaacgcccagaagctgccgaccaccacgctgcagtggagcgtgctggtgtggctcggcgtggtggcttccgggctgggttactttatgtggaactatggcgccacccaggtggatgccggcacgctggggatcatgaataacgtccatgtccccgccgggctgctggttaaccttgccatctggcaggagcagccgcactggccgagctttattagcggagcgttggtgatcctggcctcgctgtgggtccatcgccgctgggtcgctccgcactccggacaaacggcagatgatcgcaggcgtggttccgcgcagagcgaataa

SEQ ID NO: 135805 - DNA, 801 bp, Enterobacter cloacae
atgtaccaggttgttgcgtctgatttagacggcacgctgctttcccccgatcatttcctgaccccgtatgccaaagagacgctgaagctgcttaccgcccgtgggatcaatttcgtcttcgccaccggccgtcactacatcgacgtcgggcaaatccgcgataatctcggcatccggtcgtacatgatcacctctaacggcgcccgcgttcacgatagcgatggtcagcaaatctttgcccataacctcgatcgcgatattgccgccgacctgtttgagatcgtgcgtaacgacccgaaaatcgtcactaacgtttatcgggaagacgagtggtatatgaaccgccatcgtccggaagagatgcgcttcttcaaggaggcggtgtttaactacaagctgtatgagccgggcgaactggatccgcaggggatcagcaaagtattctttacctgcgaggatcatgagcatctgctgccgctggagcaggcgatgaacgcccgctggggcgatcgggtgaacgtcagcttctccaccttaacctgcctggaagtcatggcgggtggggtatcgaaggggcatgcgctggaggcggtggcgaagatgctcggctacactctttccgattgcatcgccttcggcgacggtatgaacgacgctgagatgctgtcgatggctggcaaaggctgcatcatggccaacgcccaccagcggctgaaggatctgcatccggaactggaagtgatcggcagtaacgccgacgatgctgtcccccactacctgcgtaagctatacctcgactga

SEQ ID NO: 135806 - DNA, 993 bp, Enterobacter cloacae
atgtttgggcagaaaaaggactgggaaacacgagaaaacgcgtttgcggcctttagcatggggccgctgacggatttctggcgacagcgcgaagaagctgaatttaaaggcgtcgacgatgtaccggtacgctttgtccgcttttgcgcgcaacataacgatcgtctggtgttgatttgccccgggcgcattgaaagctacgtgaagtatgctgaagtggcctacgatctctttcactgcggctttgacgtgatgatcattgaccatcgcgggcagggacgctcgggccgcctgctctcagatacccaccgcggacacgtggttaacttcagcgactatgttgatgacctggccgcgctctggcagcagcaggtggttcctggacactggcgaaaacggtttatccttgcccattctatgggcggagcgattgccacgctttttctgcaacgttaccgggcgcattgcgatgcaatagcgctctgcgcgccgatgttcgggattatcattcggctgccggactggatggtgcgccatattctcgactgggctgagggccatcagcgcattcgcgaagagtatgccatcggcaccgggcgctggcgggcgctgccttttgccgttaacgtgctgacgcacagtcggcaacgctatcgtcgcaacctgcgcttctatgccgatgagccgcggctgcaggtcggcggtccgacctggcactgggtgcgtgagggcatgctggccggcgacgaagtgctggcgaatgtggaaaaagataccgccccgacgctgcttttacaggcggaggaggagcgggtggtcgataatctgatgcacgaccgctattgcgaattacgggccgctgccggccatccttgtgagggcggtaagccgctcgtcattgaaggagcatatcatgagatcctttttgaaaaggacgctatgcgctcagtcgcgctcaatgccatcgtcgagtttttcaatcgacatacttaa

SEQ ID NO: 135807 - DNA, 627 bp, Enterobacter cloacae
  misc_feature (585)..(594): n is a, c, g, or t
atgaccattgagtggtggttcgcctacctgctgacatcaattattctcagcctgtcgccgggttccggagcgattaataccatgaccacctccattaaccacggataccgcggcgcggcggcgtcgattgccggtttgcagaccggcctggccattcatatcgtgctggttggcgttggtctcggcactctcttctcccgctcggtgctggcctttgaggtgctaaaatgggccggcgccgcctacctgatctggctgggtatccagcaatggcgggcggcaggggcgatcgacctgaatacgctggcgaaggcgcagacgcgcggcaaactgttccagcgcgcggtgttcgtaaatctcaccaatcccaaaagcattgtttttctggccgccctgtttccgcagtttatcctgccgcaccagccgcaggtgatgcaatatctcgttctgggcgtcaccaccatcgtcgtcgatatcattgtgatgattggctatgcgaccctggcgcagcgcatttccgcatggatcaaagggccaaagcagatgaaggcgttgaacaaagtctttggttcactgtttatgctnnnnnnnnnnctctctgcgcgagccggcgcgcaaagtgggtaa

SEQ ID NO: 135808 - DNA, 921 bp, Enterobacter cloacae
atggcggaaacggcgacccctcatgatgcggtatttaaaacttttctctcacgggtagagacggcgcgcgattttatcgagctccacctgcctccgtcgttaacacagatctgcaaactggacaccctgcgtctggaatccggcagctttcttgaagacgatctcaggccttactacagcgatatcctatattcgctggaaaccacccgcggtgcgggctatgtccatgttctgatcgagcaccagagcgcacccgataagctgatggcctttcgcttaatgcgctatgccatcgccgccatgcagcggcacctggagagcggccataaaacgctgcctctggttatccctattctcttctatcagggacgacgcagcccctatccctggtcgatgcgctggctggataattttgccgatcctgagaccgccagccagctgtatagcggggcgtttccgctggtcgatatcacggtgatccccgacgacgacatcatgcagcaccgcagcatggcagccctgacgctggtgcaaaagcacatccgccagcgcgatatggcgcaattgctggataagttgacccacctcttaatgctggagcagatgagcggacaacaaatcaccgtattggtaaactatatggctcaggcaggggatgccgaagatactcggacactcttgtacgggctggcacagcgcgtgccgcagcatggaggattactgatgacgctggcggaaacatggcttgcagaaggtatggagaaaggcatcagggaaggcgtacagcaaggcataaaagaagggaaacaccaggctctggtgcaggttgccgaagcgatgcgcaatcgcggtattgatgaccagtcgattatggaaatgaccggtctgtctgaagacgagctgcagcggcttcgccactga

SEQ ID NO: 135809 - DNA, 621 bp, Enterobacter cloacae
atgctgatgcttttcctcaccgtggcgctggtgcatatcattgcgctgatgagcccggggccggactttttctttgtctcacaaacggccatcagccgctcgcgaagagaggcgatgatgggtgtgctggggatcacctgcggcgtcatggtctgggcgggagtggcactgctcggcctgaacctgatcctcgcccggatggcgtggctgcataacattataatggtcggcgggggcctgtatctatgctggatgggctaccagatgctgcgtggcgcgctgaaaaaagagaaggtggcctcggcggagccgcaggtggagctggcccgcagcggacgcagcttcgtgaagggattgctgaccaatctggcgaatccgaaagcgattatctacttcggctcggtgttttcgctgttcgtgggtgacagcgtcggcgccggcgcgcgctggggcattttcctgctgattatcgttgagacgctggcctggtttatggtggttgccagcctgttcgccctgccggggatgcgccgcggctatcagcggatggcgaagtggatcgacggtatcgccggtacgctgtttgcgggcttcggcatccacctgattatctcgcgttaa

SEQ ID NO: 135810 - DNA, 819 bp, Enterobacter cloacae
atgctgttttacgatccggcggatatggcgtggctgcgccgctgtctggaagaaaaacccgccgggccgctacaggatatcgaacggcataagctgaatgcgatgggggcgtttgccgaagcgcagacctgtcgccgtctggtgctgctgaactattttggcgaagggcgtcaggagccgtgcggcaactgcgatatctgtcttgacccgccaaagcagtacgatggcttaatggacgcccgcaaggcgctttcaacgatttaccgggtcaatcaacgtttcgggatgggttacgtggtggaggtcctgcgcggggccaacaaccagcgcatccgagagatgggccacgataagctgccggtttacggtatcggtcgggagcaaagtcacgagcactgggtgagcgtgatccgccagctgatccaccttgggctggtgacgcagaatatcgcccagcactccgcgctgcagctgaccgaagccgcgcgaccggtgctgcgtggcgaagtgccgctgcagctcgccgtgccgcgtatcgtggcgctgaagccaaaggcgatgcagaaatcctttggcggcaattacgaccgtaaactgttcgccaagctgcgcaaattacgtaaagcgatcgccgacgaagagaacatcccgccatatgtggtcttcaacgacgcgacgcttatcgagatggccgaacaatcgccgctgaccgccggcgaaatgctcagcgtcaacggcgtggggacacgcaagctcgagcgtttcgggaagccgtttatggcgctgatccgggcgcatgttgatggcgacgatgagtag

SEQ ID NO: 135811 - DNA, 351 bp, Enterobacter cloacae
atgctggttctcggctggcaaatgagaatagaaatgaaaatcctgcttaactggtcgccattgcgccagctcttcacttacattcaggagcgctttacctttctggtgctgctctgctggcctgcgattatctggttgttctgccgggtcggcgtgtggctcaccgataacgtttatgaactgctgggaaaatcacccgcgcagtccttcaccgtgtatctgcagccgtttatgacccccggcacgctgctgcgcatctccatcagctgggtggtgttgctgttcattctcttcagtatggcgatggccttcacctggggtttacgtcgctttatgaatcgccataaataa

SEQ ID NO: 135812 - DNA, 1125 bp, Enterobacter cloacae
atgcgcggattacgcaatatttataatcttggcgtcaaagagctgcgcagcctgctcggtgataaagcgatgctggcgctgatcgtgtttgcgtttaccgtgtcggtgtactcctcggccacggtgatgcccggttcgctgcacctggcgccgatcgcggttgctgatatggataaatcacagctctcctcacgcattattaacgctttttaccgtccctggtttcttgagccggagctgatcaccgctgatgagatggacgccgggctggatgccgggcgctacacgttcgccatcaacatcccgcctaacttccagcgcgatgtactggccggtcggcagccggaaatccaggtcaacgtcgacgccacgcgcatgagtcaggcctttaccggcaacggttacatccagaatattatcaccggcgaagtaaacagttttatcgcccgctatcgggataacagcgtgctgccggtagagctggcggtcaggatgcgttttaatcctaaccttgagcaggagcgctttggcgcggtgatggcgatcatcaacaatatcaccatgctggccattgtcctcaccggttcggcgctgatccgcgagcgggaacatggcaccattgagcatctgctggtgatgccggtcacgccgtttgaaattatgctggccaagatctggtcgatgggtctggtggtgctggtggtgtccgggctgtcgctggtgctgatggtgcaggggattttgcaggtacctattgagggatcggttccactgtttatgctgggggtggcgctcagcctgttcgccactacctcgatcggcatttttatgggcaccctcgcccgctcgatgccgcagctggggctgctgatgatcctggtcttactgccgctgcagatgctctccggcggatccacgccgcgagaaagtatgccgcagctggtacaggatattatgttgaccatgccgaccacccacttcgtcagcctggcgcaggcgatattgtatcgaggcgccagcttcgccatcgtctggccgcagttcttaaccttgctggctatcggcggagtgttctttactatcgcgttgctgcgttttcgtaagactatcggtgagatggcataa

SEQ ID NO: 135813 - DNA, 2745 bp, Enterobacter cloacae
atgaaactaacgccgcaggatacctcgccccccgtcgccctgctggaacacgttggtcagcagtttggcgccaccatcgcgctgcgcgatatcagtctggcgatcccggcacggcgtatggttggcctgattggcccggacggcgtcggcaaatcgagtctgctctcgctgatcgccggggcgcgggccattgaacagggtaacgtgatggtgcttggcggcgatatgcgtgatgtgcatcaccgccgcgacgtgtgcccgaaaatcgcgtggatgccgcaggggctggggaaaaacctctatcacaccctctcggtgtatgaaaacgtcgacttcttcgcccgcctgttcggccacgataaagccgagcgcgaactgcgcatcaacgagctgctgcagagtaccgggctggcgccgtttcgcgatcgccccgccggaaaactctccggagggatgaagcaaaagctcggcctgtgctgcgcgctgatccacgatccgcagctgctgatccttgatgaaccgaccaccggcgtcgatcccctctcccgggcgcagttctgggagcttatcgacagtattcgccagcgccagccggcgatgagcgtgctggtgaccaccgcctacatggaagaggccgagcgctttgactggctggtggcgatgaacgccggcgaggtgctggcgaccggcagcgccgcagagctcaaagcccagaccggcagccagaccctggagcaggcgtttatcgccctgctgccagaagcacagcgtcgggcgcatagggcggtagttatcccaccgcgcgacagccgtgaggaagagatcgccatcgaagcgcgcggcctgaccatgcgcttcggcaactttgttgccgtcgaccacgttaatttccgcatcgcccgcggtgaaatcttcggcttcctcggctccaacggctgcggcaaatccaccaccatgaagatgctcaccggcctgctgcccgccagcgaaggtgaagcctggctgttcggccagccggtcgacccgaaggatatcgccacccgccagcgggtgggctatatgtcgcaggccttctcgctctatagcgagctgaccgtccggcaaaacatcgagctgcacgcccgcctgttccatattccggacggcgaaatccccggccgggtggcggaaatgtgcgagcgctttatgctgaccgaggttgaagacgcgcttcccgccgatctgccgctggggatccgtcagcgcctgtcgttagcggtggcggtcatccatcgcccggagatgctgatcctcgacgagccgacctccggcgtcgacccggtggcgcgggatatgttctggcagctgatggtagacctcgcgcggcaggatcaggtgaccatttttatctccacccactttatgaatgaggcggaacgctgcgatcgtatctccctgatgcacgccggcaaagtgctggccagcgatacgccgcaggcgctggtcgagcagcgcggttcaaacagcctggaagaggcgtttatcgcctggcttaaagaggcccagccgtcctctccagtaccagaagaacccacgtctgctgtggcatcgcattccggacatacggctccacggcaggccttcagtcttcgccggctgtttagctatagccgccgcgaggcgctggagctgcgccgcgatccggtacgatcgacgctggcgctgctggggacggtgatcctgatgtttatcatggggtatgggatcagcatggacgttgaggatctgcgctttgccgtcctcgaccgcgatcaaaccctcagcagccagggctggtcgcagaacatagccggttcacgctactttatcgagcaggcgccgctgcacagctatgacgaactggaccgccggatgcgcgatggcgagctggcggtggcaatagagatcccgccgaactttggtcgcgatatcgcccgcggcacgccggtgcaaatcggcgtgtgggtggacggcgcgatgcccaaccgcgcggaaaccgtgcgcggctacgtacaggcgatgcatctggcctggctgcaggagatggccggccggcagagcagcccgcagcgcgatacctcgctcatctccatcgagacccgctatcgctacaatccagatgtgaagagcctgccggccatcgtcccggcggtgatcccgctgctgctgatgatgatcccggcgatgctcagcgccctgagcgtagtgcgtgagaaagagctcggatcgattatcaacttgtacgtgacgccaaccacccgcagcgaattcctgctcggcaagcagctgccttacatcgtactggggatgtttaacttcttcctgctgtgcgcgctgtcggtctttgtctttggcgtcgcgcataaggggagtttcctgacgctgaccctggcggcgctgctgtatgtcaccatcgccactggtctggggctgctgatctcaacctttatgaagagccaaatcgccgctattttcggtaccgcgattattacgctgatcccggcaacccagttttccggaatgatcgatccggtggcctcgctggaaggtcccgggcgctggattgggcaaatctacccgaccagccacttcctgactatcgcccgcgggaccttttcgaaagcgctgaatattagcgatttgtggggcgcattcattccgctactgattgcggtgccgctggtgctcgggttgagcgtgctgctgctgaagaaacaggagggatga

SEQ ID NO: 135814 - DNA, 1005 bp, Enterobacter cloacae
atggacaaaataaagaaacgttgggcagggtattttgtcggcttactggtggtgctcgccgccgccgcatggtggctgctgcgcccgccgggactcccggcggggtttgccagcagcaacggccgaatcgaagccaccgaagtcgatattgccagtaaaatcgccgggcgtatcgacaccattctggtcaaagagggtcagttcgtgcaccagggagaggtgctggcgagaatggatacccgggtactgaacgagcagcgtcttgaagccgccgcacaaatcaaggaggcggaaagcgcggtcctggccgccagagccttgctcgatcagcgacaaagtgaaatgcgcgccagcgaagcggtagtaaagcagcgtcaggcggagctggattccacggcgaaacgccatgttcgctccaacaccctctcccagcgtggcgccgtctccgcccagcagctggatgacgatcgcgcggccgcagagagcgcccgcaccagcattattcaggcgcaaacccgcgtcgaagccgcccaggcgaccgagcggcggatcctcgccgatattgacgatagcgagctgaaagcccctcgcgacggccgcattcagtatcgcgtcgctgagccaggcgaagtcctggccgccggtggccgggtactgaacatggtcgatctcgccgatgtctatatgaccttctttctgcccaccgaacaggcaggtctgctggcgctcggcagcgaagcgcgcctggtccttgatgccgcgccggatctggtgatcccggccaatatcagctttgtcgccagcgtcgcccagttcacgccgaaaacggtcgagaccagcgacgagcgcctgaagctaatgttccgcgtcaaagcgcgtatcccgccggagttgctggcgcagcacctggagtatgtcaaaaccggcctgcccggtatggcttacgtacgactggataaacaacaaccctggcctgaagccctggcggtgaggttgccgcaatga

SEQ ID NO: 135815 - DNA, 1008 bp, Enterobacter cloacae
atgaaccatccacaaaccatcctcaccggcgaccgcccgaccggccaacttcatcttggccactacgtcggctcgctgcgccagcgcgtcgcgctgcagcataaccaccagcaatttatcctgatcgccgacctgcaagggctcacggacaacggcagcaatccgcaaaaaatcagccaccatatactcgaagtcatggccgattatctggccgtcggcatggacaccaggctcaccactatttgcctgcagtccgccctgccggcgctggcggagctcagcgcgctgtatatgaatatcgtcaccgtcgcccgcgtagaacgtaatccgacggtcaaaaatgagattgcccagaagggattcgcccgctcgctgccggtgggttttctcgcctatccgattagccaggcggccgatatcaccgcgttcaaggccgaactggtgccggtgggcgacgatcagctaccgatgattgagcagaccaacgagatcgtccacaagatgaatagcctcaccggcgagccggtgctgcgccactgcaaggcgctactcagcgaagtgagtcgcctgccgggcgtcgatggcaacgccaaaatgtcgaaatcgctgggcaatacgctgacgttatcggccacagaggaggagatccaccacgcggtcagcgcgatgtataccgacccgacgcacctgagagtcagcgatccggggcatgtcgagggcaacgtggtgtttacctatctcgatgcattccacagcgataaggcgcgggtggcagagatgaaaacccactatcagcgcggcgggctgggcgatcgccagtgtaagaatgagctggagacctgcttgcagacgctactggcgccgatccgcgaacgcagggccacttttattcaggataaagggatgctgctggagctgctgcgccagggcagcgaacgcgcccaccacctcacacagcagacgctgcatgaggtgaagcgtgggctgggtctgccggtgctgttctga

SEQ ID NO: 135816 - DNA, 984 bp, Enterobacter cloacae
atgcataaacgtctggtcgttaatattttttcatccttgctgttgggggctgcgcttatttccgcgccggtatatgcggcggaaaaaaccgtagtcaatatttcaaaagtggacggcatgccatggtttaaccggatgggtgaaggggtagtccaggccgggaaagagtttaacctcaacgcctcccaggtagggccgtccagcaccgatgcgccgcagcaggtgaaaattattgaggacctgattgcacgtaaagtggatgccatcactatcgtgcctaacgatgccaacgtgctggagccggtattcaaaaaagcccgtgacgccggcatcgtggtactgaccaacgaatcgcccgggcagccgagcgccaactgggatgtggagataatcgataacgagaagttcgctgctgaatacgtggagcatatggccaagcggatgggtggcaaaggcggctacgttatctatgtcggtagccttacggtaccgcagcacaacctgtgggccgatctgctggtgaaataccaaaaagaacattacccggacatgcatgaagtcacccgccgaatgccggtggcggaaagtgttgatgattcccgccgtaccacgctcgatctgatgaaaacttacccggatctgaaagcggtggtctcttttggttcgaatggcccgattggcgcggggcgcgcggtgaaagagaagcgtgcgaaaaataaagtcgcggtctacgggatgatgatcccctcgcaggcggcctctcttattaagagcggcgatattactgaagggatcacctacgatccggcgacagccggctatgccctcgcggccgtcgccagcaccctgctgaacggcaaaaccattgagccgggatttgaactgaaagagctcggtaaagcggaggtcgatagcgacaagcatattatccgcttccataaagtgctgctggtaaataaagacaatattgattcgctctactaa

SEQ ID NO: 135817 - DNA, 1485 bp, Enterobacter cloacae
atggaacctttcctttcccttcgacacgtcagcaaaaccttccacgccaaccgcgcgctcaatgatatcagcatcgactttatgcccggagaagtgcactgcctggccgggcagaacggttgcgggaagtcgacgttgatcaaaattatctctggcgtctatcgcccggatgagggcgcagcgatgacgctgggcggcaagacgtggcccaaactgacgccagcggcctctgtcgcccatgggatccaggtgatttatcaggatctgtcgctgtttcccaatctcagcgtgtgggagaacattgctataaaccactatcatcgcggcgtgctggtgaggcgcagcgaactgcgacgcagtgcggagcaggcgatgcgcagtattaacgtctcgctgccgctggatgccgccgtggaatcgctctccatcgctcgctgtcagctggtggctatctgccgcgcgctggcgcaggatgcccggcttatcattatggatgaacccacggcctcattgacccatcaggaagtggagggactattgcatgtggtgcgccagctgcgtgagagggggatctgcatcgtcttcgtaagccaccgtctggaagaggtcatggccgtatcggaccgcatcagcgtgctgaaggatggcaatctggtcggcaccatgccggcggcagaggtaaccacccgccggctcggttttctgatgacgggccaggagtttgactatcaggtgcgcgatctgtggcaggggcagggcagtacgccggtgctggaggtgcgcaatctcacccgcaagggggaatatcataacgtctccctgaaggtcgaagccggagaagtggtgtcgatagtcggcctgttgggcgccgggcgaacagagctgtgcctgagccttttcggcatgacccgccctgacagcggcgagatcctgataaatggccagccggtgcggttgcgtagcaatcaggacgctatccgccacggtatcggctatgtctccgaggaccgtatgtcgcgcggcctggtgatgagtcagtcgattgaaaacaacattatcagcaccgtgttttataaagtgaaaggcgcttgcggactattgagtgatagtaaagctcagcagctggtcgcaagaatggtcaacgcgttgaccattaaggcgccggatacgcatctgccggtgaataccctctccggtggtaatgcccagcgcgtttctattgccaaatggctggcgatctctcctaagctgctgatcctcgatagcccaaccgtgggggtggatatcgcaaacaaagccgggatctatcatatcatcagcgatttggctgcccatggtatcgccgtgctgatgatttgcgacgagattgaagaggcgtggtaccagagtcatcgcatcctggtgatgaagcagggcgagttgacccatagcttcctgccggacagcagtacccagcagcagatagcggaggtggtcaatggctaa

SEQ ID NO: 135818 - DNA, 972 bp, Enterobacter cloacae
atggctaatctgttgaaacgacatgaattctggttaggcatgttcattattgcgctgtgcctgctgctgggctggcgcagtgaggaatttttcactttcggcaatctttacgacctcgctaataactatgcgatgctgaccattctcgcctgtggtctgttcgtggtgctgatcgccggcgggattgatatctccttcccggctatgaccattatcgcccagtacggcatggtggtgatgctgcaaaaagtaggcggcaacttcgcggtggcttttgtgcttgccggcggcatcggcgtgctgctggggctggtgaacgcgctgttggttaatcgtctgcgggtgccctcgatcattatcaccatttctacgctcaacattttctacggtttgctgctgtggttaagcaaaggtgtctggctctacgacttccctccgtggtttgaaaagggggttatgctgttcaaatataccgatgccgatggttacgattacggcctggggctgccgctgctgacgatgatcgccgtggtgctgttgaccgcgtttatcatgaatttcaccaccgttggccgcaagatctatgccatgggcggcaaccgggaatccgccagccgcgtcggcttcagcgtgctccgcctgcagctgttcgtttatggctatatggggctaatgtcgggggccgcaggtgtcgtgcaggcgtggacagtgatgaccgttgcgccggattcactgctgggctatgagctgacggtgctggcggcggtggtgctgggcggcaccagcctgattggcgggcgcggaactctcaccggtacgctgctgggggtgattttactggcggtgatgcagaacggcctgaacctgctaggggtctcctcctactggcagaccctgatcactggggcgatcatcgtcgtcagcatcagcgtaacggcatggagccagcatcagaaccggagcttgttatga

SEQ ID NO: 135819 - DNA, 957 bp, Enterobacter cloacae
atgaaaaaatcgtggcgcaacaacgttgagttttacctgatcggcctgctgctgctgatggttatcgcctttagcatcgccatgccaaacatcttctggtctgtcagcaatttccagtcgattgcctcgcaaatgccggtgctggggatcctggcgctggcgatggccatgactatgctttgcggcggcattaatttgtcaattatcgcgacggctaacgcctgctcgctggtgatggcctgggtggcgacgagctatccgcctgggggcgctaccgcgctggcgacgctgctggccggcggaggggcggcgatgatcattggcctgtgcaacgggatattgatcgccgggatccgcgtttcaccgatcctggctacccttggcatgatgaccctgctcaaagggataaatattctgatcaccggcggcagcgccatcgctaactatccgcagtgggtgctgtggctgaatcacgcccagtggttcggtattccgctgccaatgtggctttttgcggtggtggcggccgggctgtgggtgctgctggagaaaagcccgctggggcgggcgatcatgttgatcggatccaacgaacgggcgacccattattccgggatcaatacccggcgggtgttgatgtgggtatatgtcatctcggccctgctctgcgcggtggctgcgtttctgatgatgtcgaagctgaactcagccaaagcatcttatggggaatcgtatttgctggtgtcgatcctcgcggcggtgcttggcggcgtgaatccggatggcggtagcgggcgcatcgttgggatggtgctcgcgctgttcctgctgcagattattgagagtgggttcaatatcctcggtatcagcccctatctgacgatggcgctgtggggcgtattgctgctgtgctttatccaggcgcgaggcatgctgggactggagagagccgggtaa

SEQ ID NO: 135820 - DNA, 783 bp, Enterobacter cloacae
atgaaagtactgctgatttacgcccatccggaaccgcgctcgctcaatggcgcgctgaaaaatttcgccatccgccatctgcagcaggccgggcatgaagtgcaggtttccgatctctacgccatgcgctggaaggccgggtatgacgccgatgacagcggcgccccgccggtcggcgagttctggcggccgaccctcgattccaaacaggcctttgcccagggcacccaaagtgcggatatcgtagccgagcaggaaaagctgctgtgggccgatacggtgattttccagttcccgctatggtggttctcgatgcccgccatcatgaagggctggatcgacagggtgtacgcctggggctttgcctatggcgtcggcgagcacagcgaccgccactggggggatcgctacggggaaggcactttcgtcggcaagcgggcgatgctgatcgtcaccgccggcggctgggcggaacactattcaccgcgcgggatcaatggccccatcgacgacatcctgttccccattcagcacggtatgctgttctaccccggctttgaggtgcttccgccgctggtgttctaccgcacggataaaaccgatgccgggcagttcgccgatcagtgcgccgccctggccgagcggctggacacgctgtggcaaaccgagcccattccattccgccgccagaatcatggcgattatctgatcccgtcgctgacgctgcgcccggagctggcgccagggcaaagcggcctggcggtgcatttgcgtagcgaataa

SEQ ID NO: 135821 - DNA, 909 bp, Enterobacter cloacae
gtgattaatttacagcgtctggatctcaatctgttgcgcaccctggatgtgctgcttagcgaaaacaacgttacccgggcggcgcagcggctgaatctgtcgcagccctcggtcagcattcagctagccaggctgcgggagattttcgccgatccgctgctgatgccgggcccgcgcggcatgcagcccaccgcccgcgccgatgagcttcgccagccgctgcgcgccgcattagccgcgctggagcaggcggtggcgccggtcagcccttttgatccggccacggcggcggagacctggcgggtggcggcgacggactatatggcctcggcgatcctcctgccgatgctggctgggttacgccaggcctctcccggcagtcggctggcggtattcgagctgcagcctgcgcggctggagcagcaggcggccaacgatacagtagatcttttctttcatacccgcgagggcgcgccgccggggctgcatcagcgcctgctgtttcgcgaacgctacgtgctggctggccgggcggaacattcggcgctgcggcctgggcttagcctggaaacgttctgtcagctggagcacgtgatcgtctccccggacgggggcggcttcagcgcggcgaccgatatcgcgctggcgaacctcggactgatgcggcgggttgtcctttccgtgccacatttcctgtttatgctggagaccctgcgcaatagcgatctggtggcggtcctgccggagcggctggtgcgcgggcagagcgggctggtggtcgtcgagccgccgctggcggtcgccggctttgagatgctgatgctgtggcacgagcgctggcaccgcgacccggcgcatcaatggctgcgtcagttcattgtgaattcactggaggaacagacatgctga

SEQ ID NO: 135822 - DNA, 420 bp, Enterobacter cloacae
atgctgagtggactgaatcacctgaccctggcagtcagccagctggcgccgagcgtggcgttttatcagcagctgctgggcatgacgctgcatgcccgctgggacagcggggcttatctctcctgcggcgatttgtggctgtgcctgtcgctggatccgcagcggcgcgttactccgccggaagagagcgactacacccattatgcgtttagtattagcgaagccgattttgctagcttcgccgcccgccttgaggctgccggcgtggcgatctggaagctgaaccgtagcgaaggtgcctcgcactatttcctcgatcccgatggccataagctggagctgcacgtcggcagtctcgcccagcgtctggccgcctgccgcgaacagccgtataaggggatggtgttttttgatcagtga

SEQ ID NO: 135823 - DNA, 1413 bp, Enterobacter cloacae
atgacccgctaccaacatctcgctacgctgctggccgaacgcatcgaacagggcctgtatcgccatggcgaaaagctgccgtcggtgcgcagcctgagccaggagcacggcgtcagcatcagcaccgtccagcaggcctatcagctgcttgagcagcagcagatgattgtgccgcagccgcgatcgggctatttcgtcgccccgcgcaaagcccagccgccggtgccgccgatgtcgcgtccggtccagcgcccggtggagatcacccagtgggatcaggtgctgaccatgcttgacgcccgctacgataaatcgatcatcccctttgggggtggctcgccggacgtgacgcagccaagcctgaagcccatctggcgtgaactgagccgggctatccagcacaacctcactgaggtgttgaactatgacgagctggccgggcgtcgcgagctacgggagcagatcgcccgcctgatgctcgacggcggatcggtggtaactgccgacgatctggtgctcaccagcggctgccacagcgcgctgtcgctggccctgctgtcggtgtgccagccaggggacatcatcgccgtggaatccccctgctactacggcaccatgcagatgctgcgcgggctgggattaaagaccattgagatccccaccgatccggaaaccgggatcagcatcgaggccctggagctggcgctggatcagtggccgatcaaaggggtgatcctcgtgccaaactgcaataaccctctgggctttatcatgccggacgcccgcaagcgcgcggtgctgaaccttgcccaacgctacgatatcgttattttcgaagatgatatttacggcgagctggccaccgaatacccgcgcccgcgcacgatccactcctgggatatcgacggccgggtgatgctctgcagctcctttaccaaaaccatcgcccccgggctgcgtatcggctggatcgcccccgggcgctactacgacaagctgctacagatgaagtacgccgccagcgggaccaacgtcccctccactcagctggcggcctgcaattttattcgcgaaggccactaccaccgccacgtgcggcggatgcggcagatctatctgcgcaatatcgagatctacacctgctggctgcgggaatttttcccctgcgggatctgcgtcacccggccgaagggcggttttatgctgtgggttgagctcccggagcaggtagatatggtctgcgtcgccaagcagctgtgccggctgaagatccaggtcgcgccgggctcgctgttttcggcagcgggcaagtatcgcaactgcgtcaggatcaactgcgccctgccgccgaccgagaaacataaagcggtgatggtgaagctgggagaagcggtgaaggtggcgatggagtga

SEQ ID NO: 135824 - DNA, 165 bp, Enterobacter cloacae
atggaatttcacgagaacagggcaagacagccatttatcggtttcgtactgctggtgcggtttatcaaaaaatggtggcttcaggagcaaacgcgcagagttttgcagcaaatgagcgacgaacagctgaaagatatcggcctgcgtcgggaccagatcaattaa

SEQ ID NO: 135825 - DNA, 465 bp, Enterobacter cloacae
gtgactgaagacgaactgtttgcccgccgcccgctggggatgcggatggctatggtggtgcgccagtggcgcgccattattgactccgctatcaccgataccggactcacccagtccagctggacggtgctgatgcaactgcatcagctgggagacaacgtctcggtcagcgaactggcggaggtgcagggcattgaactgccgccgctaatgcgcaccctctcattactggaaaagcagggctatctggtgcgttccacatcgccatatgacaaacgcattcgcctgctgacgctgaccgctgaggggcgggctattctggaaaaactgagctgcgtgatcgagacctatcaggagcgcgtaacccagaccatcccggaggccgatctcgccaccttcagcgccacgttaaatcaaatcgcctgccgtttgcggaatatccgcgaagaagataacaagatctaa

SEQ ID NO: 135826 - DNA, 1068 bp, Enterobacter cloacae
atgatgacgcctgaacaaaaatttgcccgctgggtacgggtgagtattgccgcttttctgggaatattcgcctggtttatcgttgccgatatctggatcccgctgacgccggactccaccgtcatgcgcgtggtgaccccggtttcgtcgcgggtctccggctatgtctcgcacgtctacgtgcacaacaacagccaggtgaaaaagggcgacctgctgtatgagctcgacccaacgccattcattaataaagttgaagcggcgcagatcgccctcgagcaggcgaaactgagcaaccagcagctggacgcgcaaatcgccgccgcccgcgccaacctgcgcaccgcgcagtacaccgcgcgtaacgataaggtcacgctcgatcgctaccagcgcttgagtacgatgcagaacgtctcgcagtccgacctcgataaggtgcgaaccacctggcagaccagcgagcagtcggtctcggcgctgaacgcgcagatccagaacctgctgatccagcgcggcgagcgcgacgataagcgcaacgtcaccctgcaaaaataccgtaatgcgctggaggaggcgcagctgaacctggcctggaccaaagtgcgtgcggaaactgacggcatggtcagcaacctgcagctgaacccggggatctacgccaccgcggcgacggctgtgctggcattggttaacaacaacactgacatcgtcgccgacttccgcgaaaaaagcctgcgccacaccgcggtgaataccgatgcggcggtggtctttgacgccctgccgggtcaagtcttcccggcgcacgtgaccagcagcgacgccgggattctggcgggacaggaggcggtgaacggccagctgtcgcagcccgagcagtccacccgctgggtgcgcgacgcccagcggatgcgcattcacgtcgcgctggatcagccgctggacaaaccgctgccgaccggcgcccgcgctacggtgcagctgtacaatagcgagggacctttcgcccgcaccttcgccggcctgcagatccacctggtgagctggttgcactatgtctattaa

SEQ ID NO: 135827 - DNA, 1065 bp, Enterobacter cloacae
atgtctattaataccctggcgcatgtctttaccccgcacggcaatatcgtctacacggcgaatgattttcgccagacggtacgtatcgccgtggccgggaccattgcgctcagcatctccaccttctacgacgtacagtacggcgtatttttcgtcgtttatccgctgatgctgatgtcgctggtaccgatgttcaacctgcacgtcgcccgccagtttatatttagcgcggcggtaaactgtgtcgaaatggtgctaattgtcggctatttgtcgcagtggccggtgatcatgaccctggtggtgtttgccctgtacgtgatgcgtttccgctttatgagccagggaccgctgttcctgttgggatcgatgggggtggtgtgccagagcacgatgctcaactttatgagctatcccaccagcaactggcacaccctgatgttctccaatatggaagcctgcgtgatggccgtggcgctgagcgcgctgctgcattacctgatcccggacgtcgaaccgcgcaagccgccgccgcggattgagaaagacgccgcccgcatccgtcatgagtcgctgctctccggtacggtagcgacgatcatctttgtggtgtttcagatctgcgatctcagcgactcgctgtcggcgctgatggccgggatcctgatcctgttcccgatgcactatcgtggggcggtgatcagctcgatctggcgcgtcgtcggggtggtgctggcctgtctctatatactggtggtgcagctgattatctatgatttcagcaaccacatgatcctgatgatgccgctgattggtctcgggctggccttcagcgcccgcctccacgtgatggagaaagtgggcgccggggtgggcttcgccagcatcactaccatcggcattatgttcggccagaatttgcatccgtatcaggatctggtgttcagcgatctgtaccgcatcacctcggtgacggtctcgctggtggtgacgctgaccctggtttttctcatgcaccgcctgctgaactgtttcgcggcgacgcgttttgtggtgagcgattaa

SEQ ID NO: 135828 - DNA, 255 bp, Enterobacter cloacae
atgacaacgtttctgtttttatttcactccacggtgggggtggtgcggatgcgcaaagccctgcaggcggcgggagtggccttcgaggtcaaagatataccccgccagctgcgcagcggctgcgggctgtgcatcctgctggaggggacggaagccgatgcgcgaggctggatcgtcccggaacagacggcggcgctgtatcagcagaacggggaagcatggcgctgtctcgccaccttcccacctgcaggttaa

SEQ ID NO: 135829 - DNA, 753 bp, Enterobacter cloacae
gtgaactatacggttggcattgattccggctccaccgccacaaaaggcatcctgttggcggacggcgtcatcgtgcgccgcttcctctgccccaccccctttcgccccgccgacgccatccacgaggcctgggagacactgcgcgctggcctcatggagacgccttttttaaccctcactggctatggccgccagctggtggattttgccgataagcaggtgacggagatctcttgccacggcctcggcgcccgcctgctggcgccggacacccgcacggtgattgatatcggcggccaggacagcaaagtcatccagctggacgccgggggcaacctcagcgacttcctgatgaatgacaaatgcgccgccggcaccggccgctttctggaagtcatttcacgcaccctcggcgccagcgtcgaacaactggacgccattaccgacggcgtggaaccgcacgccattaccagtatgtgcacggtgtttgccgaatcggaggtcattagcctgcggtcggccggtgtcgcgccggaggtgattaacgccatggcccggcgcagcgcgaactttatcggccgcttatcggcgcaggggccgctgctgtttaccggcggcgtcagtcactgcgccgcctttgcccggatgctggaaagccatgtcggcatggcggtgacaacccatcccgacgcccagtttgccggggcgatcggcgcggcgctgatcggccagcgccagcggaggcgcggatga

SEQ ID NO: 135830 - DNA, 1152 bp, Enterobacter cloacae
atgtcgcttatcaccgatctacccgccatttttgaccagttctcagaagctcgccagaagggctttctcaccgtcatggatcttaaagagcagaacgtaccgctggtgggcacttactgcacctttatgccccaggagatcgccatggcggcgggcgccgttgtcgtctcgctgtgctcaacctccgatgaaaccatcgaggaagcggaaaaagatctcccgcgcaacctctgcccgcttatcaaaagcagctacggcttcggcaaaaccgataaatgtccctacttctatttctctgacctggtggttggggaaaccacctgcgacggcaaaaagaaaatgtatgagtacatggccgagttcaaggcggtccacgtcatgcagttgccgaacagcgccagcgatgccgcctcgcgcgcactgtggaaaacggagatcctgcgcctgcagcaggtgattgaggcccggtttggcacgccgattagcgaggcggcgctgcgcgaagccatcgtgttgaaaaatcgcgagcgccgggcgctggcccacttttatcgtctcgggcagctcaatccgccggcgctcagcggcggcgacatcctgaaagtggtgtacggcgccacttttcgtttcgacaaaaccgccctgattgatgaactgcatgccatggcggagcgcatccatcaggagtggcagcagggtaaacggctggaacctcgtccgcggatcctgatcaccggctgcccgatcggcggcgcggcggaaaaagtggtccgcgccatcgaggaaaacggcggctgggtggtcggctatgagaactgcaccggcgcgaaagcgaccgagcgctgcgtggcggaagagggtgacgtctacgacgccttaaccgataaatatctcgccatcggctgctcctgtatctcccccaacgaccagcgtctgcagctgctgagccagatggtggaggagtatcaggccgacggggtgatcgacgtcattttgcaggcctgccatacctatgccgtggaatcgctggcgattaaacgccatctgcgccaacagcatgatcttccttacatggcgattgaaaccgactattcgacagcggacctcggccagctcagcacccgcgtcgccgcctttatcgaaatgctgtaa

SEQ ID NO: 135831 - DNA, 240 bp, Enterobacter cloacae
atgaatgacattgaactcagccaggcgcagcgcgacctgctgcgcgacaggctcagcaagtactgcgcagagaccttcgacctcgaactggagcagtttgacgccgaatttttcgtcgactttatcgccaaagagctggggccgctgttttacaacgccggtatcgaagaggccatccgcacccatcaggcatggagcgagcgtatccaggaagagatggatttgaaaaaggtctattaa

SEQ ID NO: 135832 - DNA, 1242 bp, Enterobacter cloacae
atgatgcacaggatttcccactggctgagccgacacgccgccgcgctgttcttcccggcggcgttaattctgtatgatttttccgcttatctcactaccgatctgatccagccggggatcctgcacgtggtgcgggatttcaatgctgatgtggcgctggctccggcctcggtgagcctgtatatggccggcggcatggcgctacagtggctgctggggccgctctctgaccggataggacggcgtccggtgctgctcaccggcgcgctgattttcaccctcgcatgcctggcgaccctgttcaccacctccatgacgcagttcctgattgcccgcttcgtgcagggcaccagcatctgctttatagccaccgtcggctacgtcaccgtacaagaggcctttgaggaaaaaaggtcgatcaggctgatggcggtgatcacctccgtcgtgctggtggcgccgatcgtcggcccgctctccggcgcggcgctgatgcatttcattcactggaaagcgctgttcggcattatcgccgccatgggattggtggcctggctcggcctgctgttgaccatgccggagacggtgcgccgcggcgatgtgccgttcagccccctgggcgtgctgcgcgattttcgcaacgtctttcgcaaccgcatctttttactcggcgccgccacgctgtcgctgagctatattccgctgatgagctgggtggcggtatcgccagtgattttaatggacgccggcggactgaccaccagcgagttcgcctggagccaggtgccggtcttcagcgccgtcatcatcgccaacctgtcggtggcgcgctgggtaaaagaccccacccgcccgcgctttgtcctcagcgcggtgccggtacagatgctcggcctggccatcctgatcgttggcaatctggtatggcaccacgtttggctgtggtcggtgctcggcacctgcttctacgccttcggcatcgggctgattttcccgacgctgtttcgctttaccctcttttccaacgacctgccgaaaggcacggtctccgcctcgctgaatatcgtgatcctcagcgtcagcgcgttatcaattgaaggcgcgcgctggctgtggttccatggcggcagactccccttccacctgttggcggtggccgccgggattgtcgccgcctgctgcctggccggactgttacgccaccagcgcggacaagcggtgatcgaagcccggcagtcgtga

SEQ ID NO: 135833 - DNA, 1293 bp, Enterobacter cloacae
atgcttaagcatatggaaaaactcgctgaactgaaacgcgccaaactgctggcgctgtcgctgctgctgattgcagccgccatttttatcactaccctcgcgctaccaccgtcgccctgggtcggtgcgctaaaagctatttccgaagcggcgatggtcggggcgctggccgactggtttgcggtcgtggctctgtttcgccgtattccgctgccctttgtcgcccgccatacggcgattattccgcgcaataaagaccgcatcgccgacaacctcggccgctttgtcgaggaaaagttccttgataccccgtcgctggtcgcgctgatccgccgctatcagccagccctgatgctcggcaactggttcagccagccggagaacgcccggcgggtcggccagcacctgctgcaggtgatgagcggttttctcgaactgaccgatgacgcgcgcattcaacgtctgctgcgacgcgcggtgcataaggctatcgataaggtcgacctgacgcagaccagcgccatgatgctggaggggctgacccgcgacaatcgccatcaaaagctgctcgattcgctgataaaccaactgatcgccctgctgcagcgcgacagctcccgcgcctttatcgcccgcggcatcgtacactggctggagaccgaacacccgctgaaggccaaactcctacccaccgagtggctcggcgagcacagcgctgagatggtcaccgacgcggtgaataccctgctggacgaggtgactcacgaccgtacgcatcagatccgtcagacttttgaccgcgccgtgcaaaagcttatcgataacctgaaatccgacccggatatggcgcagaaggccgataacatcaaagcctggctaaaaaatgatgagacctttaaccactatcttggcgaagtatggggcgacctgcgcggctgggtaaaaaacgatatcagcagcgacgactcacgtattaagcagcgcatcgccgaggcggggcagtggttcggtgaaaccttactccgcgacgacgcgctgcgcgaatcgcttaacgaacacctggagcaggcggcgcaccgggtggcaccggagttcgccgccttcctcacccgccatatcagcgacacagtgaagagctgggacgcccgcgatatgtcgcggcagatcgagctcaatatcggtaaagatctgcagttcatccgcatcaacggtaccctggtggggggaaccatcggcctgttgttgtggctgctctcgcagatcccctcgctgctgcatctgcatattggttag

SEQ ID NO: 135834 - DNA, 663 bp, Enterobacter cloacae
atgcataccttatcgacgctctttcccgccgccttcccggcgttagccctgtcccactttgtcgctctgctcagtccgggccctgatttttttctgctggtcggctacgccgtgcgctaccggatccgcggcagcatcggattgtgtctcggcatcgccgcaggcaatgcgctgtatattgtgctcgccatcgtcggctgggggcttctgcgccaggcgccgctgctttttttgctcatcgagctgctgggcgcgggctatttattgtggattggcagcctgctgatacgcagccgtcccgcaacgctggcggtggagagcgttcgcgcagcgcgtccggggttcggcaggcagctgctgctggggctgggatcatcgctgctcaaccccaaaaacgccctgttttatctggcgctgatgacttccctgctcgggccggctgtgaccctgcttcagcaaacggtgagcgggctgtggatggtcagcgtggtgttcttctgggatttactgctggtgagcgcgattgcgctgccgcagatacagcgccgcctgggcgccatcgtctggcgagtcgagcgggcggcgggggcgatcctgatgctcttcggcctgtggattatctggcgatttttgcacgacctcgccgtcaggctatatgcttaa

SEQ ID NO: 135835 - DNA, 294 bp, Enterobacter cloacae
atggatctgccggcgtcgccgtcgctggataagctggcccacgacagcgcgcttcgtaaagagaccgttatccgcgccgtgaaacaagataccggcctgacgcctgccagtttgatcaacatggcgcgcatcgaatatgcgaaaacgcgcttacgcgccggggatcctatcgccgacgttggctatcaggctggctttgccgatcagagccatttccataaaacctttgtcagctataccgccgccacgccgcggcagtatgcgcaaagcagatcaatatctgacaataagtaa

SEQ ID NO: 135836 - DNA, 633 bp, Enterobacter cloacae
atggccttccgcctgatgcgctacgccatcgccgcgatgcagcgccatcttgatggcggtcatacaaaactgccgctggtggtgccgatgctgttctatcacggagcgaccacgccatacccgtggtcactcaactggctggactgttttgccgatccacagctggcgagtgagctttatatctcgccctttccgctggtggatgtcacggtgatccccgacgatgagatcgttcgccaccggcgcgtggcattactcgagctgatacagaagcatattcgccagcgcgatttaatgggcattgttgagcaactgacgacgattttacttagcggggacgctaatgacagacagctaaaaacgctgtttaattatctgctgcagactggcaacgcgcgccgctttggccggtttatccacgaagtggcgcaacgggttcctcagcacagggagagattgatgactattgctgaaagattacaggaagtgggccgcagaaaaggcaagcgtgaaggacagcatgccgaggcgctgcgcattgcccagaggatgctggccgacggcattgcccgcgagacggtggtgaaaatcaccggcctggccgccgacgagatcgccgcgctggcgcattga

SEQ ID NO: 135837 - DNA, 1371 bp, Enterobacter cloacae
atggcctatcagacggtgaatcctgcgaacaatcagcttattaaaacgtacccggcgcacagcgatgcggacgtggaggcggcgctgcagcaggcggatgcgctctaccattctgcctgggcaaaaggcgatattgaaccgcggctggcggtactgcataagctggcggatctgatcgatagccgggcggaggagctggcaaaaatcgctagccaggagatggggaaactcattaagcagagccgcggcgaagtgaaactttgcgcgcagatcgcccgctattacgccgataacgccaaatcgttcctggcgccggtgaagtatccctccgaactgggtgaagcctgggttgagcaccatcccattggcgtcttactggcggtggagccgtggaacttcccctattaccagctgatgcgcgtcctggcgccaaacctggcggccggtaacccggttatcgccaaacacgccagcattgtgccgcactgcgcggagacctttgcccatctggtgcgtgaggccggcgctccggagggggcgtggaccaacctgtttatctcccaggatcaggtggcgaagattatcgccgacgatcgcgtgcagggcgcggcgctaacggggtcggagaaagccggcagcgtggtggcggcgcaggcggcgaagcatattaagaaatcaacgctggaactgggcggcaatgatgtgtttgtcgtgctggacgatgccgacctggagcgcgcggtgaaaatcggcgtccaggcgcggctgaacaacgccggccaggtgtgtaccgctgccaagcgctttatcctgcacgaaaatatcgcggatgcgttcctgacaaaatttagcgaggcgtttcgccaggtgaaaatcggcgatccgctggatgaaagcaccacgctggggccgctctcttccaaagatgcgctggataccctaagcaaacaggtggacgaggcggtgaaaaatggcgctaagctgcatctgggcggcaaagcggtggctcgagaaggcaatttctttgaacccaccattttgaccggtatcacccgtgataatccggcgtacttcgaagagttctttggcccggtggcgcagatctacgtggtgaaaaacgatgaggaggcaatccagctggccaatgattcccactatggtctgggcggcgcggtgttcagtcaggatatcgaacgcgccaaacggatggcctccgccattgaaaccggaatggtttatatcaactggctcaccgataccgcgccggagctgccgtttggcggcgtgaagcgttccggttacggacgggagctctccgatctcggcatcaaagagtttgtgaaccagaagctggtggtggtgcgccgctaa

SEQ ID NO: 135838 - DNA, 546 bp, Enterobacter cloacae
atgagaaagcttaacatccttattcttgcagccctgaccgcggtctctggttccgccatggcggtggggtttaccgttgaacagggtaaaaacttcactaatctgaatatggaaatgggtaaatcctcttctggcctgtacgccgaaagccactggctgaagaataccgatgatggtagccagaccggcggcgtgggcgcgggttacaacctggaagtgggcccggtgatgctcaacgccggcgcgaaagccatctacctcgggccgaaaaaaggcgataacggcgtcgcgtttccggtcggcggcggggtgaacgtggccctgaccgacagcatccacgtgtttggcgaagggtatgtcgcgccggatggtctgaacaacagcgtgaaaaactatgttgaagcgaacggcggcgtgagctggtctccgattggtccagtgacgttgaaagtgggttaccgccatgtgagcgttgacggtaaagagggtcgcccgaaccacaccctgattgatggcgcctatgtgggcggcggggtcaccttctga

SEQ ID NO: 135839 - DNA, 1617 bp, Enterobacter cloacae
atgccgcacattcgacgacaaccttgcgttttttccggacatcgcctgctgaggaacctgaagctgcagaagattaactctctgaaaaaattaaagattaattatctgctgatcggcattgtcacccttttgctggcggcggccctgtggccgtcgatcccctggtctggtaaacccgagaaccgggtggcgggcattatcgctcgcggcgagctgcgcatcagcactatcaactcgccaatgaccttcgccaccatgaacaataaagcgttcggtctggattatgaactggcgaagcagtttgccgactaccttggcgtaacgcttaagataaccgtccggcaaaacatcagccagctgtttgacgacctcgacgacggtcaggccgatatgctggccgccggactggtctataaccaggagcgagtgaaaaactatcaggccggccccacctactattctgtttcacaacagctggtctaccgcgtcggcaatacccggccgcgcaccctcgcggcgctgaccgccgagcagctcactatcgctccgggccacgtggcgatcaacgacctgcagaccttaaaagccgagaaatacccggatcttgcctggcgcgtggacgaaaaacgcggtaccacggcgctgatgcaggcggtgattgacggtaaacttgattacaccatcgctgactcggtggccgtcagcctgtttcagcgcgtccatccggagctggcggtggccctcgatatcactgacgaacagccggtcacctggtttagcgcccgggacgacgataattcgctgtcggcggcaatgcttgatttcttcaacaacatcaatgaagacgggacgctggcgcgcctcgaggagaagtacctcggccacggcaacgatttcgattatgtcgatacccgcaccttcctgcgcgcggtggaaaatattcttccggaggtgcagccgctgtttgaaaaatacgcccgcgagattgactggcgcctgctggccgccatcgcctggcaggaatcccactgggatccgcaggccacctcccccaccggcgtgcgcggtatgatgatgctcacacgcaatacggcgcaaagcctgggtctaaccgaccgcaccgatgcggcgcagagtatcgacggcggcatgcgctacctgcaggatatgatggataaagtgccggattcgatcccgaaagatgaacgcatctggtttgcgctggccgcttataatatgggttatgcccatatgctggacgccatggcgctcacccgcaaacagaaaggcaatcctaacagctgggcggacgttaagctgcgtttaccgttgctgagccagaaaccctattacagcaaactaaaatacggctatgcccgcggccatgaggcctacgcctatgtggaaaacatccgcaaatatcagataagccttgtcggctatttgtcagagaaggagcgccagcagcagcaaacgctggccctggcggaggattacccggccgtgctccccaatgagctcgaacagccgcaggagaccaccctgccctttttcaagtttcgcgccgataagcagatggataatgcccggatgaaactccccggccacctgtattaa

SEQ ID NO: 135840 - DNA, 510 bp, Enterobacter cloacae
gtgtctgacctcgaactcaatgatgaatactggatgcgtcatgccctgacgctggcgaaacgcgcctgggaagagggcgaggtgccggtgggcgcggtgctggtgcataacaatcaggtcattggcgagggctggaaccggccgataggccgtcacgaccccaccgcccatgcggagattatggccttacgccagggcggactggtgctgcaaaactaccgcctgatcgacgccacgctgtacgtgaccctcgagccctgcgtcatgtgcgcgggcgcgatggtgcacagccgtatcgcccgcctggtgtttggcgccagggatgccaagaccggcgccgccggctcgctgatggatgttctgcaccaccctggaatgaaccatcgggttgagattagcgaaggcgtgctggcagagtcctgctctgccatgctgagcgacttctttcgctggcggcgggaagagaaaaaagcgctgaagaaagcccgggagcagaccggggaaagttaa

SEQ ID NO: 135841 - DNA, 636 bp, Enterobacter cloacae
ttgcagcacactgaacggagagtggtgtttttcgatctggacggaaccttacaccaacaggatatgttcggcagttttctgcgctatctgctgcgccatttgccgctgaacctgttgctggtggtgccgatggggccggtgatccttgccggactggcagtgagcggacgggcggcgcgctggccgatgagcctcctgctgtgggcgacaacctttggccgccgcgaggcggtgctgaagcggctggaagcggagtttgtcggctggtttcgccatcatgtgacggcgtttccggtagttcatgcgcggcttaccgcctacctgaccagcaccgatgccgacgtctggttgatcaccggctcgccgcagtcgctggtggagcaggtctatcgcgataccctctggttgccgcgggtgaatctgatagccagccgcaccgcgcgccgctggggcggctgggtattgaccctgcgctgcctggggcatgaaaaggtggtacagctggagaaaaagattggcgccccgctgcggctgtatagcggctatagcgatagtgagcaggataatccattgctcggcttttgccagcatcgctggcgggtaacccctcagggagagcttcagcagctggagtaa

SEQ ID NO: 135842 - DNA, 849 bp, Enterobacter cloacae
atgaactgtttaacgcgtattcgtcagcgctatcccaccctggcggcgagcgacaaaaagttggccgattatattctgagccagcccgatgagacccggcacctcagctcgcagcagctggcagcggaagccggtgtgagtcagtccagcgtggttaaatttgcccagaagctgggattcaaaggctttccggcgctgaagctggcccttagtgaagcgctggcgagtagcccggatccgcactccgtcccggtgcataaccacattcgcggtgacgatccgctgcgtctggtcggcgagaaactcattaaagacaatgtcgccgccatgcatgcctcgctggacgtcaacactgaagagacgctacgggaagccgtcacgctgctgcgcaacgcccggcgagtgatcgtcaccgggattggcgcctccggcctggtggcgcgaaactttagctggaagctgatgaagatcggcatcaacgctgtttctgagcaggatatgcatgccctgctggcgacggtgcaggccatgtccagcgacgatcttctgctggcgatctcttactccggcgagcgccgggagatcaatatggcggccggtgaagcgctgcgcgtcggctgtaagatcctggcgatcaccgggtttagcccgaacgccctgcaacagcaggcgacccactgcctgtatactatcgccgaagagcaggcgacgcgcagcgccgccatctcctccaccagcgcgcaaatgatgctcaccgatctgctgtttatggggctggtgcagcaggatctggagcgggcgccggagcgcattcgccatagcgaagcgctggtgaaaaagctggtctga

SEQ ID NO: 135843 - DNA, 261 bp, Enterobacter cloacae
atggcgctgttaattaccaaaaaatgcatcaactgcgatatgtgcgagccggagtgcccgaatgaggccatttcgatgggtgacagcatttatgaaattaacagcgaccgctgcaccgagtgcgtgggtcattacgacacgccaacctgccagaaagtgtgcccgatcccgaatacgatcctgaaagatccggcacacgtcgagagtgaagaacagctgtgggataaattcgtgctgatgcaccacgcggataaaatttaa

SEQ ID NO: 135844 - DNA, 381 bp, Enterobacter cloacae
atggccattctcgggttgggtaccgacatcgtcgagatcgcccgcatcgaagcggtgatcgcccgcagcggcgatcgccttgcccgccgggtgctgagcgaccatgaatggagcatctgggagcagcaccagcagccggtgcgtttcctggcgaaacgctttgcggtcaaggaagcggcggcgaaagcgctgggaaccgggatccgtaacgggctggcgtttaaccagttcgaggtttacaacgacgagctgggcaagccgaagctgcggctatggggtgaagcaaaccttttagctgaacgcatgggagtaagcgctattcacgttactctcgctgatgaacgccactacgcctgcgccacggtgattgtcgaaagctag

SEQ ID NO: 135845 - DNA, 732 bp, Enterobacter cloacae
atggctgaattattgttaggggtcaatattgaccatatcgcgaccttgcgtaacgcccgcggcactgcttacccggatccggttcaggcggctttcattgccgaacaggccggcgccgacggcattaccgtgcatctgcgcgaagaccgtcgccatattaccgatcgcgatgtgcgtatcctgcgccagacgctgcacacccgcatgaatcttgaaatggcggtcaccgaagagatgctgacgatcgcctgcgaaaccaaaccgcacttctgctgcctggtgccggagaagcgtcaggaagtgaccaccgagggcgggctggacgtcgccggccagcgcgacaagatgcgcgatgcctgtcaacgcctggcggatgccggcatcctggtctccctgtttatcgatgcggatgaagcgcagatcaaagcggcggcagacgttggcgcgccctatatcgaaatccacaccggctgctatgccgatgccaaaaccgacgccgagcaggccagggagctggaacgtattgccaaagcggccacctacgccgccagcctcgggctgaaggtgaatgccggccacggtctgacctaccacaacgtgaaagcgattgctgcgctgccggaaatgcatgagctgaatatcggtcacgcgattattggccgtgcggtgatgagcggcctgaaagaggcggtggcggaaatgaagcgtctgatgctggaagcccgcggctaa

SEQ ID NO: 135846 - DNA, 738 bp, Enterobacter cloacae
gtggatggatggcagcgcgcctttgtcctgcatagccgtccgtggagcgaaaccagcctgatgctggacgtcttcacggaagaatccggtcgtgtgcgcctggttgccaagggcgcacgctccaaacgctctaatctcaaaggcgctttacagccctttacccccttgctggttcgcttcggcggtcgcggcgaagtcaaaaccctgcgcagcgcggaagccgtttcgctggcgctgccgctcagcggcatcaccctctacagcggtctctacgttaacgagcttatctcccgcgtgctggagcacgaaacacgcttctccgaactctttttcgactacctgcactgcattcaggcgctcgccggggccagcggctcgccggagcccgcgctgcggcgttttgagctggcgctgctcgggcacctgggctatggcgtggattttctccactgcgccgggagcggcgagccggtagacgacaccatgacctaccgctatcgtgaagaaaaaggctttattgccagcctggtgattgataacaacacgtttaccgggcaccatttgaaagcattggcgagtcgcgagtttcctgatgttgatacgctgcgcgccgcgaagcgctttacccgtatcgccctgaagccctatctcggcggcaaaccgctcaagagccgggagttgtttcgccagtttatgcccgcgcgaaaggcgcgagccgataatacgaataatgattaa

SEQ ID NO: 135847 - DNA, 906 bp, Enterobacter cloacae
atgagcgaagaaaaaagttattgtgggtttgtcgccatcgtgggtcgtccaaacgttggcaaatccacgctgttgaacaagctgcttgggcagaagatctcgatcacctcccgtaaagcgcagaccacccgtcaccgcatcgtcggtatccataccgaagggccgtatcaggcgatttacgttgatactccgggcctgcatatggaagagaagcgtgccattaaccgcttaatgaacaaagcggccagcagttcgattggcgacgtggaactggtcatcttcgtggtggaaggcactcgctggacgcaggacgatgagatggtgctcaacaagctgcgcgacgcgaaagcgccggtgatcctcgcggtcaacaaggtggataacgtgcaggaaaaagcggatctgttaccgcacctgcagttcctcgccagccagatgaatttcctcgatatcgtaccgatctcagcggaaaccggcaccaacgttgataccatcgcggcgatcgtgcgtaagcatctgccggaagcgatccatcacttcccggaagattatattaccgatcgctcacaacgctttatggcctccgaaatcatccgtgaaaaactgatgcgtttcctcggcgctgagctgccgtactccgtcaccgtggaaatcgaacgtttcgtcagcaacgagcgcggcggttacgatatcaacggcctgatcctcgtcgagcgcgaaggacagaaaaagatggtgattggcaacaaaggcgccaaaattaaaaccatcggtatcgaagcgcgtaaggacatgcaggagatgtttgaagcgccggtgcacctcgagctgtgggtgaaagtgaaatccggctgggccgatgacgagcgcgccctgcgcagtctcggttacgttgacgacctctga

SEQ ID NO: 135848 - DNA, 681 bp, Enterobacter cloacae
atgaaccccatcgtaattaatcggcttcaacgaaagctgggctacacttttcatcatcaggagctgttgcaacaggcattaactcaccgcagtgccagcagcaaacataatgagcgcctggaatttttaggtgactccattttaagtttcgtgatcgcgaatgcgctgtatcatcgctttcctcgtgtagatgaaggcgatatgagccgtatgcgcgcgacgctggtgcgcggcaacacgctggcggagatcgcccgcgagtttgagctgggcgagtgtctgcgcctcgggccgggagagctgaaaagcggcggtttccgtcgcgaatcgattctcgcggataccgttgaagcgttaattggcggggttttcctcgacagtgatattcagaacgttgaacgcttaatcctctcctggtaccagacccgtctggacgaaatcagtccgggcgataagcaaaaggatccgaagacgcgtctgcaggagtatctgcagggacgtcatctgccgctgccgtcttacctggtggtccaggttcgcggcgaagcgcacgatcaggaatttactatccactgccaggtcagtggcctgagtgaaccggtggttggcacaggttccagccgtcgcaaggcggagcaggctgccgccgaacaggcgctgaaaaagctggagctggaatga

SEQ ID NO: 135849 - DNA, 975 bp, Enterobacter cloacae
atggcgaacatgtttgccctaatcctggtgattgcaaccctggtgacgggcgttttatggtgcctggacaagttcatttttgcaccgaaacgtcgtgaacgtcaggccgctgctcaggcagcgaccggcgagcaactggacaagaagacgctgaagaaagtcggcccgaaaccgggctggctggaaaccggcgcatcggttttcccggtgctggcgatcgttctggtggtacgttcatttatttatgagcctttccagatcccttcaggttcgatgatgccaacgctgctcatcggcgattttattctggtggagaaatttgcctacggcattaaagatcctatctatcagaaaacgctgatcgagaccggccatccgaagcgcggcgacatcgtggtgtttaaatatccggaagacccgcgtctggactacattaagcgcgcggtggggttaccgggtgataaggtcacctacgatccggttgccaaacaggtcactattcagccgggctgcagttccggacaggcctgcggcaacgcgctgccggtgacctattccaacgtggagccgagcgattttgttcagaccttctcccgcagcaacggcggcgaagcgagcagcggtttctggcagttgccgaagggcgaaaccaaagccgacggcattcgtcttaccgagcgtcaggagacgttgggcgacgtgacgcaccgaattctgatggtgccgattgcccaggatcaggttgggatgtactaccatcagtccggtctgccgctggccacctggattgtgccgcccggtcagtacttcatgatgggcgacaaccgggataacagcgccgacagccggtactggggctttgtgccggaagccaacctggtcggaaaagcaaccgctatctggatgagttttgaaaagcaggaaggtgaatggccgaccggcgtgcggttatcgcgcattggtggaattcattaa

SEQ ID NO: 135850 - DNA, 1800 bp, Enterobacter cloacae
atgaagaatatacgtaacttttcgatcatcgctcacatcgaccacggtaagtcgacgctgtctgaccgtatcatccagatttgcggtggcctttctgatcgtgaaatggaagcccaggttctggactccatggatcttgagcgcgaacgcgggatcaccatcaaggcgcagagcgtcaccctggactataaggccagcgacggtgagacctaccagctgaactttatcgacaccccgggccacgtagacttctcttatgaagtttcccgttctcttgccgcgtgcgaaggcgcgctgctggtggtagacgccgggcagggggtagaagcccagaccctggccaactgctacaccgccatggagatggatctcgaagtggttccggtactcaacaagatcgacctgcctgcggccgaccctgagcgcgtagcggacgagattgaagatatcgtcgggatcgacgcccacgacgcggtgcgctgctcagcgaaaaccggcgtcggcgtgaccgatgtgctggagcgtctggtgcgcgatatcccgccgccggaaggcgatccggacgcgccgctgcaggcgctgattattgactcctggttcgataactacctcggcgtggtgtcgctggtgcggattaaaaacggcaccatgcgcaagggcgacaagatcaaggtcatgagcaccggccaggtctataacgctgatcgtctgggcatcttcaccccgaaacaggttgaccgtaccgagctgaaatgcggcgaggtaggctggctggtctgcgcgatcaaagacatcctcggcgcgccggtgggcgataccctgaccgccgcccgcaacccggcagacaaagcgctgcctggctttaagaaggtgaaaccgcaggtgtatgccggcctgttcccggtgagctccgatgattatgaagctttccgcgacgcgctgggcaaactgagccttaacgatgcctctctgttctacgagccagaaagctctaccgcgctgggcttcggcttccgctgcggcttcctcggcctgctgcacatggagatcattcaggagcgtctggagcgtgaatacgatctcgacctgatcaccaccgcgccgacggtagtctacgaagtagaaaccacctccaaagaagttatctacgtcgacagcccgtccaagctgccgccgctgaataatattcaggagctgcgcgagccgatcgccgagtgtcacatgctgctgccgcaggagttcctcggcaacgtgattaccttgtgtgtcgagaagcgtggggtgcagaccaacatggtttaccacggtaaacaggtggcgctgacctatgaaattccgatggcggaagtggttctcgacttcttcgaccgtctgaagtccacctcccgcggctatgcgtcgctggactacaacttcaaacgcttccaggcgtcgaacatggtacgcgtcgatgtgctgatcaacggtgagcgcgtcgatgcgctggcgctgatcacccacaacgataacgcgccgtatcgcggccgcgagctggtggaaaagatgaaagatctgattccgcgtcagcagttcgatatcgcgattcaggcggccatcggtaaccacattatcgcgcgctctacggtgaaacagctgcgtaaaaacgtcctggcgaaatgctacggcggcgacgtcagccgtaagaaaaagctgctgcagaagcagaaagaaggtaagaagcgtatgaagcaggtcggtaacgttgagctgccgcaggaagcgttcctcgccattctgcacgttggtaaagacggcaaataa

SEQ ID NO: 135851 - DNA, 480 bp, Enterobacter cloacae
atgattaaagagtgggctaccgtggtttcctggcataacggcgtggcgcaggtgcactgcgacgttaaagcctcctgcagcagctgcgcctcccgtgccggctgtggtagccgggtgctaaacaagctggggccgcagaccagccataccattagcgtgccctgcgagcagccgttggcagcggggcaaaaagtggagctggggatcgctgaaagcagcctgctgggctcagcgatgctggtgtatatggcgccgctggcggggctgtttgtaatggcgtctatttttcaggtgctgtttgccagcgatattgcgtcactttgcggcgcgctgctgggcggcgtcggcggcttcctggtggcgcgcggtctgtcgccgcgactggcggcacgtcagtcctggcagccggtgattttgaacgtcgcactgccgccggatctgctgcgtgttgatacgccttcctccgacatgggccagtga

SEQ ID NO: 135852 - DNA, 957 bp, Enterobacter cloacae
atgaagcaactttggtgtgccatgtcgctcatggcaggcagcctgttgttctctgtcaacgcctcggctgatacatcgtccggggcgttgttgcagcagatgaacctggccagccagtctctcaattatgagctgtcttttgttagcatcagcaaacaaggcgttgagtcgctgcgctatcgtcacgcgcgactgaacaaccaaccgctggcgcagttgctgcagctggacggtccgcgccgggaagtggtcctgcgcggcacggaaatcagctattttgaacccggtctcgatccgttcaccctgaacggcgactatatcgtcgattcgctgccatcgctggtatatagtgatttcaaacgcctctccgcggcgtatgattttatttccgtgggccgtacccgtatcgctgaccgcctctgcgacgtgatccgcgtcgtggctcgcgacggcacgcgctacagctttatcgcctggctggatgctgaaactaagctgccgctacgcgtcgatttgctcgaccgcgacggggaaacgctggagcagttccgggttgtctccttcaatgttggcgataacgtcagcgccagcatggagacgctggcaaaagcgaatttgccgccgcagctgtcggtgcctgaaggaggcgacaaagccaacttcaactgggcgccgacgtggctcccgcagggcgtgactgaggtttccagcagccagcgccgtcttcccacctttgacggtccggtagaatcacgtctctattccgacggcttgttcagcttctcgatcaatatcaaccgcgccacggcggccagcagcgaccagctgttgcgcaccggccgacgcaccgtcagcacgacggtgcgcgataacgcggagataaccgtagtgggcgagctgccgccgcagacggcgaagcgtatctctgacagtattaaattcaaggcagtacaatga

SEQ ID NO: 135853 - DNA, 651 bp, Enterobacter cloacae
atgcagaaagaaaaactttcggctttaatggatggtgaaacgctggataacgaactgctcaacgagctgagtcgttcttctgagatgcaaaaaacctgggagagttatcaccttatccgcgatacgctgcgtggcgataccgctgaggtgctgcaatttgatatctccgcccgggtgatggccgccattgaaaatgagcccgttcgtcagacggcgccgcttattcctgaatctcagcccgcaccgcatcagtggcggcagatgccgttctggaacaaggtgcgtccgtgggccagctccctgactcaaatgggcgttgccgcctgcgtatcgcttgcggttatcgtcggcgtccagcactataatggtcagtctgattccgctcagcagcccgaagcgccggtgttcaatacgctgcccatgatgggtaaagcaagcccggtaagtcttggcgtgccggctgacgcgtcagcgggaagcggccagcaggcgcaggtccaggaacagcgccgccgaattaacgccatgctgcaggactacgaactgcagcgccgcctgcacgctgagcagcttcagtttggccaggcccagactcagcaggccgcagtccaggtaccgggctatcaaactttaggaacgcaatcgcagtaa

SEQ ID NO: 135854 - DNA, 576 bp, Enterobacter cloacae
atgagcgagcagttaacggatcaggtccttgttgaacgggtccagaaaggagatcagaaagcgtttaatttgctggtagtgcgctatcagcataaggtcgcgagcctggtttcccgctatgtaccgccgggcgatatcgctgacgttgttcaggaatcgttcgttaaggcatggcgtgcgctggactctttccggggagatagcgctttttacacctggttataccgtatcgccgtcaacacggcgaagaattatttggttgctcaggggcgccgtccgccgtccagcgatgttgacgccaacgaggcggaaaacttcgaaagcggcggggcgttgaaagaaatttcgaaccctgagaacttaatgttgtcagaagaactgagacaaatagtttttcgtaccattgaatcgctcccggaagatttacgcatggcaattacgttacgggagctggatggcctgagctatgaagagatagccgctatcatggattgtccggttgggacggtgcgttcgcgtatcttccgggcgcgagaagctattgataataaagttcaaccgcttatcaggcgttga

SEQ ID NO: 135855 - DNA, 1620 bp, Enterobacter cloacae
atgaataccactcctgacttctcttgtgatgtgttgattatcggcagcggcgctgccggtctttcccttgccctgcgcctggctgagcacagttcggtgacagtgctgagtaaagggccgatcagcgaaggttcgacgttctacgcccagggtgggattgccgccgtcttcgatgagacggacagtattgaatcccatgtcgaagataccctcatcgccggcgcggggctctgcgatcgtcatgcggtcaccttcgtcgccagcaacgcccgatcatgcgtccagtggcttatcgatcagggagtgctgtttgacacccaggtccaggccaatggcgaagagagctatcatctcacgcgcgaaggggggcacagccatcggcgcattcttcacgccgccgacgccaccggcaaagcggtagagacgacgctggtcgataaagcgcttgcccatcctaatatccgcatccttgagcgcagcaatgccgtcgatttgatcgtatcggataagattggcctgccgggcacccgccgggtggtcggggcatggatctggaatcgtaataaagagcgggtggaaacctgcagcgcgaaagccgtagtactcgctaccggcggggccgcgaaggtttatcaatataccactaaccccgacgtctcttccggagacgggattgcaatggcctggcgggcgggatgtcgggtggcgaatctggagtttaaccagttccaccccaccgcgctatatcacccccaggcgcgtaatttcctgcttactgaagcgctgcgcggcgaaggcgcccaccttaaacgcccggatggcacccgctttatgccggactttgacgagcgcggcgagctggccccgcgcgatatcgtcgcccgcgccatcgaccatgaaatgaagcgcctgggcgtagactgtatgttccttgatatcagccataaacccgaggcgtttgttcgccagcatttcccgatgatttatgaaaagctgctcggcctgggaattgatttaaccaaagatccggtgccggtcgtccccgccgcgcattacacctgcggcggcgtgatggtggatgataatggccgcaccgacgtcgatggtttatacgccatcggcgaagtcagctacaccgggctgcacggcgcgaatcgtatggcgtcgaactcgttgctggagtgcctggtctatggctggtccgccgcggaggatattacccggcgcctgccgctcgcccagaaggtcgccacactgccagcatgggatgaaagtcaggtggagatcccggatgaactggtggttatccagcacaactggcacgaactgcgcctgctgatgtgggattacgtcgggattgtgcgcaccacccgcaggctggagcgcgccctgcggcgcattaccatgctccagcaggagctggatgagtattacgcccgcttccgcgtctcgaataatttgctggaactgcgcaatctggtgcaggtggcggagcttatcgtacgctgcgcgatgttgcgtaaggagagccgcggtctgcattataccctcgactatccgcagccgctgcctgacagcggcccgtcgatactctcgcccctggctcacataaagagataa

SEQ ID NO: 135856 - DNA, 738 bp, Enterobacter cloacae
atgtctcagtcgaagtttgcgctgccgcgcaatggttttaccttcaaacggttctttgtcgctcacgatcgctgcgccatgaaggtgggtaccgacggcattttgctgggcgcctgggcgccgattgccggagtgacgcatgtgctggatattggcgcgggcagcggcttgctggcgctgatgctcgcgcagcgtaccggagatgatgtgcatgtcgaggcggtagaactggacgaagaggccgccgctcaggcgcgggaaaacgccctcgcgtcgccgtgggcttcgcggattgaggtctggcaggccgatattcatcagtggcagccgtcgcaaactcgacgctatgaactgataatcagtaatccgcccttttttgccgaaggcgtgccatgcgcgacctcgcagcgagagcaggcgcggtacaccactacgctcgatcacgcctccctgctgacctgtgccgcagagcatattaccgaagaaggttttttttgcgtggtgttgccggtggatattggtaatgcgttcatcgaacgggcaagggcgatgggctggcatctgcgactgcgtactgacgtggcggagaccgagctgcgaccgccgcatcgggtgctgctggctttctccccgacggcaggggagtgtttcagcgacaggctggcgatccgcgggccagagcagcaatattcggaaggctttaccgctctgaccgaggacttttatctctttatgtga

SEQ ID NO: 135857 - DNA, 1332 bp, Enterobacter cloacae
atgactgtaacgactttttccgaacttgaactcgacgaaaacctgctggaagccctccaggataaaggtttcactcgcccgacagccattcaggccgccgctattccgcctgcgctcgatggccgtgacattctcggttcagcgccgaccggcaccggtaaaacggcggcgtatctgctgccagcgttgcagcacctgctcgatttcccgcgtaagaaatccggcccgccgcgcattcttatcctgacgccgacccgtgagctggcgatgcaggtagccgaccacgcccgcgagctggcgaagcatacccatctggacatcgctaccattaccggcggcgtggcgtacatgaaccacgcggaagtgttcagcgaaaaccaggacatcgtagtcgccaccaccggtcgcctgctgcaatatattaaagaagagaatttcgactgccgcgccgtcgagaccctaatcctcgatgaagccgaccgcatgctggatatgggttttgcccaggatatcgaaaccatcgccggtgaaactcgctggcgcaagcagactatgctgttctccgcgacgctggaaggcgatgcgatcaaagactttgctgagcgtctgctggaggagccggttgaagtttccgccaatccgtcaacccgcgagcgtaagaaaatccatcagtggtactaccgcgccgacgatatcgaacataaaaccaaactgctggtgaatctgctgcaacagccggaagccacccgtgctatcgtgtttgtgcgtaagcgtgagcgcgtgcatgagctggctaactggctgcgtgaggccgggattaacacctgctggctggaaggcgagatggtgcaggccaagcgaaacgaagctatcaagcgcctgaccgacggccgcgtcaacgtgctgatcgccaccgacgtcgctgcccgcggtatcgatattccggacgtcagccacgtctttaacttcgatatgccgcgtaccgcggatacctacctgcaccgtatcggtcgtaccggccgcgccggtaaaaaagggaccgccatttctctggtcgaggctcatgaccacctgctgctgggtaagattggtcgctatattgaagagccgttgaaagccagagttatcgatgaactgcgcccgacgacccgtgcgccgagcgagaagctgacgggtaagccatcgaagaaagtgctggcgaagcgtgcgcagaagaaaaaagatgaaaaagagaaaccgcgggtgaagaagcgccaccgcgatacgaaaaatatcggtaagcgccggaagccaagcgcggccgggacgccatcagcgtccagcgatgagtaa

SEQ ID NO: 135858 - DNA, 384 bp, Enterobacter cloacae
atgattactggtatccaaattactaaagcggcaaacgacgacctgctcaactctttctggctgctggatagcgaaaaaggcgaagcgcgctgcctgtgcgccaaaggtggttttgcggaagatgatgtggttgcggtaagcaaactgggtgaaatcgaataccgtgaaatcccggtggacgtgaaaccggaagtgcgcgtcgaaggcggtcagcacctgaacgttaacgtgctgcgtcgcgaaaccctgctggacgcggttgagcatccggaaaaatatccgcagctgaccattcgtgtttccggctacgcggtacgcttcaactctctgacgccggaacagcagcgcgacgttatcgcccgtacctttaccgaaagcctgtaa

SEQ ID NO: 135859 - DNA, 696 bp, Enterobacter cloacae
  misc_feature (314)..(323): n is a, c, g, or t
atgaccacccctttaacctggcatgacgtgctggcggatgaaaagcaacaaccctattttctcaatactctgaagaccgtcgccgaagagcgccagtcggggatcaccatctatccaccgcaaaaagacgtcttcaatgcgtttcgctttactgaactgggcgatgtcaaagtcgtcattctcggccaggacccctatcacggcccgggtcaggcccacggtctggcgttctcagttcgtccgggcgtcgcgatcccgccttcgttgctgaatatgtataaagagctggaggccacgatccccggctttacccnnnnnnnnnncacccacggttatctcgaaagctgggcacgacagggcgtgctgctgctgaatacggtcctgaccgtccgcgccggacaggcgcactcgcacgccagtctgggctgggagacctttaccgataaggttatcgctttaatcaatgagcattgcgagggagtagtttttctgctgtggggctcccatgcgcagaagaaaggcgcgattatcgatcgtcagcgccactgcgtgctgaaggcgccgcatccatcaccgctctctgcgcatcgcggcttctttggctgcaaccatttcgtacagaccaaccagtggctggttgaccgcggcgaaacgccgatcgactggatgccggtccttcccgctgaaagcgagtga

SEQ ID NO: 135860 - DNA, 1086 bp, Enterobacter cloacae
atgagcgacgaactgaaaaataaaagcggcaaggtcaaagtgatgtatgtccgcagtgatgatgattctgacaaacgcacccataacccacgtaccgggaaagggggaggtcgtccaggaaaatctcgtgttgacggccgcagccgccctgcgcgtgacgaacgaaacagccgcggcgacgatcgcaaacgtgacgaccgtaagcgtgacgatcgcaaacgcgatgattttcatcgcgacgatgcgtctccgtggcgtaccgtttcccgcgctcctggcgatgagacgccggtaaaagaagatcacggcgggatcagcgggaagagctttatcgatccggaagtgctgcgtcgtcagcgtgcggaagagacccgcgtatatggcgaaaacgcctgccaggcgctgttccagagccgtccggaagctatcgttcgcgcctggtttattcagagcgtgacgccgcgctttaaagaggcgctgcgctggatggcggccaaccgtaaggcctatcacgtggtggacgaagccgagctggcgaaagcctccggcaccgagcaccacggcggcgtctgtttcctgatcaaaaaacgccacggcacttctgttgctcaatgggtcgcgaaggccggggaagaagattgcgttctggcgctggaagatgtgggtaacccacataatctcggggcgatcatgcgcagctgcgcgcactttggcgtgaagggcgtggtggttcaggatgccggcgtgctggagtccggggcggcgatccgtacggcggagggcggtgcggagcatgttgaaccgatcaccggcgacagctttatcgataccctcgatcagttccgcaaagcgggctacgcgattgtctcaacgtccagccataatggtaccccgctgtttaaagccgagctgccgaagaaaatggtgctggcgttaggccaggaacgtgatggtctgtccgatgcggcgatttccagcgccgatctcagcgttgccatcgacggtaccggtaatgtcgaaagcctgaacgtctctgtggcgaccggcgtcctgctggcggaatggtggcgtcagaacaaggcgtga

SEQ ID NO: 135861 - DNA, 426 bp, Enterobacter cloacae
atgaataccgtttgtgccagttgtcaggctctgaaccgcctcccggacgatcgtagcgcggatggcgcaaagtgcggacgctgcggtcacgatctttttgacggcgacgtcatcaacgcgaccggggcaacgctggataaactcttgaaggacgatctgccggtcgttgtcgatttctgggcgccatggtgcggaccctgccgtagcttcgcgccgatctttgaagacgtcgcggaagagcgtagcgggaagatgcgttttgtgaaagtcaacaccgaagcggaacgtgagcttagcgcccggtttcgtatccgcagcatcccgaccattatgatgttcaaaaatggcgaagtgatcgacatgctcaatggcgcagtgccaaaagcgccattcgatagctggcttaacgaagccggccaacaataa

SEQ ID NO: 135862 - DNA, 699 bp, Enterobacter cloacae
atgactgataacgctgtccttcgcctgcgcgccgaacgtctcgcgcgagctacccgccctttccttgcgcgcggcaatcgcatccgccgctgccagcgctgtctgctgccgctcaagcagtgcctgtgcgccacattaacctcagcgcaggccgccagccgcttctgcctggtgatgtttgatacggaaccgatgaagcccagcaacactggccggctcatcgccgatattctgccagataccgaagcgtttcagtggtcgcgtaccgaaccgccgcaggcgctgctcgatctggtcgcccatcctgattatcagcccatggtcgtatttccggcctcctatgccgggccggagcgccaggtcctgagcgcgccgccgtcaggtaaaccgccgctgtttatcatgctcgacggcacctgggccgaagcgcgcaaaatgttccgtaagagcccttatctcgacgcgctgccgattatctcagtcgatctgtcgcgcatctctgcctaccatctgcgcgaggcgcacgccgacggacaatattgtaccgcggaagtggccatcgccctgctggatctggcgggcgatgccccggccgccgctgcgcttggcgagcacttcacccggttccggacccgctatctggcgggaaaaacccagcataagggcagtatcacagcgggccaggtggaaaacgtttaa

SEQ ID NO: 135863 - DNA, 2652 bp, Enterobacter cloacae
atgagccaacgaggcctggaagcgctgctgcgaccaaagtccatcgccgttattggcgcatcaatgaagccgcagcgcgctggctatctcatgatgcgcaacctgttagccggcggcttcaatggcccggtgatgccggtcacccccgcctggaaggcggttcttggggtactggcatggcctaccatcgagagcctgccgtttaccccggatctggcggtgctctgtactaacgccaggcgtaatctcgaattgctcgaagccttagggcaaaaaggctgcaagacctgcatcatcctctcttcgcagccggaacagtacccggcgctgctcgaatgcgccgcgcgctatcagatgcgtctgctcggccctaacagtctcggactgctggccccatggcaagggctgaacgccagcttttcaccggtgccgatccatcgcggtaaactggcctttatctcgcagtcggccgccgtctccaatactatccttgactgggcgcaacagcgcgagatgggtttttcctacttcatcgccctgggcgatagcctggatattgatgtcgatgacctgctggactttctggcccgcgacagcaagaccagcgccattttgctgtacctcgagcatctcagcgacgcgcgccgctttgtctccgccgcgcgcagcgcttcgcgaaacaaacctatcctggtgattaaaagcggccgtagtccggcggcgcagaagctattgcacgccaattccgggatggacccggcatgggatgcggccattcagcgcgctggtctgctgcgggtgcaggatacccatgagctgttctctgcggtggaaacgctcagccacatgcgcccgctgcgcggtgaaaaactgatgatcgtcagcaacggtgcggcgccggcggcgctggcgctggatgagctttggttgcgaaacggtaagctggcggctctcagcgaggagacgcgcgacgccctgcgccaggcgttgccggttggcgtggagatcgccaacccgctggatctacgcgatgacgccagtagcgaacactatcagcgggcggtgaatgttttgctcaacagtcaggactatgacgcgctgctggtgatccactctcccagcgccgccgcgccgggcaccgagagtgccctggccctgattgacgctctgaagcatcacccgcgcggtaaatatgtcaccgtactgaccaactggtgcggcgaattttcctcgcaggaagcgcgacgtttattcagcgatgccggcctccctacctaccgtacgccggagggcacgatcaccgcttttatgcatatggtggaataccgtcgcaaccagaaacaactgcgcgagacgccggtgctaccagactccttaaccgccaataccagcgaggcgcatgctctgctgcagcaagcgatagaagacggcgccaccacgctggatactcacgaggtcagcccggtgcttcgggcctatggcatccacacgctgccaacctggattgccgctgacagcgcggaagcggtgcatatcgctgagcagataggctatccggttgcgctgaagctgcgttctccggatatcccgcacaaatcagaagtacagggggtcatgctctatttgcgtaccgccgccgaggtgcagcaggctgcagatgcgatgatcgatcgcgtcaaactggcctggccccaggcgcgcattcatggattgctggtgcaaagcatggccaatcgcgctggcgcccaggagctaagagtagtggttgagcacgatcccgtcttcggcccgttgattatgctgggcgagggcggcgtggagtggcgggccgaggaccaggccgccgtggcgctgccgccgctgaatatgaacctggcgcgttatctggtgatccaggcgatcaaaaataagaagatccgcggccgcagcgccttgcgcccgctggatatcgctggcttaagccagctgctggttcaggtctcgaacctgatcgtcgactgcccggagatccagcgcctggatattcatcccctgctcgcctccggcaacgagtttacggcgctggacgttaccctggggcttgctcccttcagcggcgacagtgaaagccgtctcgctattcgtccctatccgcaccaactggaggagtgggtggtgatgaaaaatggcgatcgctgtctgttccggccgatcctcccggaagatgagccacagttgctcgcatttatcgcccaggtcaccaaagaagatctctattatcgctattttagtgagatcaacgaatttacccatgacgacttagccaatatgacccagatcgactacgatcgagaaatggcgttcgttgccgtcaggaccagcgcagagaagagcgagatcctcggcgtgacgcgggcgatctccgatcccgataatattgacgccgagtttgccgttctggtccgttcagatttaaaagggttaggcctggggcgaaggttgctggaaaagctgatcgcctatacgcaaagccatggcctgcagcgccttaatggtattacgatgccaaataaccgaggcatgataggcctcgccagaaagctgggattcaccgtcgatattcagctggaagatgggattgtcagcctgtcgctgcccctgaatcagggataa

SEQ ID NO: 135864 - DNA, 1356 bp, Enterobacter cloacae
atgttgtcaaaatttaagcgtaataaacatcaacaacaccttgcccaactccctaagctttctcagtcagttgatgatgtagagttcttttacgcccctgcggaattcagggaagcgttactgacccggattgcccacgccactcagcgtatatgcattattgcgctctatctggagcaagatgatggcggaaaaggaattttgcaggccctttatgacgccaaacgccagcgtccggaactggatgtccgcgttctggtggactggcaccgcgctcagcgtggccggatcggcgccgccgcctctaataccaatgccgactggtattgtcggatggacaatgaaaatccaggggtagatatccccgtttacggcgtgccgattaacactcgggaggcgctcggcgttctccatttcaaaggctttattattgatgactgcgtcctctacagcggcgccagcctgaatgatgtttatctgcatcagcatgataagtatcgctatgatcgctatcagtgcatccgtaacggcaaaatggcggacatcatgttcgactgggtcgacaacaatctggttcaggggcgcggcgttaaccgtctcgacagaccggatcggccaaaaagcccggaaatcaaaaacgacattcgccagtaccgtcaggagctccgcgaccgcagctaccattttgtcggcaccgctggtgacgaagaactctccgtcaccccgctggtaggcctgggtaaatcgagcctgctgaataaaaccatctttcacctgatgccctgtgccgaacacaagctgacgatctgcaccccctacttcaacctccctgccgtactggtaagaaatatcatccagctgctgcgcgacggaaaacaggtggagattattgtcggcgataaaacggctaacgatttctacattcctgaagatcagccgtttaaaatcatcggcgcccttccctatctgtatgagatcaacctgcggcgtttcctcagccggctgcagtattatgtcaataccgatcagctgatcgtccgcctgtggaaggatgatgataacagctaccacctgaaaggcatgtgggttgacgatgagtggatgctgctcactggcaacaacctgaacccgcgcgcctggcggctcgatctggaaaacgccattctgatccacgatccaaagcggcagctgggggccatgcgggagaaagagctgaagctcatccgcacccacaccacggtagtgaaacattatcgggatctgcaaagtatcgccgactatccggtgaaagtgcgaaaactgatccgccgtctgcggcggatccgcattgaccggctgatcagccgtattctctga

SEQ ID NO: 135865 - DNA, 324 bp, Enterobacter cloacae
atgcgtacgataatagtgattgcttcgctgctgttaaccggctgtagccacatggcaaatgatgcatggtccggtcaggacaaagcccagcattttctggcctcagcgatgctctctgccgctggcaatgaatatgcgcaatatcagggttacagccgggaccgcagcgccgctatcggcctgatgttttccgtcagccttggcgcctcaaaagagctttgggacagccgcccggctgggagcggctggagctggaaggattttgcctgggatgtcgccggcgcgaccaccggctacgctgtatggcagttggctcatcagtaa

SEQ ID NO: 135866 - DNA, 1299 bp, Enterobacter cloacae
atgacagaaagtagcattaccgaacggggcgcgccggaactggccgatacccgtcgtcgtatttgggcaattgttggcgcttcctcggggaatctggttgaatggtttgatttttacgtttactcattctgctcgctctatttcgcgcacatcttctttccatccggaaataccaccacccaactgctgcaaacggcaggcgtatttgccgccggatttctgatgcgtcctatcggtggatggctgtttggtcggatcgctgaccgccggggacgtaaaacgtccatgcttatctcggtctgcatgatgtgctttggctcactggtgattgcctgtctgccgggttatgcggtgatcggcacctgggccccggcgctgctgctgctggcgcgtctgttccaggggctgtctgttggcggagaatacggcaccagtgcgacctatatgagtgaagtcgcggtggagggaaagaaaggcttctatgcctccttccagtacgttacgctgattggtggtcaactgctggctgtattagtggttgtggcgctccagcaggtgcttagcgatgaagatctccatgcctggggatggcgtattccttttgccctcggggcggtactggctatcgtcgcgctgtggctgcgtcgccagctggacgaaacctcgaagcaggagacccgggcgctgaaagaggctggctcatttaaagggttgtggcgcaatcgccgggcctttgcgatggtgttaggctttaccgccgccggatcgctgaccttctacaccttcaccacttatatgcaaaagtatctggtcaacacggcgggcatgacggccagcaccgccagcgtgatcatgaccgcggcgctgttcgtttatatgctggttcagccgctattcggcgccttctcggataaagttggccgccggacctccatgctgtgctttggcgtgctggcgacgttatttaccgtgcctattctcagcgccttgcaaaaagtgagctcaccctatgccgccttcggcctggtgatctgcgccttactgattgtcagtttctatacctcgatcagcggcatcctgaaagcagagatgttcccggctcaggttcgcgcgcttggggtcgggttgtcctatgccgtcgcgaacgcattgttcggcggctctgcggagtacgtcgcgctgtcgcttaagtcggcagggatagagcacgcgttctactggtatgtgacggtgatggccgccattgccttccttgtctccctgatgttgcatcgcaaagggaaggggttgcgtctgtaa

SEQ ID NO: 135867 - DNA, 201 bp, Enterobacter cloacae
gtggtctaccagaacctcagcgaagccgatttcgccgccgcgctgaaaagcgtcggcctgccggccgggcttgccgatatgctggcggattccgacgtcggcgcgtcgaaaggcgggctgtttgacgacagccgcaccctgagtacgctgatcggccgcccgaccacctcccttgccgagagtgtaaaaggcattctgtaa

SEQ ID NO: 135868 - DNA, 825 bp, Enterobacter cloacae
atgcagggcgtaccactccaatttagtgatgaaaaagaccgcgcgcgctttcgccatctcgaacagctgcccggggtggagctttaccacgcccatatatcccgctacgcctttgaaccccatacccacgaagccttcggcatcggcgtgattgagcaaggcgcggagcgctttcgctaccgcggcagtcagcatattgccgccgcaaactccattgtcaccatgaatcccgacgagctgcacaccggcgaagcggaaaccgccgacggctggcgctaccggatgatttatctggagccggaccgtctggaagccatcaccggggtgcgcgactggtggttcagcgaggtggtccgcgaggatcccctgcgttcccgacaaattggccagctgatttatggcctgtggcatagcgacgatccgctggcccagcagggaatgctgctcgacctcatcgacaccttccgccctctggcccaccatgcctctgcgcaaggtgaggccgggcaccgctttgaccgcgtgcgcgactacctgcacgataactatatgcgtcccatcaccctcgacgagttggcgcaggtggcggcgctgagcccgtaccactttcagcgccagtttaaagcccactatcacgtaacgccccatcagatgctgatggccatccgtctgtggcgcgccaaagcgttcctcacccacggcatgcccgccgccgaagtggcgatagccgtcggcctcaccgaccagtcccacctgacccgcgccttcacccagcgttacggcattacgccggtgcgctatcagaagcaggtcgccaggcgctaa

SEQ ID NO: 135869 - DNA, 972 bp, Enterobacter cloacae
atgattagtggtgtgttatacgccctgctggcggggctgatgtggggtttaattttcgtcgggcctttgctggtgccagagtatccggcgatgctgcagtcgatgggacgctatctggcgctgggcctgatcgctctgccgctggcgtggctcgggcgcgcgcgactgcgccagttgagccggcacgactggtggaccgcgctgggcctgacaatgatggggaaccttatctattacgtctgcctggccagcgccattcagcgcaccggggcgccggtttctaccatgattatcggcacgctgccggtggtactgccggtgttcgccaatctgctctacagccagcgcgacgggaagctgccgtggcggcgcctgtttccggcgctcatctgcatcgctgtgggtctgatctgcgttaacgtcgcggagctgcgtcaggggctgccgaattttagcccgtggcgctacggctccggcattgcgctggcgctgggatcggtggtctgctgggcctggtatgccctgcgcaacgcccgctggctgcgggagaacccgcatcaaccgccaatgatgtgggctaccgctcaggcgctggtgacgcttccggtttcgctggccggctatctcgccgcctgcgcctggctgcacggtcagcaggccgggtttcccctgcccttcggcccgcgtccggcggtgtttattacgctgatgctggccatcgcggtgctctgctcatgggtcggcgcgctatgctggaatattgccagccagcggctgccgacggtgatcctcggcccgcttatcgtcttcgaaaccctggccggactgctgtataccttcctgctgcggcaaagcttaccgccgctgctgaccctgagcgggatcctgctgctggtgctcggcgtggtctctgccgtacgcgccagaccggaaaaaccgatgctgcagccgctggcggacgaaaaaaagtag

SEQ ID NO: 135870 - DNA, 663 bp, Enterobacter cloacae
atggctttccgtgaccaacctttaggcgagctggcgctgaccatcccgcgcgcctccgccctgttccgtcaatacgatatggattactgctgcggcggcaaacagaccctggcgcgcgccgcgtcgcgcaaagcgctggatgtcgcggtgattgaagccgagctggcgaaactggccgaacagcctctctcccgcgactggcgcgcggcgcccctcgcggagattatcgaccatatcatcgttcgctatcacgaccggcaccgtgaacagctgccggagctgatcctgcaggccaccaaggttgaacgcgtccatgccgataaaccgaacgtaccgaaagggctgactaagtacctgaccatgctgcatcaggagctttccagccacatgatgaaagaggaacagatcctgttcccgatgatcaaacagggaatgggcgcccaggccggggggccgatcagcgtgatggaaagcgagcatgatgaagcgggtgaactgctggaagtcattaagcacatcacccacaacgtgacgccgccgccggaagcctgtaccacctggaaggcgatgtataacggtatcaacgagatgatcgacgatctgatggaacacatcagtctggaaaataatgtgctgttcccgcgcgccctcggcggaaagtaa

SEQ ID NO: 135871 - DNA, 1404 bp, Enterobacter cloacae
atggtagatcaggttaaagtcgctgctgtcgagcaggagccgactgaacaatcgctacggcgaaatctcacaaaccgacatattcagctgatcgcgattggcggagcgatcggcaccgggttatttatgggttctggcaaaaccatcagccttgccggaccatccattatctttgtttatatgattatcggttttatgctgtttttcgtgatgcgtgccatgggcgaattactgctgtcgaacctcgaatataaatcctttagcgacttcgcggccgatctgctggggccgtgggcgggctactttaccggctggacctactggttctgctgggtagtgaccgggatggcggacgttgtcgccatcaccgcctacgcgcagttctggtttcccggactctccgactgggtcgcctcgctggcggtgatcctgctgctgctgggcctgaacctggccaccgtcaagatgtttggcgaaatggagttctggttcgcgatgatcaaaattgtcgccatcgtggcgctgatcgtggtcggcctggtaatggtgatgatgcatttcaaatcgccgaccggggtcgaagcctctttcgcccacctgtggaatgacggcggctggttcccgaaagggctgagcggcttcttcgccggcttccagattgcggtgtttgccttcgtggggattgagctggtgggtaccaccgccgccgaaaccaaagacccggaaaagtccctgccgcgagcgattaactccatcccgctgcgtatcattatgttctacgtcttcgcgctgattgtgattatgtcggtgacgccgtggagctccgtggtgccgagcaagagcccgttcgttgagctgttcgtgctggttggtctgccggcggcggcgagcctgatcaacttcgtggtgctgacctccgcggcctcctcggccaacagcggcgtgttctctaccagccgtatgctgttcggtctggcgcaggatggtcaggcgccgaagatgttcgccaagctgtcgaagcgtgcggtgccggcgaagggcttaaccttctcctgcatgtgtctgctgggcggggtggtgatgctgatggtcaacccgagcgtgattgccgccttcaccatgatcaccacggtgtcggcgatcctgtttatgttcgtctggaccatcatcctttgctcttacctggcgtatcgtaaaaaccgcccgcagctgcatgagaagtcaagctacaagatgccgctgggtaaagtgatgtgctgggtgtgcatggccttcttcgtctttgtgctggtgctgttgaccctggaagacgatacccgtgaagcgctgatggtcaccccgctgtggtttgtgctgctgggcgcgggctggctgtttgctggcaaaaaacggctggcgaaataa

SEQ ID NO: 135872 - DNA, 621 bp, Enterobacter cloacae
atggcaaccccaacttttgacactatcgaagcgcaggcaagttacggtatcggcttgcaggttggacaacagctgagcgaatccggcctgcaggggctgctgccggaagcgctggtggcgggtatcgccgatgcgctggaaggtaaccagccgcaggtgccggtggaagccgttcaccgcgcgctgcgtgaaatccacgagcgtgctgacgctgtgcgtcgcgagcgttttcaggccatggccgctgacggccaaaaataccttgatgaaaaccgcgagaaagagggtgtgaacagcaccgagtctggtctgcagttccgcgtactgacccagggcgaaggcccgatcccggcgcgtactgaccgcgttcgcgtgcactacactggcaaactgatcgacggcaccgtcttcgacagctccgtcgctcgcggtgaaccggctgaattcccggtgaccggcgtgatcggcggctggattgaagcgctgactctgatgccggtaggttccaaatgggaactgacgatcccgcacaacctcgcctacggtgagcgcggcgctggcgcatcgattcctccgttcagcaccctgatcttcgaagttgaactgctggacattatctaa

SEQ ID NO: 135873 - DNA, 675 bp, Enterobacter cloacae
atgcccgggcgctttgaactgacatctaccctggcgaaaatctggcacgccccggatcattttcgcctcctggacccgctgcctccgatgcaccgccggggaattatcgctggcttcctgttggttattatcggtattctgcttccctccgatgatagccaaagcccggcgtccaccagccgtgaagcgaacctgagtctacagtcgcagtcccagccgcaagctggcggcaatcaggccgttccgctgccgccgatcactaatacgcctaccgtgagcgacgccgatcagatggcgccggtcgccccggagccgattcaggatgagcagccggatcaagcgcagacgcagcagcccgccgccacccagtcttatcaatcctcatcacagcagtccgcgccgggtattgagcagcaatggcggacctatcgcatcgagtcaggcaaaaccctggcgcagctgttccgcgatcatgggctgccggccactgacgtctacgccatggcgcaggttgaaggcgctggcaagccgctaagtactttgcagagcggacagacggtgcagattcggcagaacgccaacggcgtggtcaccgggctcactatcgataccggcaacggccagcaggtgctgtttacccgccagtcgaacggcagctttgtgcgtgcgcgatag

SEQ ID NO: 135874 - DNA, 450 bp, Enterobacter cloacae
atgcaagttattctgcttgataaagtagcaaacctgggtagcctgggtgatcaggttaacgttaaagcgggctacgctcgtaacttcctggtcccgcagggtaaagctgttcctgctaccaagaaaaacgttgaattcttcgaagcacgtcgtgctgaactggaagccaaactggctgacgttctggcagcagctgaagctcgtgctgagcagatcaacgccctggaatccgtaaccatcgcgtctaaagctggcgacgaaggtaaactgttcggttccatcggtactcgcgacatcgctgacgctgttactgcagcaggcgttaaagttgctaagagcgaagttcgcctgccgaacggcgttctgcgtaacgttggcgagcacgaagtgaacttccaggttcacagcgaagtattcgctaaagttatcatcaacgtggttgctgagtaa

SEQ ID NO: 135875 - DNA, 228 bp, Enterobacter cloacae
atggcacgttatttccgtcgtcgcaagttctgccgtttcaccgcggaaggcgttcaagagatcgactataaagatatcgctacgctgaaaaactacatcaccgaaagcggtaagattgtcccgagccgtatcaccggtacccgtgcaaaataccagcgtcagctggctcgcgctatcaaacgcgctcgctacctgtccctgctgccgtacactgatcgtcatcagtaa

SEQ ID NO: 135876 - DNA, 315 bp, Enterobacter cloacae
atgaccaatcgtctggagctgtccggcattatttgcaggactccacttcgtaaggtcagcccgtcaggaattcctcactgccagttcgtgcttgagcatcgttcagtgcaggaggaagccggttttcaccggcaggcatggtgtcagatgcccgttattattagcggtcatgagaaccaggccattactcacagtataacggtcggtagcgcagtaaccgttcgagggttcatctcttgccataaggcaaagaacggcttgagcaaaatggttctgcatgccgagcagattgaattgatagattctggagactag

SEQ ID NO: 135877 - DNA, 396 bp, Enterobacter cloacae
atgcgtcattacgaaatcgtttttatggtccatcctgaccagagcgaacaggttccgggcatgatcgaacgttacactggtgcaattactgcagcagcaggtacgatccaccgtctggaagactggggccgccgtcagctggcttatccgatcaacaaactgcacaaagctcactacgttctgatgaacgttgaagcgccgcaggaagcgatcgatgagctggaaactaacttccgcttcaacgacgccgttatccgcagcatggtaatgcgtactaagcacgctgttaccgaagcatctccgatggttaaagcgaaagacgagcgccgtgagcgtcgcgaagatttcgccaacgaaaccgcagatgattctgaagctggggattctgaagagtaa

SEQ ID NO: 135878 - DNA, 276 bp, Enterobacter cloacae
atgaaactgaaaatcatcgccatgatggctgcgcttttcttcagcgccaacgcgctggcagctatccaaatcaccgaacgtcaggcccgcaacatggacgacgtgcagagcctcggcgttatctatatcaatcacaatatggccactgagcacgaggccgaacaggcccttagccagatgagcgatgcgcagggggcgaaatactttcagcctatcctgatgcacgaacccgaaaccaacggcccgcttcgcgccagcgcggtgatataccgctaa

SEQ ID NO: 135879 - DNA, 1194 bp, Enterobacter cloacae
atggttccgcgtttcgccaccttaggccgtatccccaaaggcgtttgggtactcggcggcgtcagcctgctgatggatgtctcctccgagatgatccacagcctcttaccgctgtttatggccactaccctcggcgccagcgtgataattatcggtcttatcgagggactggcggaagccaccgccctgatcctgaaggtcttctccggcgcaatcagcgactatgtcggcaagcgtaaaggactggcgctgctgggctacggcctgggcgcgctcagtaagccgctgtttgccttcgcccctaccgccggggtggtgtttagcgcccgcatgattgaccgcgtaggcaaaggtattcgcggcgcgccgcgcgatgcgctggtcgccgacgtcaccccgccggagatccgcggcgccgcctacggactacgccaggcgctggataccgtcggcgcctttctcggcccgctgctggcggtgctgctgatgtttatctgggccaacgattttcacgctattttctgggtggcggtcattcccgccgtgctctccattctcctgctcggattcggcctacaggagccaaaatccgccatcgcgcacaaacgcagcaatccgctgaagcgcgaaaacctgaaaaagctctccgccgcctactggtgggtggtcgcgatcggcagcattttcaccctcgcccgcttcagcgaagcctttctggtgctgcgcgcccagcagatggagatcccgctctataccatcccgctggtgatggtggcgatgaacctggtctacagcctcacggcttacccgttcggtaaactctcagacagcatgagccacagcaaactgctgcagtgggggctgctggtgctgatcctcgccgatatcgtgctggcgctcagcggccactggagcacgctgctgatcggcgtcgcgctgtgggggattcatatgggaatgacccagggcctgctggcggcgatggtcgcccatacggcgccaccggagctacgcggcacggcgttcggtatgtttaatctgatgagtggcctggctctgctgctggccagcgccggcgcgggggtactgtgggaaaccttcggcgccgcctcgacgttttacgccggggcgataatttgcgtggtcacgctcatcggcatgcgcgtgatgccgtcggcctatcgtcaggattaa

SEQ ID NO: 135880 - DNA, 687 bp, Enterobacter cloacae
atgcaacagctgaaacagcaggtgttcgaggccaatatggatctgccgcgctacggcctggtgacctttacctggggtaacgttagcgccattgatcggcagcgtgggctggtggtgattaagcccagcggcatcgcctacgagtcaatgaccgtcgatgacatgtcggtggttgatctgcaggggcacgtggtggaagggcgctggcgtccctcctctgataccgccacccatctggcgctctatcgccgttatcccgaccttggcggggtggtgcatacccattcgacgcacgccaccgcctgggcgcaggcggggctggcgatcccggcgctcggcaccacccatgcggactacttcttcggcgatattccctgcacccgggcgcttagcgcacaggaggtggacgaggcctacgagctgaacaccgggcaggtgattatcgaaacgctgggtgaggccaatccgctgcatacgccggggatcgtcgtctatcagcacgggccatttgcctggggcaaagacgcccacgaggcggtacacaacgcggtggtgatggaagaggtggcgcgcatggcgtggattgcccgcggcattaatccgcagttgcagcccatcgatagctggctgatgaataagcattttcagcgtaagcatgggccaaacgcctactatgggcaaaagtag

SEQ ID NO: 135881 - DNA, 426 bp, Enterobacter cloacae
atggccagccgagcccaggtaaccctggcgatggagatcatggactacccgctgatgaactcgatcagtaaagcgctgggctatgcccattacctgaataatccgtggttccagctttacccggatatcggcaatctgtcggcgtgggataacgacgtccagatggagctgaaggcggggagcgggcatatcgtggcggtacacgtcaaagacacgaagcccggcatctttaaaaacgtgccgttcggcgaaggggtggtcgattttgaacgctgcttcgaaacgctcaagcagaccggctactgcggaccgtacctgattgagatgtggagcgaaaccagcgctgacccgctggcggaggtggcgaaggcgcgtgactgggtgaaggcgcggatggcccgcgcgggtctgatggaggcggcataa

SEQ ID NO: 135882 - DNA, 399 bp, Enterobacter cloacae
  misc_feature (353)..(362): n is a, c, g, or t
atgttggcgaaatccattccgctcggcatctatgaaaaagcgctccccgccggggagtgctggctggagcggctaaagcttgcaaaagcgctgggctttgatttcgttgagatgtctctcgatgaaacggacgcccgccttgcgcggctggactggagcccggagcagcgtctggcgctggtcaaggcggtggctgaaaccggcgtccgggtgccgtcgatgtgccttagcgcccatcgccgttttccgctgggtagtgaagacgacgcggtgcggcatcaggggctggaaattatgcgtaaagctattcagctggcgcaggatgtggggattcgggtgatccagctggcagnnnnnnnnnncaggctacgacgtctattaccagcaggcgaacgatga

SEQ ID NO: 135883 - DNA, 651 bp, Enterobacter cloacae
atgtcattacctatgttacaggtcgccctggacaaccaaacgctggccagcgcttatgaaacaacccgtctgatcgccgaagaggtagatatcattgaagtcggcactatcctctgcgtcggtgaaggtgtacgcgcggtgcgcgatctgaaagcgctgtatccgcataaaatcgtgctggcggacgccaaaattgccgatgccggcaagatcctgtcgcggatgtgcttcgaagccaacgccgactgggtcacagtgatctgctgcgccgatatcaacaccgccaaaggggcgctggatgtcgccaaagagttcaacggcgatgtgcaaattgagctgaccggcttctggacctgggagcaggcgcaggcgtggcgcgaggcgggtattcagcaggtggtctatcaccgcagccgcgacgcgcaggcggcaggcgtggcgtggagtgaggcggatatcagcgcgattaagcgtctgtctgatatgggcttcaaagtgaccgtcaccggcgggctggcgctggaagacctgccgctgtttgccgggatccctgttcacgtctttattgccggacgcagcatccgcgatgctgcctcgccggtggaagcggcgcgccagtttaaacgctctatcgcccagctgtggggttaa

SEQ ID NO: 135884 - DNA, 468 bp, Enterobacter cloacae
atgaaactccatgaatcactggcgcagaatcactccattcgcctgcaggcggaagcggaaacctggcaggaggcggtgaaaatcggcgtcgatctgctggtggccgccgacgtggtggaaccgcgctactaccaggcaatcctcgacggcgtcgcgcagcacggcccctattttgtgatcgctccgggattagccatgccgcacgggcggccggaagagggcgtcaaaaaaaccggctttgcgctggtcacgctaaagaaaccgctgattttcaaccacgaagataacgacccagtcgacatcctgatcaccatggcggcggttgacgccaccacccaccaggaagtgggcatcatgcagatcgttaacctgtttgatgacgaagccaatttcgaccgtttacgcgcctgccgcagtgagcaggaagtgctggatttaatcaaaaacgccaccgcggcggctgtttaa

SEQ ID NO: 135885 - DNA, 306 bp, Enterobacter cloacae
atgaccgtacgtattctggctgtgtgtggtaacgggcaaggcagttccatgatcatgaaaatgaaagtggatcagttcctgacgcaatccaatatcgaccacacggtgaacagctgcgcggtgggtgaatacaaaagcgaactaaacggcgcggatatcatcatcgcttcaacccatatcgcgggggagattaccgtctccggcaataaacacgtggtgggggtgcgtaatatgctttcccccgcggatttcgggccaaagctgctggaggtgattaaagctcatttcccgcaggacgtgaaataa

SEQ ID NO: 135886 - DNA, 1401 bp, Enterobacter cloacae
atggcaatcctctacaacatctttaccgttttctttaatcaggtgatgaccaatgccccgctgctgctgggtatcgtcacctgtctgggctatatcctgctgcgcaaaagcgtcagcgtgattattaaaggcacgatcaaaaccattatcggcttcatgctgttacaggccggctccggcatcctcaccagcacttttaaaccggtggtggcaaaaatgtcagaggtgtacggcatcaacggcgcgatctctgacacctatgcctcgatgatggcgaccatcgaccggatgggcgaggcctatagctgggtgggctacgcggtgttgctggcgctggcgctcaacatctgttacgtcctgctgcgccgtctaaccggcatccgcaccatcatgctgactggccatatcatgtttcagcaggcggggctgatcgccgtctcgttctttatctttggttacggaatgtggacgaccatcatctgtaccgccgtgctggtctccctgtactggggtatcacctccaacatgatgttcaagccgactcagctggtcaccgacggctgcggcttctccatcggtcaccagcagcagtttgcctcgtggattgcctacaaagtggcgccgtatctggggaaaaaagaggagagtgtggaagacctcaagctgccaggctggctcaatatcttccacgacaacattgtttccaccgcgattgtcatgaccattttctttggcgcgatcctgctttcctttggtattgacgtcgtgcaggcgatggcggggaaaacccactggacggtctatatcctgcagaccggtttctccttcgcggtggccattttcatcattacccagggcgtgcggatgttcgtcgccgaactgtccgaagccttcaacggtatctcgcaacgcctgatccccggcgcggtgctggcgattgactgcgccgcgatctatagctttgcgccgaatgcggtggtgtggggctttatgtggggcaccatcggccagctgattgccgtcggcattctggttggcattggctcttcaattctgattattccgggctttatcccgatgttcttctccaacgcgacgattggcgtctttgccaaccacttcggcggctggcgcgcggcgctcaagatctgcctggtgatgggcatggttgaaattttcggttgcgtgtgggcggtgaagctcaccggtatgagcgcctggatgggaatggcggactggtcgattctggcgccgccgatgatgcagggcttcgcctccatcgggctggcgtttatggccgtcatcatcctgattgctctcgcttatatgttctttgctggccgcgcgctgcgcggcgaagaagacgcggaaaaacaactggcagaggcctctgcccaataa

SEQ ID NO: 135887 - DNA, 1065 bp, Enterobacter cloacae
atgagtaaagtacagaccatcacccgtgaatcatggatcctgaacacctttccggaatggggcagctggctgaatgaagagattgagcaggagcaggttgcgcccggcaccttcgccatgtggtggctcggctgtaccggtatctggttaaaatccgaaggcggggctaacgtctgcgtcgatttctggtgcggcactggcaaacagagccacggcaatccgctgatgaaaaccggccaccagatgcagcggatggcaggcgtgaaaaaattacagcctaacctgcgcaccacgccgttcgtgctggatccgttcgccattcgccagattgacgcggtcctcgcgacccacgatcacaacgatcatattgacgtcaacgtcgccgccgccgtcatgcagaactgcccggccgatgtgccgtttatcggcccgaaaacctgcgtcgacctgtggatcggttggggcgtgccgaaagcgcgctgtatcgtcatgaaacctggcgatgtcgtgaagatcaaagacattgagatccatgcgctcgatgcgttcgatcgcaccgcgctgatcaccctcccggcggaccaaaaagccgctggcgtactgccggacggcatggaccagcgcgcggtcaactacctgtttaaaacaccgggcggcaacctgtaccacagcggcgattcccactactccaactactacgcgaagcatggcaacgagcatcggattgacgtcgccctcggctcgtatggcgagaacccgcgcgggatcaccgacaaaatgaccagcgccgatatcctgcgcatggcagagtcgctcaacgccaaagttgtgatcccgttccaccatgatatctggtcaaactttcaggccgatccgcaggagatccgcgttctgtgggagatgaaaaaggatcgtctgaagtacggcttcaagccgtttatctggcaggtcggcggcaaatttacctggccgctggataaagacaatttcgaatatcactacccgcgcggtttcgacgattgcttcaccattgagccggatctgcctttcaaatccttcctgtaa

SEQ ID NO: 135888 - DNA, 756 bp, Enterobacter cloacae
atgacggaagcgcaaaggcaccaaattctgctggatctgctcgcccaaacggggtttgttaccgtggagcaggtgatgtcgcggctcgggatctcacccgctaccgcccgacgtgatatcaacaagctggatgaaagcggcaaactgaaaaaggttcgtaatggcgcggaagccattagcgaacagcgcccccgctggacgccgatgaacatccaccaggcgcaaaatctggatgaaaaagtgcgtattgcacgcgccgcttcgcaactgatcgcgccgggtgagagcatcgtcattaactgcggctccaccgcctttctgttgggtcgggaactgtgcggcaaaccggtgcagatcatcaccaactatctgccgctggctaactacctgatcgaccaggagcatgacagcgtgattatcatgggcggccagtacaaccgcagccacgccatcaccctcagcccccacggtagcgagaacagcctctatgccggacactggatgtttaccagcggcaaagggctcaccgccgaaggcctctacaaaacggatatgttgaccgccatggccgagcaaaaaatgcttaacgtggtcggcaaactggcggtgctggtcgacagcagcaagatcggcgagcgcgccgggatgctattcagccaggccgggcaaatagacgtggtgatcaccggcaaacaggccgatgccgcgatcctcaaacagcttgaggatcaaggcgtcagcgtaatccgcgtttaa

SEQ ID NO: 135889 - DNA, 717 bp, Enterobacter cloacae
atgattgcactagaaatgcgcaacctcggcggtggtgaaattttacatgcctgtccgcaggagagtctggataagcccttgccctgtatcgtcttttatcatggctttacctcgtcgaagctggtctacagctactttgcggtggcgctggccgaggccggattccgggtgatcatgccggacgcgccggagcatggggcgcgctatcagggcgatgaggccgggcggatgcagcgcttctggccgattctgcagcagaatttcagggagtttcctgcgctgtgcgaggcgataatcgctgaaggatggctggaaggggagcggctggcggtggcgggcgcttcgatggggggaatgacggcgttgggcatcatgacgcatcaccccgagctgaacagcgtcgcctgtctgatggggtcgggctattttcgttccctgtcgcaaaccctgttcccctcgcctgattttgatgtcgatagcctcaacgaatgggatgtcagccatcagctggcgtcccttgcccggcgaccgctgctgctctggcatggcgatgccgatgacgtggtgccgccggaagaaacctttcgactagaacaggcgctccggcaaggcgatcttgccgccaggctgacctgcgtctggcagaaaggcgtccgccatcgcattacgccagaggcgctggctaccacggtcgccttttttcagcagcacctttaa

SEQ ID NO: 135890 - DNA, 309 bp, Enterobacter cloacae
atggttatgcgcaggttttcaccgtggttactggctatcgtcctcagcgggtgtagcgccctgcagggaacgccggaagccccgccgcccgccaccgaccatccgcaggagatccagcgctaccagacggctggcctgcagaaaatggccacggtaagcgtactgatgtacggttcgccgatggatgtcgaagcggcgctgaaggccaaagcagaagcggccaaagccgattactacgtcatcatcatgatcgatgacaccatggtacccggccagtggtattcgcaggcgatcctctatcgtcgataa

SEQ ID NO: 135891 - DNA, 276 bp, Enterobacter cloacae
atgaaacgatcttttaccctatccagcctgctgttaaccgctgcgacggccaatacgtccgcgcagtcagccgaattcgccagcgcggattgcgtcactggcctgaatgaaatcggtctgatctccgtcactaatctttccggtagccaacaggatgtagagcacgccattgcccgcaaagcagacgagcaaggcgcctcctggtatcgcattattcagatgtacgaggaacaacagccggacagctggcgcgtgcaggccattctctacgcctga

SEQ ID NO: 135892 - DNA, 1638 bp, Enterobacter cloacae
atgcactggcaaacgcacaccgtttttaatcaacccaccccgctgaataacagcaatctgtttctgtccgataccgctctgcgtgaagccgtggtccgcgaaggcgccggctgggatggcgatctgctcgccagcattggccagcagctggggacagccgaatcgctggagctgggacgcctggccaacagcaatccgccggagctgctgcgctatgacgccaccggcgcccggctggacgacgtgcgcttccatcccgcctggcacctgctgatgcaggggctgtgcgcgaaccgggtacataatctcgcctggcaggaggatgcccgcgaaggcgcgtttgtcgcccgcgccgcccgctttctgctccatgcccaggtggaggccgggacgttgtgcccgattaccatgaccttcgccgcaacgcccctgctgcagcacgccctgcccgcgccctttcgcgactggctgtcgccactgctgagcgaccgttacgatccgcaccttgcgcctggcggccagaagcgcggcctgctgatcggcatggggatgaccgagaagcaaggggggtctgatgtgctgagcaataccactcgcgcggagaaaacggcggaagggttttaccgactggtgggacacaagtggttcttctcggtgccgcagagcgatgctcacctggtgctggctcaggctccgacggggctctcatgcttctttgtgccgcgtctgctgcccgacgggcagcgtaacggcgtgcgtcttgaacgcttaaaagagaagctcggcaaccgctccaacgccagtagcgaagtggagttttatgatgcctgcggctggctggtgggcgacgaaggcgacggcgtgcggcagatcctcaggatgggcggcctgacccgctttgactgcgcgctgggcagccatgccctgatgcgtcgcgccttctcggtggcgctgtatcacgcgctacagcgtcaggcgtttggcaaaaaactggtcgaacagccgatgatgcgccagctgctggggcaaatggcgctccgtctggaggggcagaccgcgtttctgtttcgcctggcgcgggcctgggaccgtcgggatgatgcccgggaaagcgcctgggcgcgcctgtttacgcctgcggccaagtttgccatctgtaaggccggtatcccgtttgtcgccgaggcgatggaagtgctgggcggcatcggctattgcgaggagagcgaactaccgcggttgtatcgcgagatgccggtcaacagcatctgggaaggctccggcaatattatgtgcctcgatgtgatgcgggtgctcagcaagcagccggcggcgatggagctgctggccgcggagtgtgcggaggtgaaaggacagaaccgccatctcgaccgcgcatggcgtcagctgcagcaactgctgaaacgacccgccgaagagcaggggagagagattgcccggctggtctatcgtcttggcgcgggggcgcagatgctgcgccatgcttcgccgccgctggccgaagcctggtgccggatgatgctcgacacccgcggcggcatacgtcttgacgcgccgaccctcgacgacctgctgctgcgggctatggggcgcgggcgccaggcgcctcaggcgtag

SEQ ID NO: 135893 - DNA, 1167 bp, Enterobacter cloacae
atgctgcgacacactattcctgtacgcagggatctggatcggattgcggacgatcacggtttcgattttcatgtaattgacaacgagatttactgggacgagagtcgagcctaccgctttacattacgccagatagaagagcagattgaaaaaccgaccgccgagttgcatcaaatgtgcctggaggccgttgatcgagcggtgaaggacgaacagctgttgcagcagctggcgatcccaccgctatactgggatgcgattgctgaaagctggcgccagggggatccttctctctatggccgtatggattttgtatggtgcggtgccgacgctccgcttaagttgctggaatataatgcggatacgccaacgtcactttacgaagctgcctggtttcaatggttttggctggaagacgccagacgcagcggggtgatcccgcgtgacgccgaccagtacaatgcgattcaggaacggctgattgcccgctttagtgaactttacagcccggaaccgctctacttttgctgctgtgaagggagtgatgaagatcgcacgacggtgctttatctccaggactgtgcgcaacaggccggtcaggaaactcgttttctctatgttgaagagctgggactcggcgtcggcggtatgctgaccgatttggatgacaacgttatccgtcgggcgtttaagctttatcccctggagtggatgatgcgagatgataatggcccgctgctgtgtaagaggcgagagcggtggatcgaaccgttatggaagagtgtactcagtaacaaagggttgatgccgctgctatggcggttctttccccgtcatcctaatctgctacccgcctggtttgccaatgaatcgccacagatcgcgccgggcgagagctatgtgcgtaaaccgatcttttcacgtgaaggcggcaacgtcaccatctttaatggtcagcagcagattatcgaacatgctgatggagactacgcggaagagcccatgatctttcaggccttccagcccttgccgcgctttggtgacagctacacgctgattggcagctggatcgtggatgatgaggcttgcgggttggggatccgggaagataataccttgatcactaaagatacttctcgttttattcctcactatataaccggctaa

SEQ ID NO: 135894 - DNA, 651 bp, Enterobacter cloacae
atggctaaaaaacgtaaatccagatcccgtaatacggcgcaaaataaagcccaggccactcacgcttccctcgcgcgggttaatcgcccggcgagcgcggtgcaggcaaaacgaaaccgctacagcggcaaatacctgaccctggctattatgggcggcgcggcgttctttgcgcttaaggcctgtagcgatgatacgaatgcggataatggcggtgacggcgtgttttactcctccgtcaatgattgtatcgatgggggtaacagcgccagcgtctgcactcacggctggaacaatgcgaagtcggaattttttgcccatgtgcctaagcaaatgagccaggaaagctgcgaggcacagtatgtcgactgctattttgacagcatcgatcggagctggacgccgatgatgagcggttttttactcagccgggcggtgcgtaaaggtcgcgatgaagaatatacctattacaatggcggctcgtcctattcttccagggctgtctggcgaacatcgtcgggcgcgtatgcctggcgcagtggtaaaaacgatattgccaccagccatacgctggctgcgaaaaaaacggcgactgtttctcgcggcggctacggacgatcgtccagcgcgcgcggccattggggaggttga

SEQ ID NO: 135895 - DNA, 399 bp, Enterobacter cloacae
atgcacgttctgaactcattactggctttttgtacctatttttttatcggtgcagcgatggtgatcttgtttctttttatctattccaaaatcaccccgcataatgaatggcagctgataaaaaataacaatacgtcggcctcgctggcgtttagcggaacgctgttgggatatgctattccattatccagcgcggcgataaacgccgtcagtattgctgattatttagcctggggtgtcattgccctggtagtacagctgattatctatggtggtgtacggctatatatgccggcgctaagcgaaaaaattattaatcacaatattgccgcaggcttatttatgggctctgctgcgctggccggcgggatttttaacgccgcctgcatgacatggtaa

SEQ ID NO: 135896 - DNA, 660 bp, Enterobacter cloacae
atggcccatttttttcagcgtctttttgctaaaaagagtacgccgactcccgtacgcggtccgctggggttacatcttaaagcgggttttacgctggataccctggcgtttcgtctgctggaggataaccttctgattgagctgccgggcgaggcatataccattgccgcgaccggtcaaattgatttggggggcggcagccggatttatcgttactacaccagcggcgatgagtttctgcaaattaatactactggtggggcggatgtcgatgatatcgatgatattaagctctttgtctatgtccaaagcgatggtatcagccaggaaaaatactggcgttcggcaatcagcccagcgagtattggtaccccgacatttagctggcgtcagcagcgttggcagcgtttttttaacggcggcgagccagggaacattgcgccagtttatatgctggagaaagtcgaaaatcagcagcatgccgtatgggaggttcataattttacgatgggctatcagcggcaggtagcagaagaaatgtgggagtacctgctgctaaacggagaagagtcgtttaatgaccggggagaatctgaatggctcttctcgtacgcgttgggagtggatattccactcacctcactggatattattgggtaa

SEQ ID NO: 135897 - DNA, 696 bp, Enterobacter cloacae
  misc_feature (616)..(625): n is a, c, g, or t
atgggaatattaaagagcctgtttacgctgggtaaatccatggtctcgcaggccggagagacaattgaggaagcgcagggcgtcaggatcctcgaacaacatattcgcgatgcaaaaagcgcactggataaagcaggccaatcgcgtgtcgacctgctcgcacgggtaaaactaagcaacgataaactgcaagatctgcgtgcgcgtaaagacacgctggaagcacgtgccctggaggcgctgaataaaaatgtcgctgcggatttgattaacgaagtcgctacagagattgcccgcctggaaaacgagattgctgtagaagagcgagtgctcgctaaccttgaattttcgcgcgatggcgttgagcaggccgttcatgcgacagctcaacgtatcgcccagtttgaacagcaactggaagtcgttaaggcgacggaagccatgcagcgggcgcagcaggcggtcacaacatccaccctcggggcgtcttctcgggtctccaccgcggcggaatcacttcggcgtttgcaaactcgccaggcggaacgccaggccaggctggatgctgctgcgcaactagaaaaggtggcggatggaagcgaccttgttgagaagnnnnnnnnnngcattggtacaaccgacaaaagctcggctgaggatgtactggcacgtctgcgtcaacaacagagcaaatga

SEQ ID NO: 135898 - DNA, 405 bp, Enterobacter cloacae
atgggatggattcctcaagcgctcgcgagtgcgctccagcaggcggctgagttaaatgtaaaaattgattataacgatcattcatttatcattataatgaatgattacggcgatctacgacttaatgtgttattcacctcccgacaaataattatcgaaactattatctgtccgctgagcgctattcaacggcaggacttgtttaacgccttcattttacgccatcaaaaattactccctctctcctcggtcgcgatatcccgccttaagaatgatgaatattatgtcgcgtttggtgccctgtcgctcaattcctcgctggaagatgtggtgctggagatcgcgacgctggccgctaatgcgttagatcttgctgagttgatagaacaatatacgaacaaataa

SEQ ID NO: 135899 - DNA, 732 bp, Enterobacter cloacae
atgagtgaaatgatttacggcatccatgcggtgcaggcactgctggagcgcgcacctgagcgttttcaggaagtttatattctgaaaggccgtgaggataagcgcttgctgccgctgatccatgccctggaagcgcagggcgtggtgattcagctggccaaccgtcagtttcttgatgagaagagcgaaggcgctgtgcaccaggggatcattgcccgcgtgaagccggggcgtcagtatcaggagaacgatctgccggatctgctggcgcagctcgatcaaccgttcctgctgatcctcgacggcgtaaccgatccgcacaacctcggcgcctgcctgcgtagcgctgacgccgccggcgtgcatgcggtgatcgtgccaaaagatcgttccgctcagttgaatgcgacggcgaagaaagtggcctgcggcgcggcggagaacgtcccgctgatccgcgtcaccaacctggcgcgcaccatgcgtctgctgcaggaagaaaacgtctggatcgtcggaaccgcaggggaagccgaccatacgctgttccagagcaaaatgaccggcccgatggcgctggtgatgggcgcggaaggcgaaggcatgcgtcgtctgacccgcgaacactgcgatgagctgatcagcatcccgatggcgggcagcgtctcctcgctgaacgtctcggtggctaccggcatctgtctgtttgaagcagtacgccagcgcagctaa

SEQ ID NO: 135900 - DNA, 2433 bp, Enterobacter cloacae
atgtcacaagatccattccaggaacgcgaagctgagaagtacgcgaaccctatcccgagccgggaatttatcctcgaacatttaactaaacgggaaaagcctgccagccgcgatgagctggccatcgagttaaatatcgagggcgaagagcaaaccgaagcgctgcgccgccgcctgcgcgcgatggagcgcgacggtcagctggtcttcacccgccgccagtgctatgccctgccggaacgcctcgatctcctcaaaggaaccgttattggccaccgcgatggctatggtttcctgcgcgttgaagggcgcaaagacgatctgtacctgtcgtcagaacagatgaaaacctgtattcacggcgaccaggtgctggctcagccgctgggcgcggaccgtaagggccgccgcgaagcgcgcatcgtccgcgtcctcgtgccgaaaaccagccagatagttggccgttacttcaccgacgctggcgtcggctttgtcgtcccggacgacagccgcctgagcttcgatatcctgatcccgccggaagaaataatgggcgcgcggatgggctacgtggtcgtggtcgagctgacccagcgaccaacccgccgcaccaaagcggtgggtaaaatcgtcgaagtgctgggcgacaacatgggcaccggcatggccgtcgatatggcgctgcgtacccatgaaattccttatgtctggccgccggcggtggaaaaacaggtttccggtctcaaagaacaggtgccggaagaggcgaaggccggacgcgtcgatttacgctcgctgccgctggttaccattgacggcgaagatgcccgcgacttcgatgacgcggtgtactgcgagaagaaacgcggcggcggctggcgcctgtgggtcgccattgccgacgtcagctactacgtgcgcccggggacgccgctggatgcggaagcgcgcagtcgtggcacctcggtctacttcccgtcgcaggtagtgccgatgctgccggaagtgctgtctaacggtctatgctcgctgaacccgcaggtcgatcgcctgtgtatggtgtgcgagatgacgatttcgtcaaaaggccgtctgaccggttataaattctatgaagcggtgatgagttcacatgctcgcctgacctacaccaaagtgtggcatatgctgcagggtgaccaggaactgcgcgaacactacgcgccgctggtgaagcacattgaagagctgcataacctctacaaagtgctggagagcgcccgcgaagagcgcggtggtatctcatttgaaagtgaagaagctaaattcatcttcaatgccgaacgccgtattgagcgtatcgaacagactcagcgtaacgatgcgcataagctgattgaagagtgcatgatcctggcgaacatctccgccgcgcgcttcgttgagaaggcgcaggagccggcgctgttccgtatccatgataagccaaccaccgaagcgattacctccttccgtaccgtgctggctgagctgggactggagctgcctggcggcaacaagccggagccgcgtgattacgcagagctgctaacctccatcgccgatcgcccggatgcggaaatgctgcagacgatgctcctgcgctccatgaagcaggcggtctacgatccggaaaaccgcggtcactttggcctggcgctgcagtcatacgcccacttcacctcgccgattcgtcgttacccggacctgtcgctgcaccgcgctatcaagtatctgctggccaaagagcagggacataaaggcaacagcaccgagaccggcggctggcactacagcatggaagagatgctccagctgggtcagcactgttcgatgaccgagcgccgcgccgacgaagcgacgcgcgaagtgtctgactggctgaagtgcgacttcatgcaggatcaggtgggcaacatcttctccggcgtgatcgccagcgtgaccggctttggcttcttcgtccgcctgaacgatctgtttatcgacggtctggtgcatgtttccagcctggataacgactattatcgtttcgatcaggtggggcagcgtctcattggtgagtccggcggccagacctatcgcctgggcgaccgcgtggaagtccgtgtggaagcggtcaacatggacgagcggaaaatcgactttaccctgatctccagcgagcgtgcgccgcgtaatgtcggcaagaccgcccgtgagaaagcgaaaaagagtacctctggcaagccgggcggccgtcgccgccaggtgggtaagcaggtaaatttcgagccggacagcgctttccgtaaagagaaagagaccgcccgaccgaagaaagagaaaaaagcgaaaaaaccgtcggcgaaaacacagaaaatcgccgccgcgacgaaagccaagcgcgcggcaaagaagaagatcgccgagtga

SEQ ID NO: 135901 - DNA, 426 bp, Enterobacter cloacae
gtgcagttaacgagtttcaccgattacggactacgcgcgctgatttatatggcgtcgctgccggaaggacgaatgaccagtatctcggaagtgaccgaggtctatggcgtctcccgtaatcatatggttaaaataatcaatcagttaagtcgcatgggctacgtgactgccgtgcgggggaagaacgggggcattcgcctcggcaaaccagcaggacagatccgcgtcggtgacgtggtgcgtgaccttgaacccttatcgctggtcaactgcagcagcgagttttgccacattacaccagcctgtcgtctgaaacaggcactagctgaagccgcgcagagttttctcaaggaactggataactatacgctggctgatttggttgagaagaatcaaccgctttataaattattgctggtggagtga

SEQ ID NO: 135902 - DNA, 804 bp, Enterobacter cloacae
atggaatatcacaacttccagctggtgaacttctacaaagcagaagcggttgactaccagaaagtgctggacgatgtgatggcgattgccgacatcctgaccagcatggtggtggacgtatccgacctgctggatcaggcgcgtcagcgcggcgacttcgtgatgttcgaaggcgcgcagggtacgctgctggatatcgaccacggtacctacccgtacgttacgtcctctaacaccaccgcaggtggcgtggcgaccggctccggcctgggcccgcgttatgtggattacgtactgggcatcattaaagcgtactcaactcgcgtcggtgcaggtccgttcccgaccgagctgtttgatgaaactggcgagttcctctgcaagcagggtaacgaattcggcgccaccaccggccgtcgtcgtcgtaccggctggctggatgcggtcgcagtccgtcgcgcggtgcagattaactccctgtccggcttctgcctgactaaactggacgtcctcgacggcctgaaagaagtgaaaatctgcgttggctaccgtatgccggatggccgcgaagtgaccaccactccgctggctgccgataactgggaaggtatcgagcctatctacgaaaccatgccgggctggtccgaaaccaccttcggcgtgaaagagcgcagcggcctgccgcaggcagccctgaactacatccagcgtattgaagagctgaccggcgtgccggtggatatcatctctaccggtccagaccgtaccgagactatgattctgcgcgatccgttcgacgcgtaa

SEQ ID NO: 135903 - DNA, 330 bp, Enterobacter cloacae
atggaacaagaccaattgcagcgcttggcagaggaagttgctgctgcctatttacgctatcttaaacataaaactggtgatgataaagttacatatgatggagtcacgaagcgtgttgtatttgaagagttggtgtttgctctcgttggtgtgtctcactacaatgctaaaaactcaccagagcacccaattttaagcgatccacataaacatctttctgagatgataaatatattcaccaagccatacacgattactgattttggtattagggttgttgagcatcttaacgagatatccatctataaagagcgcggggctgcgatgtga

SEQ ID NO: 135904 - DNA, 168 bp, Enterobacter cloacae
atgcaaagcaatacgaagaatgaagcgaaactcactttacgctatccgcaggaagtgaaagatgcattcaagaagatcgcaagggaagaagggctttctgagaattccgcactggtacaggctttggtctgggctttgaagtttcgggaaggaatgaatgcacgctaa

SEQ ID NO: 135905 - DNA, 225 bp, Enterobacter cloacae
atgaagcgagtaaaagttgaattctcatccggtggcattgttctcaataatgctgagtttcaggtgttgcagggtgatcgcgtactgattgaggactctttatcagggaagatttctggtgtgttcatccgtaattacgatgtaagcgctgatggcggccctgtgtcgtgtcggttcactaaaggtgatatcccaggcttgaatgtgactgcgactctatgctga

SEQ ID NO: 135906 - DNA, 207 bp, Enterobacter cloacae
atgaaccaggaagatattaatcaaccactgccatattcgcagttttctgagatttcatcgttgagcgtcaccaatgagatcagtctggcgatatccagcaccgccgaactggttaaagactcgtcgagcgtggaacggctgattctcctgaagcatcttcgcgcgctttgcgaactgcaactcaataaattatcagggctggaatag

SEQ ID NO: 135907 - DNA, 360 bp, Enterobacter cloacae
atgaaaatctacgacatcacaccaatcggcaagcctcgcatgacccgcgcggataagtggaaacagcgtccacctgtaatgcgttatcgcgctttttgcgatgaggtccgcctgcgcaagctgaccatgcctgaatccggatcacatgtgacattcgtcctaccaatgccaccaagctggagcaagaagaaacgagctgagttcgctgggaagccccaccaggccaagccagactgcgacaacatgctgagggccctgatggatgcgctttatgagaatgatgctcacatctgggattgtcgcatcacaaaggtctggggagagaaggggcagatcatcatcggggagtgcgcgccgtga

SEQ ID NO: 135908 - DNA, 285 bp, Enterobacter cloacae
atgagtaaaacctaccgcagcaagaagtggctcgccgcagtcggccagattgagcaatgcgtcctgtgcggagcctggggcgtgcaggtggcacaccgcaacgagggaaagggtatcggaatgaaaacagacgactgcgccaccgccgctatctgtgtcacctgccattcagagattgataacgggaaggggctgagtcgtgacgagcgccgccagttaatggatcgcgccatcgtcctgaccattatccagattgcccgtcgtggcttggtggtgcctgcatga

SEQ ID NO: 135909 - DNA, 933 bp, Enterobacter cloacae
gtggggacaagattgcgcattggggtggtcggcttaggcagcattgcgcagaaagcgtggctgccggtgctgggggcggcggaaagctggacgctgcaggcggcctggtcgccgggtaaagagaaggcgctacggatctgcgaaacctggcggatgccatacgctgattccctcgatgccctggcggcacagtgcgatgcggtctttgtccatacctcgacggcttcacattatgaagtagtgaatcacttactgaatgccggggttcatgtttgtgtggataaaccattggcggacaagctgagtgaggcggagacgctggtcgagctggcggcgcgacgtcgactgacgttgatggtcggtttcaatcgccgcttcgcgcctctctatcgggagctgaaggggcggctgggcgaggcggcctcgctgcggatggataaacaccgtagcgatagcgtcggcaacgatctgcgctttacgctgcttgatgactatctgcatgtggtggataccgcgctatggctggccgacggtcagacacgtctgcgcggcggcgcgctgaagatcaccccgcagggcgaaatgctctatgccgaacatcagttcagttcgccccggctgcaggtcaccaccagcatgcatcgtcgcgcaggcagccagcgcgagtgggtgcaggcggtcacggatggcgggctatatgccgtcagcgagatgcgcgaatggcaggaggagtgcggtcatggcgtggtccagcgcccggttgccggctggcaaaccacccttgagcagcgcggctttgtcggctgcgcgcgccattttatcgaatgcgtgcaaaatcagacagttcctgaactgcaggcgaacaggcgctgctggctcagcggatcgttgagaaactgtggcgcgacgccattagcgaataatccattgtaa

SEQ ID NO: 135910 - DNA, 654 bp, Enterobacter cloacae
atgaaatatcagttaactgcgcatgaagcgcgcgtcattggctgcctgctggaaaagcaggtcaccacccccgagcagtatccgctgtcggtaaatgctgtggtgaccgcctgcaatcagaaaaccaaccgcgagccagtgatgtcgctgagcgaaagcgaggtccaggccctgctggatacgctggtgaaacggcactatctgcgcacggtcagcggattcggtaatcgcgtcaccaagtatgaacagcgcttttgcaactccgaatttggcgatctgaagcttagcgccggcgaggttgcggtggtcacgacgctgctgctgcgcggtgctcagacgccgggcgaattacgcagccgggcgcagcggatgtatgagttcagcgatatggcggaagtggaaagcgtgctggaagggctgacgacgcgcgaagatggccccttcgtcgcccggttgccccgggagccgggaaaacgggaaagccgctatatgcatctgttttgcgacgatatggacacgctgatcaccacagtggaagctctcgcgccgctggacgatgacggcgatctgcgcgccagggttgaagcgctggagggcgaggtggcggagctgaaagcgcgcctcgattcgctgttacaccatctgggagactaa

SEQ ID NO: 135911 - DNA, 624 bp, Enterobacter cloacae
atgaaagcaagagtgaagtcagggggactgaaaaaggaaatgtttggctatcgcagtaacgtgccgaaggtgcgtttgacgacggaccggctggtggtgcgcctggttcacgatcgtgacgcctggcgtctggccgattattacgccgaaaataaagcgttcttaaaaccctgggagccggttcgtgacgacagccactgctatccctccggatggcaggcgcgtctgtcgatgatcgctgagtttcataagcaggggtcagctttttatttcgcgctgctcgaccctgaggaaaaagagatcatcggtgtggcgaatttctccaacgtggtgcgcggatctttccatgcctgttatcttggctattccattggcgagaagtggcaggggcaggggctgatgtttgaagcgctgacgtcggcgattcgctatatgcagcgcacgcagcatattcatcgcattatggccaactacatgccgcataatcagcgcagcggcgcgctgctggcgcggttggggtttgaaaaagagggttacgccaaagattatctgctgattgacgggcagtggcgtgaccatgtactgacggcgctaacgacgccggactggtctgcgggacgttaa

SEQ ID NO: 135912 - DNA, 1209 bp, Enterobacter cloacae
atgtcccgcgtctcgcaggcaaggagcctgggtaaatatttcctgttagtcgataacatgctggtcgtgctgggcttttttgtcgtttttccgctgatttccatccgctttgtcgatcagatgggctgggcagcgctgatggtcggcattgcgctcggcctgcgccagctggtacagcagggattaggcatctttggcggcgccatcgccgaccgcttcggcgcgaaaccgatgatcgtcaccggtatgctgatgcgtgccggcggtttcgcggcgatggccgtcgcccatgagccgtgggtgctgtggttctcgtgcatactctccggactcggcggtacactgttcgatccgccgcgggcggcgctggtggttaagctggtgcgtccgcatcagcgcggccgctttttctccatcctgatgatgcaggatagcgccggcgcggtgattggcgcgctgctgggcagctggctgctgcagtatgattttcgcctggtgtgcagcgccggcgccgcgctgtttatcgcctgcgccgcgtttaacgcctggtatctgccggcatggaagctctcgacggtgaaaacgccgattcgcgagggtctgggccgggtgctgcgggacaaacgcttcgtcacctatgtcctgacgctgaccggctattatatgctggcggtgcaggtgatgctgatgctgccgatcatggtgaatgacatcgccggctcgccggccgccgtgaaatggatgtacgccatcgaagccaccatttcgctcaccctgctctatcctattgcccgttggagcgaaaaacgcttccgccttgagcaccggctgatggccggtctgctggtgatgaccctggccatgctccccatcgggatgaccagcagtttacagcagctgtttaccctgatttgcctgttttacatcggctctatcattgccgaacccgcccgcgagacgctgggcgcttcgctggcggacgcccgggcgcgtggcagctatatgggtttcagccgtctggggctcgccttcggcggcgcgctgggttacgcgggcggcggctggctgtttgatgccgggaaagccgtcggccagcccgaactgccgtggctgatgctcggcgccatcggggttatcaccttcctggcgctatggtggcaattcagtccgaaacgctctgcctccggtatgctggagccgcgcacctga

SEQ ID NO: 135913 - DNA, 561 bp, Enterobacter cloacae
atgaaaaagatattgatcgccgccgcgctaattgtcagcggcctgctgagcggctgtaatcagctgacccaatacacggtaagcgagcaggagattaaccaggccctgcagaagcgaaaccatttcgccaaagatattggtctgaaaggcgttgccgacgcccatatcgaactgcagaacctgaccagcgctatcgggcgcgaggagccgggcaaagtcaccctgagcgggatcgccaacgtcgatcttaactccctgttcggtacgcagaaagcgacgatcgatctgaagctcaaagcgctgccaacctttgaccgagagaaaggcgccatcttcctgcaggaaatggaagtggtcgatgccaaagtggcgccggagaagctgcagtcggttattcaggccctgctcccctacctgaatcagtctctgcgcagctacttcagccagcagccggcttatgtcctgcgtgaggacgccagcaccggcgaagcgctggcgaagaaatacgccaaaggtatagaggtgaagccaggcgagattgtcatcccctttaccaattaa

SEQ ID NO: 135914 - DNA, 1047 bp, Enterobacter cloacae
atgacagcacaatcccaggtattgaaaatccgccgcccagacgactggcatatccatctgcgcgatgacgatatgctgaaaaccgtcgtgccttataccagtgagttttatggccgggcgatcgtgatgccgaatctggtgccgcctgtcaccaccgtcgcggcggctatcgcttaccgccagcgcattatggacgccgtgccggccgggcatgattttaccccgctgatgacctgctatctgacagactctctcgacccagcggagctggaacgcggctttaacgaaggggtgttcaccgccgccaagctctacccggccaatgccaccactaactccagccacggcgtcaccagcaccgacgccattatgccagtgctggagcggatggaaaaactggggatgccgttgctcgttcacggcgaagtcactcacgccgagattgatattttcgatcgtgaagcgcgctttattgagacggtgatggagcccctgcgccagcgcctgcccggcctgaaagtggtttttgaacatatcaccaccaaagacgccgccgagtacgtgcgtgacggtaatgaactgctggctgctaccatcaccccgcagcatctgatgttcaaccgcaaccatatgctggtgggcggcattcgccctcacctgtactgtctgccggtacttaaacgcaatattcatcagcaggctctgcgggagctggtcgccagcggcttcagccgcgccttcctcggcaccgactccgcaccgcacgcccgccaccgtaaggaagccagctgtggctgcgccggctgctttaacgccccgaccgccctcggcagctacgccacggtgtttgaagaaatgaacgctctgcagcactttgaggctttctgctcgctaaacggcccgcgcttctacggtctgccggtcaatgagagctacgttgaactggtgcgtgaagagacgaccgttgtggacagcattgccctgcctaatgacaccctggtgcccttcctggcgggtgaaaccgttcgctggaccgtgaagaaataa

SEQ ID NO: 135915 - DNA, 252 bp, Enterobacter cloacae
atgcgcattgaagtgtctatcgccaaaacgaccgccttacctaacggcgcgctggaagcgctgaataacgaactctctcgccgtatcgccgagcaattcccggccatcgatagccaggtgagcgtccgctacgccaccggtaatcagctctcggtgtttggcgccctgaaagaagacaaagaccggataagcgaaatcctgcaggaaacatgggaaagcgcggacgactggtttgtccacgatctctcctga

SEQ ID NO: 135916 - DNA, 255 bp, Enterobacter cloacae
atggaaaaaaataatgaagtcattcagacccatcccctcgttggatgggacatcagcaccgttgatagctacgatgcgctgatgttgcgcctgcactaccagaaccccactcaagaaaacagtaatgatgctgagatcggccagacgctatggctaacgacggacgtcgcacgtcagtttatttcaatcctggaagcaggcattgcgaagattgaatctggcgaataccaggaaaacgagtatcgccgacattaa

SEQ ID NO: 135917 - DNA, 1119 bp, Enterobacter cloacae
atgcaatacgatcttatcattattggcagcggctccgtcggcgccgccgctggctattatgcgcgccgtgccggactcaatgttctgatgaccgatgcccatcaacctccccaccaggaaggcagccatcacggcagcagccgtcttatccgtcacgcctatggcgaaggtgagaaatatgttccgctggtgctgcgtgcccagcagctatgggatgaactggcagagatcagtggcgaagccgtgtttgaacgcaccggcgtcattaacctcggccccgccagctccgcttttctcgccaacgtcgccgccagcgcccgtgcgttccagcttgaggtggaagagctggatgcccaggccgtgatgcagcgctggccggagatacgcctccccgatgactatcgggcgattttcgaacccgcttccggcgtactgcgcagcgaactggccgtcgaaacctggatccgtctggcgcgggaagcaggctgcgcgcagctattcaactgtccggtctcggctattcatcaccatgctgacgggatcaccatcgataccctcgacggtgaatatcatggtaaaaagctgctggtcagcgccggcacctgggtcacccgcctgcttccggacctccctatccagccggtacgcaaggtgttcgcctggtaccaggccgatggccgttacagcagcaagaatcacttcccggccttcaccggcgagttgcccaatggcgatcaatattacggtttcccggcggaagataatgaactgaaaattggcaagcataacggcggccagccgatctccaccccgcaggaacgggtagcgtttggcgctgtcgccagcgatggttccgaatccttcccgtttttgcgtaacgtcctgcctggcatcggcggctgcctgcacggcgcctcctgtacctacgacaataccgtcgatgaggactttattatcgatacgttgccaggcaggccagacacgctgctgatcaccgggctgagcggccacggctttaagtttgcgccggtgctgggcgaaattgccagtcagtttgctcagggcgaagcatcgagcttcaatctggcccccttttctctggcgcgctttaacgcgtaa

SEQ ID NO: 135918 - DNA, 1065 bp, Enterobacter cloacae
atgccagtgttacacaaccgcatttcaaatgagacgttaaaggcgcaaatgctggctgaaaccgagccgcgcacgacgatctcattctataaatatttcaccattgtcgacccgcaggcgacccgcgatgcgctgtgggttgccttaacccagctgaaggtctttggccgcatctatctggcccgggaagggatcaacgcgcaaatcagcgtgccgcaaagcaacgttgaggctctgcgtgagtttctctatggcttcgatccggcgctggcggggctgcgtttcaatatcgccgtggaggacgatggtaagtctttctgggtgctgcgcctgaaagttcgcgatcgtatcgtcgccgacggcatcgacgatccctcgtttgacgcctccaatgtgggggagtatctcaaggcggcggaagtcaacgcgatgcttgacgatccggatgccgtgtttatcgatatgcgcaaccactatgaatatgaggtgggccatttcgaaaacgcgctggagatcccggcggataccttccgcgaccagctgccgaaagccgtggaaatgatgcaggaccataaagacaagaaaattgtcatgtattgcaccggcggcattcgctgtgaaaaagccagcgcctggatgaagcataacggcttcaataaggtctggcacatcgagggtggcatcatcgagtacgcccgtcgcgcccgcgagcaggggctgccggtgcgtttcattggcaaaaactttgtctttgatgagcggatgggcgagcggatctccaatgacgttatcgcgcactgtcatcagtgcggcgcgccgtgcgacacccatactaactgcctgaacgatggctgccatctgctgtttatccagtgcccgagctgcgccgagaagtttgccggctgctgtagcgaagcctgcatggaagagcataagctaccggaagaggagcagcgtaagctgcgcgccgggcgtgaaaacggcaacaaaatctttaataaatcccgtggccggctgaataccaaactcgggatcctcgacccggagccgtcagaaaaaccataa

SEQ ID NO: 135919 - DNA, 921 bp, Enterobacter cloacae
atgactcatttgcctaaattttctccggcgctgttgcatccgcgctattggctgctgtggctgggtatcggcctgctgtggctggttgtccaactgccctacccgctgatctaccgcctcgggaacgccatcggccgtctggccatgcgctttatgaagcgccgggcgaaaatcgcctatcgcaaccttgagctctgcttccccgagaaaagcgagcaggaacgccaccggatggtggtgatgaactttgaatcggtgggcatggggctgatggagaccggtatggcctggttctggccggttcgccgtatcgcccgctggaccgacaccatcggctttgagcatattcgcgatgtgcaggcgcagcagcgcggcattctgctgatcggtattcatttcctcactctcgagatgggtgcgcggatgttcggtatgaacgaaccggggattggcgtctatcgccccaacgacaacccggtgatcgactggctgcagacctggggtcggctacgatccaataaggacatgattgaccgtaaggatctgaaaggcatgatccgggcactgaaaaaaggcgaagtggtgtggtacgcaccggatcacgattacggcccgaccgccagcgtctttgccccactgtttgcggtcgaccaggcggcgaccacctccggcacctggatgctggcgaaaatgtccaaagcctgcatcgtgcccttcgtcccgcgccgcaaaccggacggtaaaggttatgaactgattatcctgccgccagagtgttccccgccgctggacgacgcggaaaccaccgccgcgtggatgaacaagatcgttgagcagtgcatcatgatggccccggaacagtatatgtggctccatcgtcgcttcaaaacccgccccgaaggcatgccctcccgctactga

SEQ ID NO: 135920 - DNA, 306 bp, Enterobacter cloacae
atgtcgtctgctgaaacccccattaactggaaacgaaacctgaccgtgacctggcttggctgctttttaaccggcgccgccttcagcctggtcatgccctttctgccactctacgtcgaacagctcggcgtcaccgggcatagcgccctgaacatgtggtccgggctggtctttagtattacctttcttttctccgccatcgcctcgccgttctggggggggcttgctgatcgcaaggggagaaaatatctggcagtttctgctgctgcgcgcattgctcggcctgctgggcggttttattcctaa

SEQ ID NO: 135921 - DNA, 888 bp, Enterobacter cloacae
ttgctcggcctgctgggcggttttattcctaacgccaacgccctgatcgccacccagatcccgcgccataaaagcggctgggcgctggggacactgtctaccggcgcggtaagcggcgccctgctcggcccgctggcaggtggcttcctggccgaccactggggattgcgcaccgtcttctttatgaccgcggcggtactatttatctgtttcttgtttaccctgtttttaatccgcgaaaattttgtgccgatcgccaggaaagagatgctcagtgccagagaggtgttctcctcgctgcagaatcccaaactggtgctcagcctgtttgtgacctcgctgataatccaggtggccaccggttccattgcgccgatcctgacgctttatgtacgcgatctcgcgggcaacgtcagtaacatcgcctttatcagcggaatgatcgcctcggtgccgggcattgccgcgctgatgagcgccccgcggctgggcaaactgggagatcgcatcgggccggaaaaaatcctcatcgtggcgctgattatctcggtgctactcctgatcccgatgtcgttcgttcagaccccgctgcagttaggtatcctgcgattcctgctcggcgccgcggacggcgcgctgctgccggcggtgcaaaccctgctggtgtacaactccaccagccagatctccgggcgaatcttcagctataaccagtcgttccgcgatattggcaacgttaccggccccctgattggcgcgtcggtttccgctaactatggcttccgcgctgtatttctggtcaccgcaggggtggtattatttaatgcgatctactccaccctcagcctgcgtcggccagccgcggatacttcgcattcagtaaattaa

SEQ ID NO: 135922 - DNA, 387 bp, Enterobacter cloacae
atgccaaaggattcgatgttctacgccacgcttgaagaagctattgatgcagcacgtgaagaatttctcgccaacaaccctgacagcgatgaagagagcgccaacgttgagcagctcaacattcaaaagtatgtgctgcaggatggcgatatcgcctggcaggccgaattttttgctgacgaagaggaacaaggcgaatgcctcccgatgctcagcggcgaagccgcgcagagcgtcttcgacggggattatgatgagatagagctgcgtcaggagtggctggaggaaaatacgctccacgaatgggatgaaggcgaatttcagctcgagccctcgctggacaccgaagaggggcagacggcagccgacgagtgggacgagcgttaa

SEQ ID NO: 135923 - DNA, 228 bp, Enterobacter cloacae
atgcgaatactaccgatcattgccatggcgctgctgctcagcggctgcggcagcattatcagccgtacggtgcccgggcaggggcatggcaatcaatattacccgggcgtacagtgggatgttcgcgattcggcatggcgctatctcaccattcttgacctaccgttctcgctggtatttgatacgcttctgctgcctctggacgccagccacggcccctataactga

SEQ ID NO: 135924 - DNA, 2529 bp, Enterobacter cloacae
atgaataagataacaaagtacattgacgcattgccgctgtcggacgccgagaaatcggcgctgccggacaccagcctgcaggccgttcatcaggccctggatgacgaccatcagaccttcgcccgcgaagacgactccccgctggggtcggtcaaggcacggctggcgcatagctggccggattcgctgtctggcgatcagctggtgaaggacgatgaaggccgtactcagctgcatgcgatgcctaaagccaagcgctcctcaatgatcccggacccgtggcgtaccaacccggtcggccgcttctgggaccgtctgcgcggacgcgatgtcacgccgcgctatctctcccgtctgacgcaagaagagcgcgagagtgagcaaaaatggcgtaccgtcggcaccattcgtcgctatatcctgctgctgctgacgctgtcgcagaccgtagtggccacctggtatatgaaaaccattctgccttatcagggctgggcgctgatcaacccggccgacatggtggggcagaacctgtggatctcgttcatgcagctgctgccgtacgtgttgcagagcggcattctgatcctcttcgcggtgctgttctgctgggtttccgccggcttctggaccgcgttaatgggcttcctgcagctattgatcggccgcgataagtacagtatttccgcctcgacggtcggtgacgaaccgttgaacccggcgcaccgtacggcgctgataatgccgatctgtaacgaagacgttgaccgcgttttcgccggcctgcgggcgacctgggagtcggtgaaagcgaccggtaacgccgctcatttcgacgtctatatcctcagcgatagctataaccccgatatctgtgtggctgagcaaaaggcgtggatggagctgattgccgaagtgcagggcgaagggcagatcttctaccgccgccgtcgtcgtcgagtgaagcgtaagagcggcaacatcgatgacttctgccgccgctggggcagccagtatagctatatggtggtgctggacgctgactcggtgatgaccggtgagtgtttgagcagcctggtgcgcctgatggaagcgaacccgaatgccgggatcattcagtcttccccgcgcgcctcgggcatggacacgctgtatgcgcgttgccagcagtttgccacccgggtgtacggtccgctgtttacggcgggtctgcacttctggcagttgggggagtcccactactggggccacaacgccattatccgcgtgaagccgttcattgagcactgcgcgctggcgccgctgccgggcgagggcaactttgccgggtcgatcctgtcgcacgacttcgtcgaagccgcgctgatgcgccgtgccggctggggggtgtggattgcctacgatctgccgggctcctatgaggagctgccgccgaacctgctggatgagctgaaacgcgaccgtcgctggtgtcagggcaacctgatgaacttccgcctgtttctagtcagagggatgcacccggttcaccgggcggtgttccttaccggcgtgatgtcctacctgtcggcgccgctgtggtttatgttccttgccctgtcgacggcgttgcaggtggtgcatgccctgaccgaaccgcagtacttcctgcagccgcgtcagctgttcccggtgtggccgcagtggcggcctgagctggccatcgcgctgttcgcttcgaccatggtgctgctgttcctgccgaagctgctgagtattattctggtgtggtgtaaagggccgaaagagtacggcggatttatccgcgtcacgctttcactgctgctggaggtcctgttctcggtcctgctggcgccggtccgtatgctgttccacacggtcttcgtggtcagcgccttcctcggctgggaggtggtatggaattcgccgcagcgtgatgatgactccacgccgtggggggaagcctttatgcgccacggctcgcagctgctgctggggctggtgtgggcggtcgggatggcatggctggatctacgcttcctgttctggctggcgccgattgttgtctcgctgatcctctcgccgttcgtatcggcgatttccagccgggcgacagtgggcctgcgcaccaagcgctggaagctgttcctgatcccggaagagtattcgccgccgcaggtgctcaaggataccgatgcgtacctgacgatgaaccgtcagcgttcgctggacgatggctttatgcacgcggtgtttaacccgtcgtttaacgccctcgccaccgcaatggccactgcgcgccaccgtcaggggcatatcctggagatcgcccgcgagcgccatgtcgagcaggcgctgaatgaaacgccggataagctgaaccgcgatcgtcgactggtgctgttgagcgacccggtaaccatgtcgcgtctgcactatcgcgtatgggccgcgccggagaaatactcttcatgggtgaacgcctatcagcagttggcgcttaacccgctggcgctgaaaacgaaataa

SEQ ID NO: 135925 - DNA, 1554 bp, Enterobacter cloacae
atgaaacataaaccacagatgatgaaaatgcgttggttaagcgcagccgtaatgttgtccctgtgtacttcatctgcatgggcatttagcattgatgacgttgcaaaagaggccaaaacgttagccgggaaaggctatgaagcgccgaagagtaacctgccctccgctttccgcgacatgaaatacgcggattaccagcaaattcagtttaatcacgataaagcttactggaataaccagaaaaccccattcaagcttgaattttaccatcagggtatgtacttcgacacgccggtcaccatcaatgaagtgacggccaccagcgtgcgcaaaattaaatatagcccggactattttaactttggtaacgttcagcacgataaagacacggtgaaagacctcggtttcgccggcttcaaagtactgtatccgatcaatagcaaagataagaacgatgagatcgtcagcatgctcggtgccagctacttccgcgtgctgggtcagggtcaggtctacggcctgtccgcgcgcggcctggctatcgataccgcgctgccgtccggcgaagagttcccgcgttttcgcgagttctggatcgagcgtcctaaagccaccgacaaacgtctgactatctatgcgctgctggactccccgcgggcaaccggcgcttatcgctttgtcatcatgccgggacgcgacaccgtggtagatgtccagtccaaagtttacctgcgtgacaaagtgggcaaactgggcgtggcgccgctgaccagcatgttcctgttcggttctaaccagccttctccggcgcttaactatcgtccggcgctacacgactccaatggtctgtcgatcctggccggtaacggcgagtggatctggcgtccgctgaacaacccgaaacaccttgccgttagcagctatgcgatggaaaacccgcaagggttcggcctgctgcagcgcggccgtcagttctcgcgcttcgaggatctcgacgatcgttatgacctgcgtccgagcgcctggatcaccccgaaaggggagtggggcaaagggaaaatcgaactggttgaaatcccgaccaacgatgaaaccaacgataacatcgtgacttactggacgccggatcagctgccggagccgggcaaggagatgaacttcaagtacaccatcaccttcagccgcgatgaagacaagctgcatgcgccggataacgcttacgttatgcagacccgccgctctaccggcgacgtgaagcagtcgaacctgatccgccagccggacggcaccattgctttcattgtcgacttcaccggcgccgatatgaaaaaactgccggcggataccccggtcgccgcccaggcgagtaccggcgataacgctgaaatcgttgaaaataccgtgcgttacaatccggtgaccaaaggctggcgaatgatcctgcgtttgaaggtgaaagatccgaagaaaacgacggaaatgcgcgccgcgctggttaacggtgatgacacgttgagcgaaacctggagctatcagctgcctgccaatgaataa

SEQ ID NO: 135926 - DNA, 1161 bp, Enterobacter cloacae
atgaataatactccggtacagcgtgaatatttcttcgacagcatccgcgcctggctgatgctgctggggatccctttccacatttcgctgatctattccagccacagctggcatgtcaacagcgctgagccctcgtggtggttgacgctgtttaatgacttcatccatgccttccggatgcaggtctttttcgtcatctccggctatttctcctacatgctgttcctgcgctacccgttgaaaaagtggtggaaagtgcgcgtcgaacgggtcggtattccgatgctgaccgctatcccactgctgacgctgccgcagtttattatgctgcagtacgtcaacggcaaggcggaaaactggcacaccctttccgggtacgacaaatttaacaccctggcgtgggagcttatttcccacctgtggtttttactggtgctggtggtgctgacctcgctgggcgtggtgctgtttaaatggctgacgcgccgcccaacagggggtgcctcagcctttggtgacactgtcactatgggccagctaacgatgattttccttgcgctgggggtgctttacgcgctgatccgccgatcgctgttcctgatttacccgccgctgcttagcaatggtctgtttaactttgtggtgatgcagacgctgttctatcttcccttctttgtgctgggggcgcagacctttattaatccgcgtctgaaggcgatgtttaccaccccgtcaccatggtgctgcgcagcggcgctgctgggatttatcgcctaccggctgaaccagcagtacggctccggcgacggctggatgtatgaaacggaatcggtgatcaccatggtgcttgggctgtggatggtcaatgtggtcttttcgctcggccatcgcctgctgaacttccagtcggcgcgcgtaacctatttcgtcaatgcttcgctgtttatttacctggtgcaccatccgctgacgctgctgtacggggcgtggatcaccccggtcattaagtccaataccttaggctttattggcgggttggtttttgtggtgggtattgccctgatcctgtatgaaattcacctgcgcattccgctgctgcgtttcctgttctccggtaaaccgatgaacaaaccggccaaaaccccagcctcggccagctaa

SEQ ID NO: 135927 - DNA, 594 bp, Enterobacter cloacae
gtgtcagaaggaaaagtccagcagaaacagcaggcgcgccgcgcggagatcgttgtcgctgcgcaaaaatgtttcgctgaaaaggggctgcacggcgcttccgtcgccgatatcgcccgggaagcgggcctgagcgtcggtcagctatatcgcatttttgccagcaaggaagcgatcatcgaagcgattgttagcgaaatcgtcaacgccagagtcggggagatgatcgatgagaaccacaatctggcgcgtaaagcggcggttttggctggcaggatcccgacgtcggcagccaccaaaagcgataattatctgctgatggagatcaatgccgaggcctcgcgtaacccccgcttgcgtgagatcctgatgcaggccgatcggcggttgaaagaggagggcggtcgcctgtcgcagcgctaccatcccgggctcagcgatgcgcgacgcaatgccgcatcagagctcatcgccgttctgacagagggggcagcctaccgctgtgagctgagcgcctccaccccggtcgataaggcagatttagaagccctgtacaatatgattttcgaccggctttttgacgagcaggcataa

SEQ ID NO: 135928 - DNA, 528 bp, Enterobacter cloacae
atggctgttaaacctgaggtaattctcggcgatattacgacacttgatgtcgatgtgattgttaatgcggcaaatccctcgctgctgggtggtggcggagtagacggggccatccaccgagcggccggtcccgcgctgctggcggcttgcaagcaggtgctgcagcagcagggcgaatgccctcccgggcatgcggtaattactattgccggcaatctgccggccagcgcggtgatccacaccgtgggcccggtctggcacggcggcgaccgcatggaggcgcaaaccctggccgatgcttacaaaaacagtctgcagttggcctcggcaaacaactatcgctccattgcgtttccggcgataagcaccggcgtgtatggctatccgagagaggaagcggcggcgatcgccgtgcgcaccgtcaccgcgtttctcactcgctataatcctcttgagcgcgtcctgttcgtctgttttgacgaggaaacggcgtctatttatcgccgcctgctggcgtcatacccctga

SEQ ID NO: 135929 - DNA, 483 bp, Enterobacter cloacae
atgaacatactcttcgcaatcgcattaacgacaggcatcctctccgggatttgggggtgggtggcggtcgctctcggcctgctgagctgggccggattcctcggctgtacggcctatttcgcctgcccgcagggcggcttgaaagggctggccatctcgtcctgcacggtgatgagcggcgtggcctgggcgttagtgattatccacggtagcgcgctggcgccacaggtgcagatcctcagctatatgatgaccggtgtggtcgccttcctgatgtgcattcaggcgcgacggacgctgctgtcgtttgtcccgggcacctttatcggcgcttgcgcgaccttcgcggcagacggcgactggcgtctggtgatcccttccctggcgctgggtctggtctttggctatgccatgaaaaatagtggcctgtggctggcggcccgtgcggataagcataaatcgttcgccaacgacaacgcctga

SEQ ID NO: 135930 - DNA, 555 bp, Enterobacter cloacae
atgaacgagttttcaatcctctgccgcgtgctgggttcgctgtattaccgtcaaccgcaggacccgctgctggtgccgctgtttaccctgatccgcgagggcaaactggccgccagctggccgcttgagcaggacgagctgctggcgcgtctgcagaaaagctgtgaaatgcagtccctggcgacggactataatgcgctgttcgtcggtgaagcctgcagcgtcccgccgtaccgtagcgcgtgggtggagggttcctcggaagcggaagttcgggcttttctgagcgaacacggcatcccgacaggggaaggtccggcggatcatctcggctcgctgctgctggccgcctcctggctggaggatcatgccgcagaagaccagagcgagacgctggagctcctgttcgccgactatatcctgccgtggtgcgggacgatgctggggaaagtcgaagcccatgcgcacacgccgttctggcgcaccatggcgccgttgacccgcgacgccatcgccgcgatgtgggacgagcttcaggaagaagatgagcaataa

SEQ ID NO: 135931 - DNA, 939 bp, Enterobacter cloacae
atggagattattttttaccatccgacctttgatacccaatactggatctgtgagctggaaaagcagttacccggcgcgcgggtgcgcgagtggaaagcgggcgataaccggccggcggactatgccctggtctggcatccgccggtagagatgctgcagggccgggcgctgaaggccgtgttcgccctcggggcaggggtggactctattctcagcaagctgcgcgaccatccggatatgctgccgctgtcgattccgctgtttcgtctcgaagataccggtatgggacggcagatgcaggagtatgccgtgagccaggtgctccactggttccgccgctttgatgactatcaggcgctgaagctggcttcccgctggcagccgctgcccgagtaccgcgccgacgaattcaccgtcgggattatgggcgccggcgtgctgggggcgaaggttgcggaaagtctgcaaccctgggggttcccgcttcgcgtctggagccgtagccgcaaatcctggccgcaggtgcagagcttcgccggccaggccgagctgggcgaattcctgcagggcactcgcgtgctgatcaacctgctgccgaataccgccgaaaccgccggcattattaaccagacgctgctggcgcagttgcctgatgagagctatgtcctcaaccttgctcgcggcgtgcatgtcgttgaagaggatctgctggcggcgctgaacagcggtaagctcaaaggggcgatgctcgatgtcttcagtcgcgaaccgctgccgcaggagagcccgctatgggcgcatccgcgggtggccatgaccccccatgtggcggcagtgacccgtccaatggaagctatcacctacattgcggagaccattagccggcttgagcgaggggagccggtaagcggtcaggtcgaccgccagcgcggttattaa

SEQ ID NO: 135932 - DNA, 864 bp, Enterobacter cloacae
atgactagcaaaacactgcgacttatatttcctcaatggcaaggcggtaacaatcctccctactatcttggctcgcagctcctctcgtttctctctcctgaagcaaaagggcccgttgagatcgttcctgttgagttaccaacaacagagccattgccaaggattaatgacatcacggctaagccatccctcatcaggcaactcaataatgctgccgcactgattgaaaaacatgatcccaatagcattgtcattttaggcggagactgcctggtttcgctggcgcctttcgcccacctgctcgataagttcggagacaaactcggtgtgctctggattgactcgcatcctgacgtgcagacggctgaacaatatccaaacgcgcatgcccatgtgcttggtgcgctaatgggtacgggtgataacgatttagttgcccatgtaaaaaccaaacttaatccgtcaaaaataatgattgcgggtatccacgcgccacttccttatgaagctgaatacctcactcgccataacattacgacgctagcacctgaacaggttaaaagcggtgcagatgaagtcctggagtggatagcgaaagaaaagattgcgtatctggcgatccatatcgatctggacgtactcgacccatctctgttccgctccattctttttgcaaaaccggggcgcggaaaacacgattttggcgacgttgctgaaggcaaactgacgattgaggatgtactcaatctgatagcggcagcgacgacaaaagcagtccccgttggcctgacaatcgctgaacatttgccctgggacatgctgaatctcaagaacatgctcagtgaattaccccttctaaagtaa

SEQ ID NO: 135933 - DNA, 573 bp, Enterobacter cloacae
atgttaaaaaaaaccgaaacctaccataagttgattacggctgctgctgcctgctttgcggaaaaaggctttagtgcgacaagcgtacgtgaaatctctacccgggcaggaattagtcaaggagcaatgtatacgtatttcaaaagtaaggatgagcttgttaaggctattgtactggaagaacagaactccgcgctgactgcccataatgcgacctatgcaggctcttattttgatcgcctttgtgcacaagtcacgtcctgtattagcgagatcggttaccctatcacgcatcaactttgggttgaaattatggctgagtctgcgcgtaatccagaactgcgaaaaacgtatatctccagtgatgacatcatgcggaaaagcttcgcgcggctcatccaggagggtatcgctgccggagagtttcgccgtgatattaaccttgaagaaatcacgatcattatttttgcccttattgacggtttaatcgctcgtcaggcaataaacacgaccttctcattcaaggatgatctgccaatgttttttgacgttatggcaaaattgcttaaataa

SEQ ID NO: 135934 - DNA, 861 bp, Enterobacter cloacae
atgaaacagatcacaggagtctacaccgcgcctgcgcagcattgggtaggcgacggcttcccggttcgctcgatgttttcctatcagacgcacggccagcagctgagccccttcttactgctcgactatgccgggccgtacaccttcccggcgggcagcgaaaaacgcggcgtcggtgagcatccgcatcgcggatttgaaaccgtcaccatcgtctacgccggtgaagtagagcatcgtgactccaccggacgcggcggggtgattggtccaggcgacgtgcagtggatgacggcgggcgccgggatcctgcacgaagagttccactcggaggccttcacccgcagcggcggcgagctgaagatgatccagctgtgggtcaacctgcccgcgaaagacaaaatggcgacccccggctaccagagcattaccgctgggacgatccccactgtggcgctggcgaacggcgccggacaggttcgggttattgccggccagtatgacgacgtcagcggcccggcccataccttctcaccgcttaacgtgtgggatctgcagctgaatcaggggcacgacctcacgctgcgccaaccggagggctggagtaccgcgctggtggtgctggaaggggaagtgatcattaacggttccgaatctgctcgcgaaggccagctggccgtcctgagccaggcaggtgacgcagtgcatctggaggcgaccgccccggcaaaagttctgctgatggccggagaaccgctacaggagccgattgtgggctatggcccgtttgtcatgaataacaaaacgcagatcgcagaagctgtacgcgattttaacagcggccgctttggccaaatctaa

SEQ ID NO: 135935 - DNA, 1755 bp, Enterobacter cloacae
atggacgatttaaccctgcgttattacgacgctgaaatgcgctacctgctggaagcgggtgaagagtttgcccgcgctcatcctgagcaggcggcaatgctcaatctcgacaaagcgggcgcccgcgacccctttgtcgagcgcctgtttgaaggttttgccttcctgatgggccgcatgcgcgagaaactcgatgacgatctgcctgagctgaccgaaggcgtggtcagtctgctgtggccacattatttacgtaccattccctcgatgtcggtcgtggagttcacccccgactggccggaaatgaaagaatcgatgacgataggcaaaggttttgaagtgctttcccggccgatcggtgaaaagggcacgcgctgccggtacaccaccaccaaagcgatcgctctgcagccgttatccctggaacgcgtccagctggccaccgatacggatggccggtcggtgatcacgctgcgctttacctgcagccagctgacggactggcgccgggtcgatctcagtcatatcccgctgtactgcaacgccgatgcgccgctggcctgcgccatgcacgaggcctttaccctcaatgtggcccggatgtggctgcgcatgcccgatgaggtggacagaaggccgctggacgggtatttcagcgcgctgggatttggcgaggatgacggcctctggcctgaagatggccgcagttttcgcggttaccagctgctgctggagtattttaccttccgcgaaaagttcatgttcatcgatctgcgcgggctggagacggtggcttttccggccggactggcgtggtttgaaatcgacgtcgtgctggcggaacgctgggaacatgacttccgcttcagcgaaaagcagctgcgcctgcactgcgtgccagtgatcaacctgtttccgctggagtccgatccgctgaccatcaattccctgcagaccgaatacccgctgcgcccgatgcgcgtgcaggacggccacaccgaaatttacaccgtcgattccgtgatctcctcacaccagcaggtttacgcgccgttctcaagttttcgccacaaaggcggcatgatgcgtcatgacgcggcggactattactatcatacccgggtgcgccgtggcccctccgggctgtacaacacctggcttatcgtcggcggagaagcctttgataatcataccgtaccggaagatgaaagcctgtcgctgaccctcaccggaaccaacggccagctgccgcgtcgcgcgctgcagagcaccgtgctcgatacggtgatgaaaaccacttccgccagtattgcagtgcgtaacctctgcgcgccgacgctgccgtgctatccccccgcccaggaccgttttcactggcgggtgctgagccatctgggcagcagttttctttcgctgatggataacgcggaggtcctgcgcggcaccctggcgctgtatgaatggaccgacagcgagatgaatcgtcggcgtctggaagccatcctcgacgtgaagcaccgcgcaacagagcgctttgcacagggccatctggtgcgcggcgtacagattgaagtcaccctcgacagtcacggctttgccggacgaggcgatatatgcctgtttggcgagatgcttagccgcttcttcgcgctctacaccgacatctacttgttcaaccgcctgattatcattctgcaaccaaccggagaacgactggaatgggaagagaagcacagccgccgcattcccggctga

SEQ ID NO: 135936 - DNA, 1086 bp, Enterobacter cloacae
atgggaagagaagcacagccgccgcattcccggctgaccccgcgactggaggccgacctgccgcggatcaatttttaccgcttctgccagcttctggaaaaacggcgtcccggccaaccgctgatggggggaaccagccatccggctgacgatccggtgcgtttttacccgcatccgggaatgggatttcccgccagcgaactgaaagccgtggaatacgatgaggccgatgacagcaggccgccggtcattcgcaccacctttatggggttgtacggtgtcgattcgccgctcccgacggcatatctcgatgatatcgcccagcacagggaagggcatgaagcgctgcagggcttactggatatcttcagccaccggatcatgacgcagttttaccgcatctggcggaaatactcctggcccgccacctttgagcccggcggcaccgatcgtctctcgcagtcgctactgggcctggcggggctgggcatccccggcacgacgcagcatatcgcctcgccggcgtcgcgctttctggcgctaaccggcgtgctgcgtcagccgggcaaaacccagcaggggatccaggcgctggtcaccctgctggccccggagaccaccgtcagggtgagcccgtacagcctgcgtccggtggcgatcagccagccgctggggttttacggcgatgacgacttcttcctggacggcaatacgccgctgggtgacgaagcgatggatgccagcagccagctcctcgtcgcccttaccaccgacaatcccgcggaggcgcggggctggaagcctgacggcccgctgtttcgggactttctcatcctgctgcgggtatacctcggctggcgattccgggccaacatcaccctgagcgcgccgacccgactgctggctgtcccgccgctgggggacgagccgttctggctcggtatgaacggcgtgctgggcgtgggtgagggcgagagtgagggcgatattcctcagacctttaccacccagctgggtacctatacgggcctgcagcctgccacctttctacaaggaaaccgacgtgttacgtataagtttgactaa

SEQ ID NO: 135937 - DNA, 543 bp, Enterobacter cloacae
gtgttacgtataagtttgactaaaaccgcctgtctgctgcccctgcttgcgctttgcctgagcggatgcggactcacccagcgcgtctcggagggaacaaagtctgccttcaacgccgttttttataagaaaattaatacgctgcatctggactttaccgcgcgcgaagcgctcaacaccgatgccagagagaatcaatcgctctctgaaccggtggtggtgcgcatctatcagcttaaagatcgccagacctttgaccggctggtttaccagcagctgctggaggagggggatattctgctcgccgccgatctcctcgccagtcgcgatgtggtgatcggtcccggaggggacgccagtctcaatatgccgctggaagcggaggcgacgttcgtggcggttgtcggcctgttccgccatccggacacacaaagaaatacctggaagcaggtgctggcgcgtgaggaattggatccggacaagccgcgcattttcaccgccgaacacaaccagctacggctcaggcctgaagcggcgaagtaa

SEQ ID NO: 135938 - DNA, 495 bp, Enterobacter cloacae
gtgacagcgagggaacgtttttttaagaaactgcagcaacagcaaaatccgcggcggacagcggccctcgacgggtcggccgccgcggatatcgccaggtttcgtcagcagatggcggcgctggcacagcagataagtcagtggtttgatggaaccggtattgaggtggtgatttcgacccgccatctccacgacctgagtacccttggctacagcctcaacagcggcatctgccgctacgatatcccggccattcgtctgcaaaacggcgagcgcagcgtcaatatcgtgccgcagcagctgttggatggcgtggaaaaggggattgtgaccctgagtcttgaggcgcccgacggcgcgggctcccgggaggtgttttatctgagcctggccccggaggagggctggatgatccgcaaggcgcaccagtccccggaagcgcggcttatgcttaccgaagatcgcttttttatggcggtcgacagcctggcctga

SEQ ID NO: 135939 - DNA, 714 bp, Enterobacter cloacae
atgacagcgtttcacaacaaatcagtgctggttttaggcgggagtcggggaattggcgcggcgatcgtcaggcgttttgtcgccgatggcgcgtcggtggtgtttagctattccggttcgccgcaagcggccgagcggctggcggcagagaccggcagcacggcggtgcaggcggacagcgccgatcgcgatgcggtgataagcctggtccgcgacagcggcccgctggacgtgttagtggtcaatgccgggatcgcgcttttcggtgacgctctcgagcaggacagcgatgccatcgatcgcctgttccgcatcaatattcatgccccctaccatgcctccgtcgaagcggcgcgccgcatgccggaaggcgggcgcattattgtcatcggctcagtcaatggcgatcgcatgccagtgccgggaatggcggcctatgcgctcagcaaatcggccctgcaggggctggcgcgcggcctggcgcgggattttggcccgcgcggcatcacggtcaacgtcgtccagcccggcccaattgataccgacgccaacccggagaacggcccgatgaaagagctgatgcacagctttatggccattaagcgccatggccgtccagaagaggtggcgggaatggtggcgtggctggccggtccggaggcatcgtttgtcactggcgccatgcacaccatcgacggagcgtttggcgcctga

SEQ ID NO: 135940 - DNA, 567 bp, Enterobacter cloacae
  misc_feature (553)..(562): n is a, c, g, or t
gtgaccactacaaaacaagggcgtactccgggacgtccccgccagtttgatgcggaacaggccattgaaacggcgcaacgcctcttccacgcgcgaggctacgacgcggtgagcgtggccgatctgacccaggctttcggcatcaaccccccgagcttttatgccgcttttggcagtaagctcgggctgtatacccgcgtcctgcagcgctacagccagaccggggccattcccattgatgccctgctgcgagacgaccagccggtggcggcgtcgctcatcgccgtactgcaggaggcggctcgccgctatgtggccgatccggccgccgccggctgcctggtgctggagggggtacattgtcaggatgctgatgcccgggtggcggcaggcgaatggcatgctgcggcaagagccaaaatccagcagtatatcgcccgccatcgcccgcaggacgcgctgcgggtgactgactatatggatacgttgatgcttggcctgtcggcgaaagcgcgggaaggggatagtctgccgcgtcttctggagaccgtgnnnnnnnnnncctga

SEQ ID NO: 135941 - DNA, 756 bp, Enterobacter cloacae
atgactaaaattgcacttattaccggcgccaaccgcggccttggccgtcagaccgcactggatatcgcccgccagggtggggatgtcatcgtcacctaccgcggcagtctcgaacaggcggaagcggtggtcgccgacatccgcgccctgggccgcaaggccatcgccctgccgctggatatggcgcaaaccgccagcttcccggccttcgccgacagcctcggcagcgcgctggccagcgtctgggggcgggccactttcgaccacctgatcaataacgcagggcacggcgaattcgccccgctggccgaaacgcgcgaagcgcagttcgacgggctgtttaacgtccacgttaagggggtatttttcctcgtacaaaccctgctgccgctgctggcagacggcgggcggatcgttaacttttcctccgggctgacccgcgtctcctatcctggcttctccgcctacgccgccgccaaagcggctgtggagatgctgagcgtgtacatggcccgcgaactgggcgggcgcggcatcaccgtcaataccatcgcccccggcgctatcgccaccgattttggcggtgggctggtgcgggacgacgcagaggtaaacgcgcagtttgccgccatgacggcgctgggacgggtgggcgttcccgaggatattgggccgatgatcgccagcctgctacgcgacgataaccgctgggtgaccgcccagcggatcgaggtgtcgggcggacaaaccatctga

SEQ ID NO: 135942 - DNA, 879 bp, Enterobacter cloacae
atgcgcgacgccctgttcgatctctgccgccggtttgccgatgctcatgtcgatagcagcggggtggcagttaccccggttcccggtataactctggtgcgggccctgcatcctggtgacctgcaggcggctatcgccaggccgctggtggccatgctgctccaggggcgtaagagcgtgaccaccggcctggccagctttgactatggtccgggcgaggcgatggtgatcgccgcggatgttcccactaccagccagatcaccgaggccagtcagcgttttccctattacgcgctggtgctggagctggacctggctatcctgcgcgagctgcaggaggccgggccgtcagggccggatgaggcgccccgcgttggtatcgaaccgatgaacgccgatgtgacggatgccgcttaccggctggcaaggctgtttgatcaaccgggggcgctggcggtgctgggggaaggtctgcggcgggagctgcattactggctgttgcagagtgtccatgggccggccatccgggcgctgggcgccgtagacagccattcggcgcggatccgccgggcggtggcgatgctgcgccgggattttatgcagccagtcagcgtcgacgcgctagccgacgccgccgggatgagcgtctctgtctttcaccgtcatttccgcgccctgaccacgctgtcgccgctgcaatttcagaagcagttacgcctgatccatgcccgccgcctgatgttggcggaagggatgagtattgcgcaggctgccggggaggtgggctatatcagcgtgtcgcagttcacccgggaatacgctcgcctgtatggcgcgccgccgggccgcgatcgtcgacgggaaaaaatgagcgcctga

SEQ ID NO: 135943 - DNA, 207 bp, Enterobacter cloacae
atgaacaagttaattccactgatcgtattgagttgtctgctgcccctggcggcaaatgccagaaccatcaccgccaccggcgataccctggaccatgcggagagcaaaatccgccagcaagccgcccgcgagggcgcgactacctatcgcatcactgaagcgcgaatgggcaacaaagtgcatatcacggcgaaaatcgcggactaa

SEQ ID NO: 135944 - DNA, 930 bp, Enterobacter cloacae
atgaaaactgataattttaatcatgcggaaaaggtattggtgctgggagcgggacaactgggcgccgccgttcttgatgcgctggtgcctgcggtaatcgagcgccagggcacggtctcggtcatcgtctcgccggcggcctgggatgaagccggccagctgcggtcggcaaaccatcaggcgctggccgacgccggagccaccttcctcgccgtcgacatcgccggtagcgccatggagacgctggccgatcagtttcgcggattcaccaccgtgattaactgcatgggatttgtcgccggtccggggacacagctgaaaattacccgcgcggtgctggcggccggggtaccccgctattttccctggcagtttggcgtcaattacgatgtggtaggcaaaggcagcggtcagccggtctgggacgagcagtacgatgtccggaccctgctgcgcgcgcagcgggccacggagtgggtcattgtctccaccgggatgtttaccagctttctcttcgaaccagacttcgatgtagtgaatttatccaaccgaacccttcacgcccttggcagctgggatacccaggtgaccgtcacctcaccggcggatattggccgcctgaccacggcgatttatctgcatcagccgcggatcgtcaacgaggtggtgtttgttgccggcgaaacgacctcttaccggcagttggcggataccgtggagcgcgtaacgcagcagacgttcagcaaagccgtccacaccctgcccgccctgctggagcagctgcggacaaacccggatgacgccatgctgcgctatcgcgccgccttcgcccggggggatggcgtgtggtggccgatgggcgacacctggaatgcccgccaccagctgccgacccaggacattgccggctggctgcagaccgcgcgctga

SEQ ID NO: 135945 - DNA, 930 bp, Enterobacter cloacae
atgagcgccggggggggtaacgaaatggacaaactggatgccatgcaggtctatgttgcggtcgtggatgcccacagcttcgcccgcgcggcggaggtgctcgggcagccgcgctccacggtatcgcgggtggtgaaggagctggaagcctggctcggggcgcagcttctccagcgcaccacccgcaagctcagcgtgacggcggagggtcgccggtattatgaggagtgtaaaaggctgctggccgaaatggcggcgatggaagcctcctttcccgggcgctcggctcagcccgccgggcggttcaaggtagggatgccgcaatcccttgcccgccactgcattctgccgaggatcggcgagtttttgcagcagtatcccgacctggagctgatcctctgctcaagcgacaacgtggaagatattattcaggagggattcgactgcgtgatccgtaccgggcggatcgaagattccaccaccctggtggcgcgtcctctggcccgctaccgctggatggtcctcgcctcgccggcctggctcgcggcccacggccggccgcagagcatcgacgaactgcaccagcatcgggcggtgggctacctgaatcaccgtaccgggcggaccatcgactggcttttctccctcgatgaaggcgactgcgcgatccgcatgcgggagacgctggtggtcgacgataccgatgcctacattcaggccggcattcaggggctgggcctgatccgcgtcgccagctatctggcgcaaccttatctgcagagcggggcgctggtcgcctgtctggagcaggccgcttctgatcttcccttgtcgctggtctatccgcaaaaccgctatctgccgccggcggtgcgcgcgttttatgactggagcaggcgcgtgctgcaacccccgcacagcgaggcctga

SEQ ID NO: 135946 - DNA, 924 bp, Enterobacter cloacae
atgaacaaaatcattgaaaatgattttagtcgtatcgatctgaatctgttgacagtcttgatggtgctgtaccgcgaagggagcgtcacccgcaccgcagaggtactccatcttggccagccggctatcagcggggcgctgaaacggctgcgcgagatgtttgacgacccgctgttcgtccgcagcgccagaggcatgctgccgacgccgcgggcgcaagcgctgatgaccgacctgcagccgctgatggaaaacctgcattcggcgatgtttggcgccggagagttcgtcccggcgcgcgcgcagcagctttttcgcatcggcctcagcgactggagcgaacactggctgatgcccccgctgttacccgggctgatgcaggaggcgcccggagtctcactgcagtcgatagccgccgaccccttccaggttcgccagttgctggaggaggagcgcattgatgtcgcggtgtctgtcaacaaacagagccgtggggaggtggtcagcgagccggtgatgtccatgggagtcaccaccctgtggtcgccgcagcagatcccctgccgcggtccgctgtcggtgagcgactttgtcgcctgggaacatgtgatggtggcctatcgcgaaaccggccacggtgaaattgaccgccagctcgccagccaggggctcgcgcggcgcgtgcgctttgccacgcagaatttctccacctttcccctgctgctgaccaccctgccgctgttcgccaccgtcccgcaggggctggcgcagcgctggcaggcgcagtatgcgctgcgcgcggacgctccgccggtagcgtatccggaatttacgctgtgcattttgcggcacaaacggcgggcgcaggatccggcgctgaactggctggtgacgaagttaaaacaggccatgcgcggccaataa

SEQ ID NO: 135947 - DNA, 867 bp, Enterobacter cloacae
atgcaaacttaccagacaggcgatagcctgattttcaaagtgccggagcgcgagatttccctgcagccggcggcgctctatccagaggcgttcccggtagcggaggcggaggccgttattcagccgattgcgctgtcaatccacagctgggtggtgcagaccccccacgatctgattgttatcgataccgccaccggcaatggtcgggagcgcggcggcaatccgctctatcatcaacttaacacgccgtatctggagaatctccgcgccgcgggggtgaacccggaggacgtgaccctggtgctactgactcacctgcataccgaccatgtcggatggaataccgtctggcaggacgatcgctgggtgccgctgtttcccaacgcccgctatctgtgctcggcaaaagagctgtcgcgggtgaaaaacagcgaacgctaccgggcgctgtggcttgacagcctgctgccggtgattgaggccggccagctggagaccgtcgatgtggcgacccggccgcgggtcggcggacggatcgactttattcccacccccggccacagtccggaccatgccgcgctggtcctcgccgctggagatgactacgcctgtttctccggcgatcttctgcattccccgatccagtttgcccatccgcagtggaattcagcgttctgcggcgatccccggcaggcggaagtctcgcgacgggagatgatggcgtggggggcaagccatcatgctcaatggttcaccgggcattttgccgggccttcctgcggctggctggagaaggataagcaaggtgactatcgctggcgagaggccgggaaacaggctgcagataaggggaacagtgatgaataa

SEQ ID NO: 135948 - DNA, 912 bp, Enterobacter cloacae
atgaataatgcgcaaaccgtgttggtttttggcgccaccggtcagcagggcggctcggtggcgcgggcgctgctgcaccgcggctggcgggttcgggcgctggtcagggatcctttctccgccggggccgctgcgctggcggcgcggggagccgagctggtggtgggtacctttgaagaccgggcggcaatgcggtcggcgatggccggggtcgacggcgtcttcagcgtccagcccagttcgccgggagggacggtgaccgatgagcaggaggtacgctacgggataaccatcgccgatctcgccgtcgagtgcggggtgaagcatctggtttacagctccggcagcgcgacgggggagacgccgaccggcgtagcgcattatgacaccaaagcggaaattgaacggcatattcgccgcctgccgctggcggcgaccatcgtgcggcccgccacctttatggagctgctggtgatgcctggttttggccttgatgaaggtcgttttcaattttttatgctgccggaggggagaatgcaggtgctggcggtggaggatatcggccatcttgtcgcggcggtttttgccgcgccggcgcggtttgccggcaagacgttcgagatcgccagcgacagcgtgaccggtcgtcagctggaggtgttattctccgcggcggcgggacggccgatcccctattcgcgattttccgacgaggtgctggccgccagtccttttctgcacaagctgaccgggctggtggacgacgggcggctggccgggcacgccgacctcgacgccctgcgccagctgcacccgcagctgcacaccttcgccggctggctggcaggccccggccgtcccgccttcgagcgggcgctgaccagcggggctcgctgggcgtttgatcgttaa

SEQ ID NO: 135949 - DNA, 549 bp, Enterobacter cloacae
atgagagctgatgccagaaaaaattatgacctgttgatcgaggtggcccgggacgtctttgtggagcaaggcgctgaggcctcgctgcgcgatatcgcccgccgggcgggcgtcggaatgggaaccctctatcgccactttcccaaccgcgacagcctgctggaagccctgctccgcagccgctttgcggcgctaaccgcccgggctgagtcgcttctgctcgccgccgatcctgccgcggcgctgctggagtggctggccgagagcgtggcgtttacccatcagcatcgcgggatcatcgccccgctgatgagcgccatcgacgatcctgagtccgccctgcacagcgcctgcgttgccctgcgcgccgccggtacgtcgctgcttacccgcgcgcagcaggccgggctggcacggccagatctcagcggagaggagctgttcgatctgatcgccgcgcttgcctggctgcgggagcaaccgtcccatgccccgcgcgcagagcggattttagcggtgctggccgacgcgatcctgactgccggctag

SEQ ID NO: 135950 - DNA, 1035 bp, Enterobacter cloacae
atgtcgacgcagatgatgaaggccgttcaacagcacgcctttggcgggccggaagtcctgagctttgaggatgcgcccatgccggtcctgcaggccggtgaagtactggtacaggtgcacgcggtgggcgtgaacccgccggacagctatctgcgcgatggctatcaacagctgccgccggagtggcggcccgaggtccgctttcccttgatcctcgggaccgatctctccggggtggtggtggcgcgggcggatgacgtccgggaggtggcggtcggcgacgaagtgtatgctatggcgcgttttcccgaaggggcggcagggggcagccgcgcttacgccgagtacgttagcgtgccggtcagcgacctcgctcgcaaacccctaaccctgagccatcagcaggctgccgcggtgccgatgtcgctcctgaccgcctggcagttcatgatcgatcccgggcatgaggtggcgaatccgctgcagccggggccgcatcggccggtgccgctggcgggtaaacgcgtcctggtcaacggcgcggcagggggagtcggtcatttcgccgtgcagctggcgaagtggcagggcgccgaggtgattgccgtcgccgcgggccgccatgaagcctttttacgtcagctcggcgccgatagcgttatcgactatacaaccaccgcagtggaggagacggtgcgtgacctggatctggtcattgatgcgccgggcgggccggccagcggccgttttttgcgtaccctgcgacccggcggcgcgctgtacccgatctttccgctcggctttgccggggcggaagaggcgcgacagcgcggagtgacggtctccaccgcccaggtacgctccagcggcgcgcagctcgcccggcttgccgacctgctggacgccggggtcatccgggttgcaattgacagcgttttcccccttgcgcaggcgcagatggcgcatgagcgagcagcgcaggggcatcttgagggcaaaatcgtgctgtcggtgatggactcgtcagccgggtaa

SEQ ID NO: 135951 - DNA, 1176 bp, Enterobacter cloacae
atgcctgattttactgcttcgccgctggtggacgccctggaagagaatctgttcagcctgctggaaaaactggccgcggaggtcaacaccgaagcgctgccgctgatcgatctttccagcggcagtccggatcaacccaccccgccggaagtgatcgactcgctgcagagcgctattcatcgtcgtgaaaaccatggctacccgtcgttctggggcaaaccacaggtccgcgaggcgatcgcccggttctatcgccggcagtatgatgtggaactcgatccgcacagcgaagtcgccgtgtttcaggggtcgcatatcggtataggcggcatcccgcgggcgctgctcagccccgggcaatacctcatctccaccgatccctgctatccgatttaccgctcggcggcgctgcagtcccaggcgtcgttttatggcctgccgctcggggcggagaaccatttcctgccggattttaacgatcttcctcgggaagtcgctgacaaggccgggctggtggtgcttaactatccgcataacccaaccggcgccctcgccacgccggcgctgttcgccagcgcgctgcagtttgctcgtcgtcaccaggtgccgatcctccatgattttgcctatgcggccatcggcagcgcggccagcgatgcgccgctgagcctcttctcccaacccgacgccaaagcatggggagtggaaacctatactttttccaagacctttaatatggccggctggcgcttcggcttcgcggtcggcaacgcctcgattatccgggcgtttaaaaagctgcacacccatagctacagcacggtgtttggcgcgattcaggatgcggcgatcgccgcgctcaacctgccggccgaacggattgcgcagctgacggcggtctatcatcaacgtcgggagtgggttctgcgtcgactggctgcgctgcgctggccggcgcgtgacgcacaaggcactttcttcctctggctcggcgtgccgcccggctaccgttcgcaggagtttgcccgcctgctgctgcaggaagcgcatattctggtggcgccgggcacgggttttggcgcagggggagaaggatttattcgcatcagcctgaccgcaggggacgaggcgctgagcaacgcgctggaccgtcttgcccggctggcgctgttttag

SEQ ID NO: 135952 - DNA, 807 bp, Enterobacter cloacae
atgaacaagtcagttgcgcgcgggatcgctctcgccctgttgtcggccacctctttttatgccgccgccgacgctcatcttatccgcgtcggctttaaccccgggccatataaagaacaatttgagaaaggcgtcgcgccctatttattgagtaaagggtataaaatcgaatataaggatttcagcgacggtattcaggtgaatgacgcggtagcccgcggcgatatcgaagcgaatattatgcagcatccggtatatctgaaagcaattaatgagcggctggggatcgataacgtgggcattgtgcaggtccccacgccgccgatggggctgtatggtgggaaactgaccaccctggggaccccggcggcgggcaccgtcgtgtcggtaccaaaccagccgtcaaatgaatatcgtgcggtactggtgctggagagccttggctgggtgaaaattaaaccagacagcgatccggccactttttcgcagcgtaacatcgtagataatccttacaaaattgtcctaaaagagatggataatgcccagcaggttcgcgctctgccggacgtcgactatggcctgattcagggcaattttgccgtctccagcggtatgtccctgacctcggcattaaagctggaagcagccaccagcaattttattaatgtcgtgaccgtcgccggtaaaaatcagaaggcgcagtttgccaaagatattatcgatggctaccactcggccgagttcaaaaaatatattctcagccatccgcagtatgatggttacctgctgcctgactatttaaaatga

SEQ ID NO: 135953 - DNA, 1026 bp, Enterobacter cloacae
atgaataacgcgatgatagaatttcgccacgtcagtaaaagcttttccaggaaaggacatccggttctggccttgcaggatattaatctcagcattgagcgaggcgatatttttggcattattggctacagcggggcaggaaaaagcaccttattacggctgattaatcgtctggaaacgcctggcgagggcgaggtactgttaaacggcgagccgctacaggcctgcagcggccagcgcctgcaggcgatcaaaaaagatatcggcatgatctttcagaattttaatctgctgaattcgaaaaccgttttccataacatcgccatcccgctgattttacaggggcgcgacaaggcctttatccaggcgcgggtggcggaactgctggcgttcgtcgatctgagcgacaaaatccacagctaccctaatgagctgtcgggcggacaaaagcagcgggtcggtattgcccgtacgctggccaccaacccgtcggtccttctgtgcgatgaagccacctcggcgctcgacccccacactacggtgcagatcttactgcttttgcaggagattaatcgtcggtatggcatcaccatcgtactgatcacccatgagatgtcggtgatccagaaaatctgtcacaaggtggcggtgatgcaggcgggccgtatcgttgaacaaggggcggtttttgatctctttgctcagccgcagcatccggtcactgccagtttcgtgcagtcggtggtgcacgaccgcctgccgcagcgggtggcgtcgttcctgcagcgcgataacggcgcccgggctttacgcctcgaatttgtcggcgcgacggcgcagcagccgattattaaccacctgatccgcgagtatgctgtcgaggtgaatatcctgtttgccagcatgtctgaagttcagggccggattctgggatttatgattgtgcagctcctcggcgagcctgacgaaaccgaccgcgccatcacccatctggtcgatgcaggagtgaaaatcacccatgtttga

SEQ ID NO: 135954 - DNA, 669 bp, Enterobacter cloacae
atgtttgatcttattgataccgccatcaccggcgatcagtttctgctggcgctgcgtgacaccctgattatggtcgccgtctcgctgggctttggcgcgctgatcggcgtcccgctggggattgtgctggtggtttgccgtcccggcggcatcgtggccaacccggtggtgcatcaggcgctgaatccgctgattaacgtgctgcgttcgctgccgtttatcattttgctgattgtgatcctgccctttaccagactgctggtgggcaccactatcggcaccgcgggagccatcgtgccgctgatcgtctttgtcgccccctacattgcccgattagtggagagctcgttgctggaggtggatgaggggatcctcgaggccgcggacgccatgggcgcaacccccctgcagacggtctggcactttatgctgccggaggcggcggcatcgctgattctggccctcaccacggcgaccatcggtctgctcggcgccacagccatggcgggtacagtgggcggcgggggaatcggggatctggctattacctatggctatcagcgcttcgacgctttcgccaccctcactaccgccctggtgctgattgtgattgtccagcttatccagacgctgggcacccgactggctcgccgactgcgccgtgaataa

SEQ ID NO: 135955 - DNA, 747 bp, Enterobacter cloacae
atgaagcatgttcacaagctggcctggataggcctgttcgtcaatattattatctgttttgtcgcgcgaaatttattacttgatgaaggacagctgaacttccatagtcgggcggacggcgtatggtcctggctggtgctggccctgtttattgccgtggtggttcaggcgatcagcataatgctgtcaggccgctacccttatctggccatcgtcctggcgtttgttggcggcatcgtgatggtgcccgccagcgtgatctttctggtgggtagcctgttcagcttgcaaacgcggattaatgccggatttacgccctggcgatcaaccacggcagtgggcgaggctgataaccagcagctattaacctttaatgcctcaggcttttatccccaaggggcgctggcgctcatcgccgggatcattattttaatgattggcatgggtataggcggagtatttattgccgctggtattgttgcgctgtgcaatggctatcgtctgcaaaatcgggtggtgattggcgtgagcggcgagtcgatgatatttacgccggggctctatgccgatacctacgttattcccttgcgggatgttgccgtagttgaacgcagcaataatgatgcgaaagtccgactgctgatccgttccagcggcagaagcttcacgttgcgtaaaaaactgctcgccggcgataaggttaatgacgccttcgccgccattctggcaaaactgactaccgtttaa

SEQ ID NO: 135956 - DNA, 195 bp, Enterobacter cloacae
atgtattacacgttaggagataccactctccatttttatcgctatcagtgcaaattttacgtcgcccactgggaagggggtaacgtgatgagcgaaaaatttaaatcgtttatcgaacagatcactgagaagaccgggctggatgcgaaacgcgtcgagaccgccgcgcgcgattattttactaacgtggattaa

SEQ ID NO: 135957 - DNA, 1119 bp, Enterobacter cloacae
atgaccccgccctctctgtacatattgctgacgcttaacaacgtggagaacctgatgagtaacaacacgataaatatcgccctgattggctacggattcgtcggtaagaccttccacgcgccgcttatccgttcggtgccggggctgaacctggcgttcgtcgcttcccgcgatgaagagaaggtcaaacgcgacctgccggacgtcacggtgatcgcctccccggaagctgcggtccagcatccggacgttgacctggtggtcatcgcctcccctaacgccacgcacgccccgctggcccgcctggcgctgaacgccggcaaacatgtggtggtggataagccctttaccctcgatatgcaggaggcccgggagctgatcgccctggcggaggagaaacagcgtctgctttccgtcttccataaccgccgctgggacagcgactatctcgggatccgtcaggtgattgagcaaggcaccctcggcgcggtgaaacacttcgagtcgcatttcgaccgcttccgcccggaagtccgcgtccgctggcgcgagcagaacgtcccgggcagcggcttgtggttcgacctggggccgcacctgatcgaccaggcgctgcagctatttggtttgccgcagtcggtgcaaggcaacatagccaccctgcgcgacggggcggagatcaacgactgggcgcatgtggtattaaactacccggcgcataaagtgatcctgcactgcagcatgctggtcgcgggcggctcgtcgcgcttcaccgtgcacggcgataaaggtagcgttatcaaagcgcgggccgaccaacaggagagccagctgctggcgggcgtggtaccgggcagcgccggctggggccaggatgacgacccgctggttatctatgatgcctcgctgcaggcccacgcgcaggctaccccgcagggcgatcagcgccagtactatatgctgatccgcgatgcgctgaagggccagatcgccaatccggtgccgccggtggaagcgctggcggtgatggccgttctggaagcggcggtgcgctctgctgaaagtggtatggtgcagaccctggacctgtccgacgacgagcgcaacacgctgcgctaa

SEQ ID NO: 135958 - DNA, 744 bp, Enterobacter cloacae
atgcataagctcgccaggcaaaaacatattctcgacaggcttagcgaaaccggtcagctgagcatcagcgaactggttgcagatctgcaggtgtcggccgataccattcgccgcgatctgagcgacctggaacaacagggcgtgctgcagaaaagccacggcggggccatcgcccttaacgtcccggccatgacgcgccagggcagaaacgctcttctcacccagaccaagcagcgcctgggtcagcaggtcgccgcgcgcattccctctggctcgacgctgtttctcgacgccggaagcacgctgctggcggtggcagcccagctgaaagggccgttgaccgtgatcacggcttctctggatatcgctcagctgttcagcgaccgtaccgatatccagctgatcctgcttggcggccagtgggatagtaaacaacggctgttcgccggcagcgccaccctgtcgctggtcacccgctaccgggccgatatcgccattctcggcgcctgcgcgctccatgccgggctggggctgagcgccagccaggaagctgatgccgacgttaaacgcgccatgctggccgccagcgccgagcactggctggtggcggaccataccaaactcaaccgctgcgaaccgtggcgggtggccggactcagcgacattcaccatctttttcttgatcgtccctgggctgagctgggggatgaccccgccctctctgtacatattgctgacgcttaa

SEQ ID NO: 135959 - DNA, 984 bp, Enterobacter cloacae
gtggacgcgattaaaggctcggagttgcagataccggacgcgatcttcgcgtgggtgctcgacgggcaggggggcgttaagccgctcgccgatgacgatattatcgacaaagacaagccttgctggctgcatctcaactatacccatagcgacagcgccgactggctggcggccaccccgttgctgcccaataacgtacgcgatgccctggcgggagagagcacccggccgcgggtgacgcggatcggtgacggggcgctgatcaccctgcgctgtatcaacggcagtaccgatgagcggcccgaccagctggtggcgatgcgcctgtatatggatgagcggctgatcgtctccactcgtcagcgcaaagtgctggcgctggacgatgtgctgggcgacctgaaggaaggtaatggcccgacggacggcggcagctggctggtggaggtctgcgatgcgttgaccgatcatgccagcgagtttatcgaacaactgcacgatcgcattatcgacctggaagacgacctgctcgatcagcaggtgccgccgcgcggatttctcgcgctgctgcgtaagcagctgattgtgatgcgccgctatatggcgccgcagcgcgacgtttatgcccggctggccagcgagcggctaccgtggatgagtgacgatcagcggcggcgaatgcaggatatcgccgagcggctggggcgcggtctggatgagatcgacagctgtatcgcgcggacggcgatcatgagcgacgagatcgcccagattatgcaagagtcgctggcgcggcggacctataccatgtcattgatggcgatggtgtttctacccagcacctttttaaccggcctgttcggcgtcaacctcggcgggatccctggcaacagctggcatctggggtttagccttttctgcttgatgttagtcgttgtcatcggtggtgttgcgtggtggttacatcgcagtaaatggctgtaa

SEQ ID NO: 135960 - DNA, 1374 bp, Enterobacter cloacae
gtgaccgctttttctaccctgactgttttacctgccgcccaattagccaaccttaacgagctgggttatctgtcgatgaccccggttcaggccgccgccctgccggcgatcctcgcggggaaagatgtgcgcgtgcaggcaaaaaccggcagcggaaaaacggccgcatttgggctgggtctgctgcagcatatcgatccggcgcgcttcgagacccagtcgctggtgttgtgcccgacccgcgagctggccgatcaggtcgctggcgagctgcgccgcctggcgcgctgcctgccgaacatcaagattctgatgctctgcggcgggcagccctttggcgcccagcgagattccttgcagcatgccccgcatattatcgtcgccaccccgggccgtctgctcgatcatctgcagaagggaacggtctcccttgacgcgctgcagaccctggtgatggacgaagcggaccgcatgctcgatatgggcttcagcgacgccattgatgaggtgatccgcttcgcaccggctgaccggcagacgctgctgttttctgctacctggccggcggcaatcgcggcgatcagcggccgggtgcagcgcaatccgcagaccattgagatcgacactgtcgacgcgctcccggcgattgaacagcagttctttgaagtttcccgccacggtaagattgccctgctgctgcgcctgctcagccagcatcagcccgcatcctgcgtggtgttctgcaataccaaacgcgattgccaggcggtctgcgatgcgctcaacgccgccgggcagagcgccttgtcgctgcatggtgaccttgagcagcgcgatcgcgatcagacgctggtgcgcttcgctaacggcagcgtccgggttctggtggcgaccgacgtcgctgcccgcggtctggacatcaaatccctggcgctggtggtgaatttcgagctggcctgggatccggaggtgcatgttcaccgcatcggccgtaccgcccgcgccggtgaacaagggctggccatcagcttctgtgcgccggaagaggcgcagcgcgccactattctggccgacatgctgcagctttccctgaactggctgccggcgccgacgggcaacaccatcgcgccgctgacggcggagatggcgacgctgtgtatcgacggcgggaaaaaggcgaaaatgcgcccgggagatgtgctgggagccctgaccggggatatgggctttgatggtgccgatatcggcaaaattaccgtccacccggcccacgtctatgtggcgatccgccagaatatggcgcagaaggcgtataagcagttacaaaatggcaagatcaaaggtaaatcctgccgcgtacgactgctgaagtaa

SEQ ID NO: 135961 - DNA, 936 bp, Enterobacter cloacae
atgctgcaaaaccaagaaatcagtaaaaaagaaaagtacaacatcgataagctgcagaaacgtctgcgccgcaacgtcggtgaggcgattgccgacttcaatatgattgaagagggcgaccgcattatggtttgtctttcaggcggcaaggacagctataccatgctggagatcctgcgcaatctgcagaaaagcgcgcccatctccttctcgctggtggcggtgaacctcgatcagaagcagccagggttcccggagcatattctgccggcgtatctggagcagctgggggttgaatacaagattgtcgaagagaacacctacggcatcgtcaaagagaagatcccggaaggaaaaaccacctgctcgctgtgctctcgcctgcgtcgcggcatcctctatcgtaccgccaccgagctcggggcgaccaagatcgccctcggccatcatcgcgacgatatcctgcagacgctgtttttgaatatgttctacggcggcaaaatgaaagggatgccgccgaagctgatgagcgacgacggcaaacacatcgtcatccgcccgctggcctactgccgcgaaaaggacatcgagcgcttctcccaggccaaaggcttcccgattattccgtgcaacctgtgcggttcgcagccaaacctgcagcgccaggtgatcgccgatatgctccgcgactgggacaagcgttatcctgggcgcattgaaaccatgttcagcgcgatgcagaacgtggtgccttcgcacctgagcgacgtcaatctgtttgattttaaaggcatcacccacggctcagaggtggtggatggtggcgatctggcgtttgaccgggaagatattcccctgcagcccgccggctggcagccggaagaagaagacgcccgtctcgatgagctgcgtctgaacgtagtggaagtgaaataa

SEQ ID NO: 135962 - DNA, 435 bp, Enterobacter cloacae
atgagcagaatgattcttgtccctatcgatatctctgataaagaatttactgaacgcattatcagtcacgttgaatcggaagcgcggattgacgacgccgaggtgcatttcctcaccgtgatcccttctctgccctattatgcctcactgggaatggcctataccgctgagcttcccggcatggacgagctgcgtgagggttctgaaacgcaattgaaagagatcgcgaagcagttctccatcccggaagaccggatgcattttcacgtcgcggaaggatcgccaaaagataaaatccttgcgctggccaagtcgctgccagccgacctggtgatcatcgcttcgcaccgaccggatattacaacttatctgctgggctccaacgccgccgcggtggttcgtcacgccgagtgctcggtactggtggtccgctaa

SEQ ID NO: 135963 - DNA, 213 bp, Enterobacter cloacae
atgcaccaccatccggttaaatcttcccgaattatctccgtcgcctacgatgacgcctccgccacactggaaatctatttctatcaccagccgccattacaatataccggggtcccaccgcgtatttttcatgattttttacaggtggtgtcaaaaggccggtattatgacggggtgatcaaaggaaaatttcccgaacgcaagctacgttaa

SEQ ID NO: 135964 - DNA, 1125 bp, Enterobacter cloacae
atgaaaagaaaagtactggccctcgttattccggctttattagccgccggtgccgcgcatgcggcggaaatttataataaagacgggaataaattagatctctatggcaaggtagatggtctgcattatttctccagcgactcgaaaaaagacggcgatcaaacttatttacgttttggctttaaaggcgaaacccagatcaacgatatgcttaccggctatggccagtgggaatataacgttcaggccaacaacaccgagacctccagcgatcaggcgtggacccgtctggcattcgccggtatcaaagtgggcgattacggctccttcgactatggtcgtaactacggcgtgctgtacgacgttgaaggctggaccgatatgctgccggagttcggcggcgactcctacacctatgcggataactttatggcaggccgcgccaacggcgtcgcaacctaccgtaacagcgatttcttcggtctggtggagggtctgaacttcgccctgcagtatcagggtaaaaacgaaggccagaacgcgcaggatatcaacgtcggcaccaataaccgcagcagcgacagcgatgttcgcttcgacaatggcgatggtttcggcctctctacttcctacgacttcggcatgggcatcagcgcggcggcagcttacacctcgtctgaccgtactaacgatcagatgacccagaccaatgcgcgcggcgataaagcggaagcctggaccgccggcctgaagtacgacgccaacgatatctacctggcgaccatgtactctgaaacccgcaatatgaccccgtacggcaatgacggcgtggccaataaaacacaaaacttcgaagtcaccgcgcagtatcagttcgacttcggcctgcgtccggccatctcctacctgcagtccaaaggcaaagatctgtacaataacggccgctatgccgataaagatctggtcaaatatatggacgttggcgcgacctattacttcaaccgtaatatgtccacctatgttgattacaaaatcaacctgctggatggtaacgacaaattctacgaagacaacggtatctctaccgataacatcgtcgccctgggcctggtttaccagttctga

SEQ ID NO: 135965 - DNA, 255 bp, Enterobacter cloacae
atgaagcatcggcaccgtgccggcatggccagcttcgccggtaaaacggcagttcagccgtctggcgccgttaatcgcctccaccacgccgagcgccagccccgcctgctccaggcacggcccctgctcgatatgcagttccagataggcggcgatatcccgcgggtgacgggccgcgtgggcgatccgcgccggatcgagtccggcattcaccagcgcctgggcgacgctcaccccgtcggtatcgcactgtga

SEQ ID NO: 135966 - DNA, 519 bp, Enterobacter cloacae
  misc_feature (453)..(462): n is a, c, g, or t
atgcacagtagcaacgtttcgacccacggcatggcggtggccccccaccacctcgccagtcagagcgcgctggcgatcctgcgcgagggcggcagcgccattgaagcgatggtggctgccgcggcggccatcgccgtcgtctatccccatatgaatggcctcggcggcgatggcttctggctgatcgtgccgcctgagggagatccaatcgccattgacgccagcggggccgccggatcgctggcaaccctcgaggcctacgccggacagcggcatattccccaccggggaccgcaggccgcgctgaccgtcgccggcaccgtcagcggctgggacgaggcgctgcgtatttcacgggacttaaccggccgcgcgctgccggtggcccgcctgctggccgatgcgatcggctatgccgaagacggcattccggtcactgcctcgcaggcccannnnnnnnnnccagcaaactggaagagctgcgccatcagccgggcttcagcgaaacctggctggtag

SEQ ID NO: 135967 - DNA, 1008 bp, Enterobacter cloacae
atgctggccagcgacggtctcgacagcttttatcgcgggccgctggccgagcgtctcgcgcagggtatggccgcgctggggatgccgatcaccctcggcgacctgcaggcccaccgcgcccggcgtccggggccgctgacgctccagcaccagcagggcacgctgtggaatcttgcgccgccgacgcagggactggtgtcgctggcgatccttggcatcaccgaccgcctgaacatggccgatgccgacgacgcgcaaacggtgcaccgtattgtcgaagccaccaagcgggcatttgccctgcgcgatgcgcatatcaccgatccgcgccatctggatgtggatgtacaggcgttgctcaccccggaagccctgcagccgctggccgacagcatcgacgacgccagcgcttccccctggggcggcggcaaaggcccgggcgataccgtctggatgggcgtcgtggatgacagcggactggcagtgtcatttattcagagtatctatcacgagttcggcagcggcgtggtactcccggacaccgggatcgtctggcaaaaccgcggggcggccttcagcctcgatccgcagcatctcctggcgctggcccctggcaaacagccattccacaccctcaaccctgccgccgcgcgcctgaacgatggccgggtgatggtctatggctcgatgggcggcgacggtcagccgcaaacgcaggcggcgctgtttactcgctatatcctgcagggggtgccgttgcaggagagcatctcccgtccgcgctggctgctgggccgcacctggggccagtcctccgactcactgaagctggagggacgctttgcccccgcctgtatcgctcgcctgcgcgagctggggcatgacgtagaagtgctggctgatttcagcgaagcgatgggccacgccggcgccattgtccgtcatcccaacggcctgcttgaaggggcgaccgatccacgcagcaacggcgccgccgccggatactaa

SEQ ID NO: 135968 - DNA, 186 bp, Enterobacter cloacae
atgaccacacagccagactggagcgagtatctgacgcagatgactcacctgttggatatggagctggatgcgccgcgtcgtgaagagctggagcgccagtttgcccgcatcgccgccatggcgcagccgctgatggactatcccctcgggccgcgcgaggagattgcgggggtgtataaagcatga

SEQ ID NO: 135969 - DNA, 1416 bp, Enterobacter cloacae
  misc_feature (231)..(240): n is a, c, g, or t
atgactcttcatcacttcactatcgccgagatccagcgtgcgctgcacgatggcgaactgagcgcccgggagatcgcccgccagacgctggacgatatcgcccgcgtgaatccgcagatcaacgcctggaccgaggtcaccgcccagcgcatgctggcggaggccgacagcatcgacgccctgcgccgggaaaagcgccccctgccgccgctggcagggattccttacgcnnnnnnnnnnccttacgcagtgaaaaatctgtttgatgtcgccgggcacaccaccctcgccggcgccgaactgctgagcgatcggccgccggcgaccagcgacagctgggcggtgcgccagctgcacagcgccggcgccctgctcagcgggatgctcaatatggacgcctacgcctacggcttcaccaccgaaaacagccactatggcgcgacgcgcaacccgcacgatctgtcgcggatcgccggcggttcttccggcggttcggccgcggcggtggcggccggactggtccatttcagcctcggcagcgacaccaacggctcgattcgcgtccccgcgtcgctgtgcgggatctttggcctgaaacccaccttcggtcgcctctcccgctccggcagccatccgtttgtcgccagtctggatcatattggtccctttgcccgtcgggtggccgacctcgccgcggtgtatgacgccctgcagggacgcgacccggccgatgactttcaggccgataaagccagcgagcgcaccggcaacctgctggagcgcggactggaggggctgcgctgcgcgcggctggggggctatttcaccacctggtgcgatgacgacgcccgggcggccgtggatcgggtcgcccacgcgctgagcgccgacagcgagctgcagttcgcggatgccgccctggcccgctcggcggcctttatcatcagcgccagcgaaggcggcaatcagtatctggcggatcttcgccactcgcccgagcgctttgaaccccactcccgcgagcggctgctggccggggcgatgatcccctcggcgtggtatctgcaggctcagcgcttccgccgtcatgcccgtcaggcgatcaaatccctgttcagtcaggccgacgtgctgattgccccggccactccatgcagcgccacgccgattggcgccgaggagatagtgattaacggccagccgctgccggtgcgcgccagcatgggcatgctgacccagccgatctccttcctcggtctgccggtggtgaccgtgcccctgcgtaccgccagcggtaagccgattggcctgcagctgattgccgcgccgtttaacgaacaagcctgtcttcgcgccgcgcgggcgctggaagcgatgggcattaccgatgcccgagtggcggagagtgcagcatga

SEQ ID NO: 135970 - DNA, 387 bp, Enterobacter cloacae
atgatcaatctggataatgtagaccgcccggcgatcctcgccgaggtgacggcggcgttttatcagtatgaagaggcgctggtcagcaataacatcgaggcgcttgatgcgctgttctggcacgacccgcgcaccgtacggctgggagccggcgaaaatctgtatggcattgaggcgatccgcgcctttcgcgccgcccgccccgccgccggtctggcccgcgatctgcgccataccaccattaccacctttggcgcggatatggcggtgtgcagtaccgagttcacccgcgaaggcagcgcccgcctgggccgccagcagcagacctgggtacgcttcccctacggctggcggattgtcgccgcccaggtcagtctgatggactga

SEQ ID NO: 135971 - DNA, 423 bp, Enterobacter cloacae
atggtgttcatcagagctgctgaagcaaaagatatcccctcgctgcaaacgctatttctgcagttgggctatcagacggagacggcgatcttagcgcaacgcatcactgccccgcagagcatgatgagtgcgctggtggcggaaacagaaaacgccgtgtgtggcgtaatcgttatcaattttattttaccggtacatgagaaccgtttatgggcattaatttccgcgctggtcatcgaggaatcgtcacgtggatcagggataggccagcagcttctccaggccgcagagcgcctcgcccgtgataaacaatgcgctcagatcgagctttcaagtagtgaaaaaagaatcagagcgcatcaattttatgaaaataacggctacaaggaggttcgcaaacgcttcgttaaacatttgtcttaa

SEQ ID NO: 135972 - DNA, 558 bp, Enterobacter cloacae
atgaaaaatgaaccgctttgccacgctccctgccccatcgcccgcagcctgggccgcatcggcgacagctggagcatcatgatcctgcgcgatgccttcgcgggctttacccgctttgacgagttccagaaaagcagcaacgtcgcgcccaatattctgtcgcgccgcctgaaggaactggtcgatgacggactgctggagaaggtgtgctacagcagcaccccgccgcgctacgaataccacctcacgccgcgcggccgcgatttccgcatggtgctgctggcgctggcggaatggggtaatcgccacttcgcccccgaagggcgtcagatgcagctggtggaaatggcaacccagcgccacgtggagccagtcatggtggataaagcgaccggggaagagattattccgggtaaatacgccatggtgccgggccccgccgcctcgccgctgatgaaatatcgtcatgaatatctgctgcgcaaacgcgaaggcgatagcggacaaaaattccagcctgaaccttacagagatgccagcaatgaatccgaccagtaa

SEQ ID NO: 135973 - DNA, 1011 bp, Enterobacter cloacae
atgaatccgaccagtaagaaaaatattcttgtcctggcggccctgggggctgccgccctggcggcagcgagctacggcgcttactggtggcataccgggcgctttatgcagaccaccgatgatgcctatgtcggcggcgacattagcgccatctccagcaaagtctccggctatatccagcagctggcggtgcaggacaatatggcggtgaaaaaaggtgacctgttgatccgcattgacgaccgcgattatcgcgccgccctcgcgaaagccgccggagaagtggcggcgcagcaggccgcgctggccgatatccaggctacccgccagcttcagcaggcgaccattgccggctctgcggcctcgttactggccgccacggcggcaaccgaaaaactggctaacgacaaccgacgctataacgccctggccgcgtcgagcgcgatttccgcacagatccgcgataacgcctccgccgattatcgccgggcgcacgccgagcaggagaaggccaaagcggataaaaccgtggccgaacgtcagctggcggtgctggatgctcgccaccagcaaatcctggctgccctggcgcaggcccaggctaacctcgagatggccaggctgaacctcagctataccgacattcgcgcgccgttcgatggggtgattggcaaccgccgcgcgtggtccggctccttcgtcagcagcggtacgcagctgctctccctggtacccgcgcacggcctgtggattgacgctaacttcaaggaaaaccagctggcgcatatgcgtgccggccagccggcgaccatcgtcgccgatgtgctgccgaaccatacctttaaggggcatgtcgccagcctggcgccggcgaccggctccgggaatttcactaaaatcgtgcagcgggtgccggtccgcattgcgctggaaggtgacggggcaaagcttgacgtcctgcgcccgggactgtcggtgatcgtcaccgtgaacgaaaagagccctcgatga

SEQ ID NO: 135974 - DNA, 1563 bp, Enterobacter cloacae
atgagcaccgttcaggcgctgtccgccccgcagggtctgtcgatgccgacggcgaagaagatcttcgccttcgccagcatgtgcgtggggatgtttattgcccttatcgacatccagatcgtctccgcctcgctgcgggatattggcggcggcctgtcggcgggcgacgatgaaaccgtctgggtacaaaccagctacctgatcgccgagatcattattatcccgctttccggctggctggcccgggtcatgtcgacccgctggctgtttgccgcttccgcggcgggcttcacgctgatgagcctgctgtgcggctgggcgtggaacatccagagtatgatcgccttccgcgccctgcagggactggcgggcgggtcgatgatccccctggtgttcaccaccgctttcgccttttttcagggcaaacagcgggtcatcgccgcggcgacgatcggcggcctggcctccctcgcccctacgctgggtccaacggtgggcggctggatcaccgaaaactacaactggcactggctgttctttatcaacgttgttccggggatttacatcgcggtggcagtgccgctgctggtaaaagtagacagcgccgaccccactctgctgcgcggcgccgactatctcagtattctgctgctggccttgtccctcggctgcctggaatataccctcgaagaaggtccgcgctggggctggtttgatgacgcgaccctgacgaccaccgcctgggtcgccctgctctgcggcgcggcctttgttatccgcaccctgcgccatccgcagccggtgatggatctccgcgccctgcaggatcgaaccttcagcctcggctgctatttctcgtttatggccggcgtcggcatcttcgccaccatctatttaaccccgctgtatctggggagtgtgcgcggtttcagtgcgctggagatcggcctggcggtattttccaccggtctgttccaggtcatgtctattccgttttattcgtggctcgccaaccgcgtcgatctgcgctggctgctgatggccgggctgatcggctttgcggtgtcaatgtacagctttgttccgatcactcacgactggggggcggaccagttgctgctcccgcaggcctttcgcggactggcgcagcagtttgccgtcgcgccaacggtgaccctgacgctgggcagcctgccacccgcgcgcctgaagctggcctccgggctgtttaatctgatgcgcaacctcgggggcgccatcggcatcgccctgtgcggcacggtgcttaacgacagaaccaatctgcactatagccgcctggcggaccatctgaataacgccaacctggcaatgagcgattttgttcagcgcagcgcggcaaacttcaccgtccaggggatctcgccggatgccgcgcagacggcggcgctgaaaaatctttccgcgctggcgctacgggaggcgcgaacccaggcattttccgatgctttctacctcatcatgatgggttttttacttgccgcgctgctggttcccttgatgaaaaagccgccggcacactga

SEQ ID NO: 135975 - DNA, 1275 bp, Enterobacter cloacae
atgggcgtttccgttaaacgcattgtcgtcaccgggatggggattgtcagcccgctgggctgcggcgtacagcacgtctggcagtcgctgctggcaggaaagtcagggatcacccgactcagcgagcagctggtcgcggatattccctgcaaagtggccggccaggtgccgtccattgacagcgatccgctgcacggcttcgacccgctggcgaccatcccggcgaaagagcgcaaaaagatggatcgctttattgagtttgcgctggtcgccgcccgtgaagcgctgacccaggccggctggtcgccagcatctgcggccgaacaggaacgtaccgccacagtgatcgccaccgggatcggcggcttcagcgagatcgccgatgcggtacataccaccgatgaacgcgggccgcgtcgtctctcgccgttcactatcccctcttttctggccaacctggccgccgggcatgtgtctatcgcccacggcttccggggccccatcggcgcgccggtcaccgcctgcgcagcgggtgcccaggccatcggcgatgcagcgcggatgatccgcagcggcgaggcggatattgccctctgcggcggcgcggaagcggcaattcatcgcgttagcctggccggatttgccgcggcaagggcgctgtccagcgcctacagcgcccagccggaaagcgcatcccgcccctttgaccgcgaccgcgatggatttgtgatgggagaaggcgcggggcttatcgtgatcgaatctctggagcacgcgctggcgcgcggggccacgccgctggccgagctggtgggctacggcaccagcgcagatgcttatcacctgaccgcaggcccggaagacgggaacggcgcacgtcgggccatggagatcgctattcgccaggccggggtgaccgtcgaagagattgatcatatcaacgcccacgccacctcgacgcaggtcggtgataaaggtgaactggcggcgattaaaacgctgtttggcgtccatccggtcgctattacctcgacgaaatccgccaccggccatctgttaggcgcggccggcgggatcgaggccatcttcaccattcaggcgctgcgtgaccaggtggtgccgccgacgctgaacctgcatcaccccgatgaagacgcggcaggtctccatctggtggcgctgcaggcccgcccgcagaaaatgcgttatgcgctgtcgaacggttttggctttggcggcgttaacgccagcctgctgctgaaacgctgggaataa

SEQ ID NO: 135976 - DNA, 900 bp, Enterobacter cloacae
atgctatcttacatgctatctcaatatgccaggctacctgtgcctgaagttactctacgttcatggttaaaacaatggttgtcagagcaggaatcgaggtgtacagacagaagtttctcggcgcgatttccctggagagaaactggattatgtcaggaatattttttacaacgaaaactcaaaattgatggaaagcaatttcttactggcccccgttatcagggcggaaatattaacaaaccttttattgatattgtaggtatggattctgacctaaatcatactgcattagaactcattagtaaggaatggtcacaactcagagctcagtatgtccgcattcttgtgccaggccagtccttcccgcagggtattcccgaccagtatatatatgccacttctttttctgaaccccctgaattcaatgataaatctcttactttgcaagtggcgacatacgaagattttgactggtgttgtcaggccctgggtgatgcctataagcatacatggcagacagttcgcgaactatctgcaagcaatttggtagcagttgatgacgaagagttgtgtgaccatatttctgagagagaagtatatattatctatgaaaacgatgttcgcgccgggttgctaatatgccagaaaggaaacctcgcttttctgagaggatatcgtattactgacaaagtaatacttcctgcttttcgtggtcgatcattatcggcccgagcgcaacgcctgctgtaccgattattaactcattccgattcggaactatctatgtatatgggcacaattattccgcagaatatcccctcgatgaaaactgcagaaagagcgggacgaacttgcatcctaagttatcaatttctacccatctgcagaacccacgactaa

SEQ ID NO: 135977 - DNA, 774 bp, Enterobacter cloacae
atgccaggtagtatagataaagcgccaagacatgatgaagccacaggctggtccagtactgcgataagctatcaacgcggcgaggcagatcctccccatcatcatgttgaggggcagctactcttcgccaccagaggggttatgctggtgcaaacagagagcgaccgttgggtgatccctcctcagcgggcattatggctaccgcctctgcatatccatagttatcatctgctttcacaaaccgatctcagggcgatctatttcagcagtagccttatcgcagaatgtacgagctttacgaagagtcaacaggtgcatgtgatcacggctacgccgttagtcaaagagcttatcgctgggctgttcagtgaggactacgccagaccgagtcaacggaagatagcgttgttgcttctggaaattctcagcgaggctccacctttaacgatggcgcttcccatgccgaatgatgagcgattattcagcgcggccagatcgctactggtcaatcagcgctgggaagcatcgctgagcgagctggcttttatgtcggccatgtcggaacggaccttttcccgattgtttatgaaggatacaggctttagttttagaacatggaagcagagagccagaatttgcgcttcgttggatcttctcgcgaacggcgttccaatcaaacaggtcgcttaccagcttggtttctcatgcccggcggcctttaccgctgcttttcgctgcattttgggggcaacgccacgcgattatgtgccttaa

SEQ ID NO: 135978 - DNA, 726 bp, Enterobacter cloacae
atgcgtgtacactttatcgtacatgaaagttttgaagccccgggcgcatgtgaaacctgggcaataaaccagggtcatgatgtaacttactcacgcgtctatgcaggcgatcggctacctgctgacaccgtaggcatcgattttcttatcgttatgggcggtccgcaagatccggacaccacgcttgaagagtgcccgcactttaatgctaaagcggaacaggcgctgattgcttccgcggttaaaaccggtaaggcggtgatcggtatctgcctgggttcacagctcattggtgaagcgctgggcgcgccgttctctcatagcccggaaaaagagattggtaaattcccgatcacattgaccgaagacggcagtaaggatgagatgttctctcactttgggaaaacactggcagtgggtcactggcataacgatatgccaggtttgacgccggaggctaaaattatcgcttacagcgaaggctgtccccggcagatcgttgcctattcagaccgcgtctttggtttccagtgccacatggagctcacattggacgttgtagaacggctgatcgctcattctgagaaagacctgagccgtgcagcagaatatcgtttcgttgacacgcctgaagcgctccgggcgcacgattacagtgaaatgaaccaagtgctttttgactttctgcataagctggaagcacgttacaaagcagctcaagcataa

SEQ ID NO: 135979 - DNA, 744 bp, Enterobacter cloacae
atgctgagaggtaaaagagctgtaattaccggtggtggcacgggatttggtcaggcgctgagcgtatggttagcgcgagaaggcgtcgaggtggatttttgcgcgaggcgcgctgatgacattcaaaaaacttgcagtatcattacggctgaaggcggaatggcgaaagggcatctctgtgatttaaccctacctgaatccctttctcagttttcttcacagttgttaactttagacaagcccatagacattttaatcctcaatgctgctcagtggctttcaggaacgttagacgatcaatcagacacagaaatcataaatactatcagttcaggcctgacaggttctattctgctgactcaggcattgctacccgggttaagacgttcagaaagtgcggatatcgtctcaattatatcttcatgtgggattcctaattttacagattcaattgcgcaccccgctttttttgccagtaaacacgggcttagcgggtttacaactaaactttcgtaccagttgtctaaagaaaatatacgtgtgactgggttgtatcccccggatttcgagctgacagggttagaggcgtttgtcgatagccagcccaaaatgggggaacgtctgatgaatgggcgttcagtctgggaaacaattcgctttgtgctgactcaaccccgtaattgccatatcaggagcatctactttgaaggcccaactcgcgaaaaactggcagtcagaagctga

SEQ ID NO: 135980 - DNA, 1614 bp, Enterobacter cloacae
atgggacggagatcaggatttgaaggttttatacgtgctacgggcagagccgtagcagcagcagagcgtgagcgtaagagagcagagcgccatcagtttgccgaggctcgccgaatagagcgcgaaataaaacgtgataatgctcagagacttcgcgagcaaaaggaggctgataagttagcaaaagccatgtatttggaagaacgtcaagatgaagtttccgatcttaacgctgagctgaacgagactatctccgcgctttcaacacttctggaacatactctcgaatttgatgattcgattgatttttcggcgctgaaaaaacatccaaaattcgaagaattcaaaacacctaagcatctcttaccagacccggagccagagataaaagttgtgcatgctccagctgcatggaagactattttcccatgggtaaagaacagatattatcgagaattgcagcaggcagaagaatctttcaataaaagtaaggaagatcattcaattaaacttttaagccagaaggttgagcttgatgctttagttgctgattatcaggcccgaagaactgcttacctcgaagaaataaaaagccagcacgacgaagttgaccagtttgagcaagactacctcaactgcgatcctgacagcgtattggcatattgcgaaatggtgctgacacggtctgaatatcctgagaacggcttcccacaagcctttaggttggcctatttacctgacagtaaggagttggtggttgaatacaacttacctgatattgcagtagtaccgcgcgagttggaatacagatatgtcaaaacgagagatgccattgatgccaaggcgcgaaagattggcgagatcaaagaactctatcaaaacataatcgccgcgatcacactccgcacaatgcatgagcttttcgaagctgacaaggcatctgctttaacatcagttctgtttaacggtgtaatcgaaactatcgatcctacaagcgggcatgacactaaagtcacattagtatctgcccgtgctttcaaggacgattttatgcaaataaaactcgaaagggtcgaaaagagtgcatgccttagaagtttaggtgcacaagtttcagggcggccagatgaactccaagcagtaaagcctattatcgaattcaacatggttgataaacgctttattgaacaaggtgatgctttatctgcccttgaaacacgaccaaaccttatggaactttcaccttcagaatttgaggtattagtatcaaatcttttcagccaaatgggactggataccaaactcaccagaggtacaaaagacggtggcgttgatgcggtggcattcgacacacgtccgatactcggtggcaaagtggtgattcaggctaaaagatataaagacactgtcggtgtcagttctgttagagatctttatggaacaatgatgaatgaaggtgctaacaaaggtattctggtgtgtacaagtcaatacggtaaagatgcatatcgtttctgcgaagataaaccaatcgaactcatagatggaggcgggcttctctacctcttaaaagagcatgctggggtatcagcacgtatcaaccccattttttaa

SEQ ID NO: 135981 - DNA, 225 bp, Enterobacter cloacae
gtgaaccatcttatcgttgaaaaaatcatcatcatcattcttctcgtcctgtggggattcgataccttcagaaccaggaaaagaaaacgctatgatcccgcgattgaagcggctgatgccagcgaacgttatcaatggcgctatctgagatgggggtttcgaatcatacaggtggtagcgggagtgtatatcgtcgtgcagctgattcaggttttactgagatag

SEQ ID NO: 135982 - DNA, 768 bp, Enterobacter cloacae
gtgcgcaacgtaaaaattgacgaggtcgatcgactcgatcgtgatgtggtggcgttaggtaatgactatgcgcagggatttatcctgcccccgcaccagcatcgtcgcgcacagctactgtatggcgcgaccggactgatgtatgtcactacgcaagacggagaatgggtggttcctccgcaacacgctgtctggatcccccctgaaaccgtgcatgccgtcagatttgcaggggtgaccacgcgtagcttgtatattgagccagattgtgtggccgctttcattaaacaccgtcgttgcgaagtgatcagcgtctcgccgctgttgcgccagctactgcttgaggctgtggatttaccaccgttgtacgacagcccacgcgatcgcacgctgatacagttgatgttgctggaactggccgccatgccggtccgcgaatttgacattccgttgccgcagcatccggcgctgctggcgctttgtcaggcttttttgcttaacccctctatccatgatcctgcggcgcgctgggccagggcgctgtttatgagtcctagtacctttcgccgccatttcctgaagcagctgggcctgtcgttttccgcctggcgacagcgagcctgcgtggtgagcgccctggcatggttgatagcaggcaaaccggtgaacgaagtggcattatcccttggatacgacaatgcgtcctctttcgccaccatgttccgccgcgtgaccgggcagccgccgtcgttttatcacccagcctga

SEQ ID NO: 135983 - DNA, 792 bp, Enterobacter cloacae
ttgaatgagatcgttattattgcgctggcaggctttactaccggcattaccacggtgctgttcggcttcggcggcggctttgtggtggtgccctttgtctatcaactgatgctccggcagccggcgatcgcgggcaacgccatgcatgtcgcagtggctacctcaacggcggtgatgatatttaacgccggctgggtcagctatcgaaactggcaggcgggcaggcttgccgcgcagacgctgtttccgttgttatggtttattgccattggggcggtggtaggctcctgtctggcggggatattgagcgagaatatcgttcgcgcgctgtttattttctatatgctggcaaccatcagcgattgtttgttgcgcaagggttttttcacgggcagcgctcggcgtcgcctgtccctgcccgtggtcaccggcggcggtgtaattatcggtacgatcgccgcattgctgggcgtgggcggcagcgtcatgacggtgcccctgctacgacgacacgggtatgcaatgcaggagtgcgttagcgcatccaacccgctttctttgcccgtggcgctatgcggggctgtgacctatgccgtcattggctggcacagcattccgctgagcggatttctggggtttatcagcctgaaaattttaggcctgctcgtcctgaccggctgggccggaatagtgtttagccgccgggcaatccctgcggtacctgatgtatggtatgcgcgcatctatgtgctgctgctgtgcctggtactcctcgccatgcttattcaataa

SEQ ID NO: 135984 - DNA, 933 bp, Enterobacter cloacae
atgggagagaaccaggaacactatcctcgcgatctgcgaggttacgcaggggagccgccgcacgcgcgctggccgggtggggcgcggatcgcggtgcagttcgttcttaactatgaggaaggcgcggagaatcacgtcctgcatggcgatgcgggttcggaacagttcctgtccgatattatcggcgccgccagctacccggcgcgccatatgtcgatggattcactctatgagtacggcagccgggcagggttctggcgcatccatcgcgagttcagccagcgcgggctgccgttgacggtcttcggcgtggcgatggcgctggcgcggcatccggagattgtggcggcgatcaaggctgcggattacgatgtggtcagccacggctggcgctggatccactatcagcacatggatatcgccgaggagcgcgcgcatctgcaaaaagcggtgcaggtactgaccgacctgttcggcaaaccgcccaccggctggtataccggccgcgacagccctaacacccgccagctggtggtggagcacggcggctttgactacgacagcgattattacggcgatgatttacctttctggagcgaagtggcctgcagcgacggcagccagcggccgcacctgatcgtgccttataccctcgacgccaacgacatgcgcttcgccaccgcccagggattcaacaccgcggagcagttttatacctatctgaaagacagctttgacgtgctgtatgccgagggtgaaaccgcgccgaagatgatgtccgtgggaatgcactgccggctgctggggcgcccgggccgtttccgcgcgctgcagcgtttccttgactatatccagcagcacgacaaggtgtgggtctgcacccggcagcagattgccgaccactggcgcgaaacccatccgtatcgcgggtag

SEQ ID NO: 135985 - DNA, 744 bp, Enterobacter cloacae
atgtcttccgttcgtatacaagtgattaaccccaacaccagcctggcgatgaccgaaacgataggcgccgccgcgcgtgcggtcgctgcgccgggcaccgagatccttgcggtctgtccccgcgccggggtgccgtcaattgagggccactttgacgaagccatcgcggcggtcggcgtgctggagcagatcagggccggacgcgagcagggagtggatgggcatgtgatcgcctgcttcggcgacccggggctgctggcggcgcgggagctggcccaggggccggtgatcggtatcgcggaggcggcaatgcatatggcgacgatggtcgccacccgtttctccattgtgaccacgctgccgcgcacgctgatcatcgcccgtcatttgctgcaccagtacggatttcatcaacactgcgcggcgctgcacgccattgatttgccggtgctggcgctggaagacggtagcggcctggcgcaggagaaagtgcgtgagcgctgcattcgcacgctgaaagaggatggtagcggggcgattgttcttggctgcggcgggatggcgaccctggcgcaggagctgacccgcgagctgcgggtgccggtgatcgatggcgtcagcgcggcggtgaagatggtggagtctctggtcgcgctgggcctggcgaccagcaagcatggggacttagcgttcccggagaaaaaagcgttaagcggacagtttcagtcgttaaatccattttaa

SEQ ID NO: 135986 - DNA, 246 bp, Enterobacter cloacae
atggtgacccgcctcagccagcgctcctctttagtgattgccgcctggggcgccccctggcgacagggctgccgttgcgacgatcaccagcagctggtcggtttgctgcgggataaagccctgcagccgctcagcgaggcgctgatgcaccattttgatcatattgtcgccagcctgtgcttcgagcgcgatggcgtcagcctgcccgatttttcccggctgttcgccggccacaaggagtcgtga

SEQ ID NO: 135987 - DNA, 570 bp, Enterobacter cloacae
gtgggcggcaaggatctcgcacagcgctttggggaattcatgttttaccagcgggtcaaggaagctgcggttaaaaaacaggtcggcatacccggcggcttttttatccgcgtcgctgtcggtgagggtatagctcggggtcaggttgagcaccacgccgatctcgcccgccagcgccagttcacgataagccgttaccgctttggcgtgcgccagcataatgttaaacgccacctgcgccgccagccgaccatctttcttacacggatagtggaagtcgtacaggtagcccccctcaaccggcacaatcggctcgttgaaggttatccagtatttaaccttatggccaaacaggctaaaggcggtgcgggcaaagcgggcaaacagctcggctacgtgcgccgattcaaagccgccgtactgtttctgcagcgcttccggcatatcaaagtggtagagattgatcatcggctcaatgccgttggcgatcatctcatccagataggcgtgataaaaacgcaccgcgtccgggtccggcgcgccggtttccaaatcagcgatcagtcgtga

SEQ ID NO: 135988 - DNA, 2193 bp, Enterobacter cloacae
atgaagccgatgaaaaacctgctgctgatggggctgctgtccgcgctgggggccggcggggcgctggccgccgagcgctcgcactttacgcactttatcactcgcgacggcgccaccctcaaggacggcgacaaggtgtttcgtttcgccgggatccacgcgccggagctacaccgcattgaagacgacgcccgcggcccctgcagggcagacccgcgcggctgggggcaatactttaaatggccaacggcccaggagcagcaaaactggatccaggcgatggtgcaaaccggggcgaaagcccagcgcgtctacgtgctgtcggtgcagcaggaatttgataaggcctgcgggcgcgagacccatattctggcgccggaaacggcggacggtatgccgcggctgaatgagaaagccatgcgggtgtatgacaacatgattgccgaagcggataaacagggattgcgtctgatcctgccgtttatcgaccactggtggtggtggggcgggcgcgagcagctggcggcgttctatcatgaaaaagcggaagacttttatcggaccgatagcaagaccttcaaagcctatctggatgtgatccgccaggttatcacccggacaaataccgtcaccggccgcgcctattatgatgaaaaggcgatcatggcctgggaaaccggtaacgagctggaggataccaacgccgatttcctgcatcagaccgcggcgtggattaaaaagtgggcccctcatcagctggtggtggatggcacctataagaaaattaatccgtttgcgttgaccgaccccaatgtggatatcgtcagcaatcactattacaccaatgccgataataaccatcccgggcaggtgacgcaggatctgcgcgccgtcggcggacaaaaagtctatctcgtcggcgagtttggcctgctgccggcggatcaactgaacgccattatgcagtcgattgttcacagcgaggtcaacggggcgcaagccgccggcgggcttatctggggcttccgcggccatcgtcacgacggcggcttctactggcataaggagtcgaccgggcactacagctaccacctgccggggtttgccaaagaaggcgaagcgaaccaggagcaggcggtggtcgatctggtgcgcaccgccgcggcgcagatggccgggcagcagacgatggcgccgctgccgaagccggaggcgcctttgctgcgcgagaccacctcgcccttcgcgatcaactggatgggcgctgcggtgggacgcagctacgatgtcgaacgcgccgcctcaccgaccgggccgtggacggtggtgggccgggatatctccgatggcgttaacgaatggaatccggaaaccatggttctgttccgcgacgattatcgtcagcttcagctcgggcacacgtattactaccgggtgacggcgaaaaacgagagcggtcgttcggccccttccaatgtgattagcgtgcagcatagcgaggagaatcagccgccggttgtcacgctggaaccggccctaaccaccacgcaggaccagggcgtcgagcttacggccagctggcaggacgatggcctgccgtcgcgagaggttaaggtgggctggcagcacgccggcgatggccaggtgcatttctgccatgccgatcgggctcaaacccgggcctggtttacggcgccaggcacctatgcgctgacgttcacggcggacgatgggctgctgaaaagcagcaaaaccgtgaccgtgacggtgggcgaggcgacggggaaagcgccagcggatttctgtcgttatcacggcgaagtttatggcgtggctgaggggcggctgacggtgatgaagagtgataaagacgcgctgacagttggcgaggacggcttcctcggcccatttgccaacgagggggataaggtcagctggcaggtgcaggcgccgtggagcggtcagttcctgctcaatgtaaccttcaacggcaaatggggcggtaagcagaactcatttgtcgtcaacgggggcgctccgcagaccgtggccttcccgcagacggatgagcagggccagcagctgcggataccggtgacgcttaaagccgggagcaatcagattgacttcggccgcttcgccggcgactggggctatatgttcattaaatcgatcgaagtggtcgctgagtag

SEQ ID NO: 135989 - DNA, 1338 bp, Enterobacter cloacae
atgataaagctgaaacactcaatacctctggctctcctctcgctggcaggggccagcagcccggcctgcgccgatccgaagtatgattttgcgctgcatggctatatccgctccgggatcctggcgaactccgatggcaaccgcgcggactccgtcggcctgatgccagacggtaagtggcgactgggcaacgaagaagacaccaagatcgaactgatccccaccgtgacgctgacggcggacagcggcgtggtggcgaaagtgcaggccaacctcactcaccagtcgaaatgcacctccgactggaactgtcaggatgacgatggccatgacgtacagtttcgtgaagggttcgccgagctgagcaatctggattttgcgccggagatgaccttctgggccggtaagcgctacagcagctccaacacctccagccatcagttcgactgggagtacattcagtacaacggcaccggcggcggcttcgacaacatggatctcggcttcgcccgcttcgacgccggggtgtacgccttttcacccaccgatgaaaccaaagcctacccggtggataagggagatcagggctacccggatgactattccctcaacctgtggctgaaaaagatcgcggggacaggcttcgatctggagctgatcggccaccacatgaaccgtaacgaaaaccatccgacttccgccgagaagggctatggcgtgaccggtatttataactttgacggcttctatggtctgaccggaggatactcccgcctcgcattgcagtacgggaaagggctggcggcgggtgactcgctgggtaaaaacggctggggctgggccaacctggaaaacacccagtcctggcgagtggtgctggatagcgtggcctcgatgggcgacctggagatctcgaccttcgctttctggcagaaagataaaaactaccgctggtggacagaagatgaaaatggctggggacgctcgatgtgggtcgctggtatccgcccttatcatcagatcacccgcaactttgccatgcagtacgagctgggctacgaatacctggatgacaaaaactacaaaggagtaaacggcaaaggcaaaggcggcctgaccaaagtcaccgttgcgccaacgctgacctttgactccggtttctgggcgcgtccgcagctgcgcttcttcgtcacctacgcgaagtgggataaaggtgtctccgatgcattagacggtaactacaactgggataccaataccatcaccgccggcgggtattcccgcagtggctctaccgacaccgttaacttcggcgtacaggccgaggtctggttctaa

SEQ ID NO: 135990 - DNA, 1401 bp, Enterobacter cloacae
atgcattacggaaagcgctttccgtttgtggatttattaattgtgaccatgatcacctatggcaggctttcactttccggtgttgtgggcgatcatcccggcgagacaaccattcgcaaaggtaggagtatgaacattcagttaatgaatgtggccgtggacatcatcgagcagcggctggcgccgctggcgaacgttctgacgcgcaacaaccacattacggcgatgcgcgatagctttgcgctggctatgccctttgtgatcgttggcagcctgttagttcccattttgtttccgcccgtttccatcgacggcgcctcgcgtttcggccaggtctatttgctgctgcggcctatcctgctgccgacctttcagctaactattggcctggtggcgctgattgtcgccttcggcgccagcgccagtctcgccaagcagtaccgtctgccggaacggctctgcggtttaaccgggtgtctggcttttctgctgtttatcggctttcgcgagactgcggtgagcaatgtttatctcggcggtatggggatatttaccgccctgatatccagcacctattccattgagataattcgctttttctacaaaaaaggctggtgcattcgcttgcctgatgaagtgccgctgatgacccgcaatggctttcaactgctgatcccgctgctggtggtgatgctgtcgataagcgtgatgaatgccatactgctgcagaccaccggacgcatcgtaccggagttgatcagcgaagcggtgcggccgctggtgctggcgtccgacacgctgatggcggtacttatctctttatttatctgtaacttactctggtttatcggtatccacggcgcgctgatcatcaccgggatcatgaaccccttctggatgacctatctgtttgaaaatcagcaggcgctggcggcgggttcgccaacgctgccgcatatttatctgcaggggttctgggatttttacctgctgatcggcggtattggctccactttgccgctggtgctgatggcgatgcgcagccgctcgcggcagctgaaaagcgtggccaagattggcctgctgccgtcgctgtttaatatcaacgagccgatactgtttggttttccggtgatcatgaacccggtttttttactgccgtttctctttgttcccctgataaacgcctgtatcgcatggtatttaactcagctgggtattctcgatcgcgcggtggcgatgctgccatggtcgatgccttccccgctgggggcggcatggtcggcgaacggcagctggaaaaatttgtgcatgagcctgttcgcgatgtttaacgcctggatgctctatcgccccttcttcaaagtgtacgaacgtcagctcgcggaaaccgaacgctga

SEQ ID NO: 135991 - DNA, 315 bp, Enterobacter cloacae
atgaaaaaaattatgttgtgttgttcggcaggcatgtccaccagcctgctgatgaaaaaaatgattgcggaagccgaacagcggggcctgccggtagagatcaacgcctatggcgtagcggagttcgccgaacaggttggccattatcaggtggtgctgctggggccgcaggtgaaatacatgcagcaggacctgcaaaaacaggcggataaatacggtatccgcgtcgaacccatcaatatgatggactacggcatgcaaaaaggcgccgcggtccttgatttcgccctttcccttatcgaaaacaagaactaa

SEQ ID NO: 135992 - DNA, 315 bp, Enterobacter cloacae
atggaattagaagaacaggtgatggggatcatcatcaatgccggccagtcacgtagcctgtgctacgaagcgctgcacgccgctaaagcgggtgatttcgccaccgccgacgccaaaatgcaggaagcggcgcactattcccgcgaagctcaccttgtacagacccagcttatcgaagctgacgaaggcgagggaaaaaccaaaatgacgctggtgatggtccatgctcaggatcacctgatgacatccattctggcgaaagagctgattgccgaactgattgcgatttaccgcgcgcagccgcttcacgcctag

SEQ ID NO: 135993 - DNA, 915 bp, Enterobacter cloacae
atgttacatcttggaatagatattggcggcaccaaaatggaagccgtactgctggacccggcgggcgaatgcgtccagcgcctgcgccggccgacccacaaagagagctatgacgcctttatgcgtcagctgctgaccctgattgccgatattcgcgcggtcagcccgcagccgttcaccctggggatcggcctgcccggggctatcgatccgcaaagcggacgcattaaaaactgcaactgcctggtgctcaacggtcacgatctgcgccgggatatcatgcagcagcttggccagccggtgtggatggcaaacgatgccgactgcttcaccctttcggaggcggtggatggcgccggcgccggagctaccaccgtcttcggggtgattatcggtaccggctgcggcggcgggatcgccgtgcatcaacagctgctcagcggccccaacgctatcgccggggagtgggggcataatccgctgccgggctatactcctgagcgcgatggcccgccgcagccctgctactgcggcaaaacgaactgcatcgaaagctttctctccggcaccggcttcgcccgccgctatggggaacaagcccgtgcggaagccattgtcgccgcggcgcaaaacggcgatccgcgcgcgctggcccactggcgacactttatcgatgcctttgcccgcagcctggcgtcggtgatcaatattctcgacccgcaggtgattgtgctgggcggcggtctgtccaacgtcagccagatctatcgcgatctgcctgccgccatcgtgccgtggatcttctccgacacctgccgcacgcagatcaaaccggcccgcttcggcgacgccagcggcgtgcgcggcgcggcttggctgccccggcttcccggcgccgcgcaagggccgcggtag

SEQ ID NO: 135994 - DNA, 963 bp, Enterobacter cloacae
atgccaacgattgatgatgtttcaagattagcgaatgtctcaagagcgacggtatcccgcgtgctgaccggcacccggggcgtgcgcgaagagagccgggaagctgtgctgcgggccgttgaagaactcaactatcgcccgagctttgccgcgcaaaacctcgccagtcagacatccagccacgttggtctggtgatttccgcgcaggacgaaagccacggcgcacgtctgctgccgctgctctctcaggcgctgaaagtgctgaataaaagcctgctggtccagtacgtcagcgacccggtagagcaggcggcggtaatcgacgatctgcagcgccagtgcgtggcggtggtggtgctgggcgccgttgccgccgacgcgccgcgcaacgttatcgcctttgaccgcttcggcgtcgccgggagcaatagccagggctatgacttcgcctttgccaccgaaagcgcctgccgctatgtgattggcaagggacaccgcaacatcgccctgctggtggacagcgatagcgacgatgccagccgtcagatgctggaaggctaccgcaacgtcctgcagaactactccattccttttaaccgtcagctggtgctgacggccaacgatgacgtcgagcaggcgctgctgaccttaattaacagcttcagtaaatactcagtcattatcgttaaacgcgaccgctacgcggctgaggcgatgcgtctgctgcgcgaattcaccatcgccgtcccgcaggaggtctccctgctgagccttgaggattccccgctcgcctcgctgctctacccgccgctgacctgcatctcctggccactggaggcgctgctggataactgtattcagcgtattcgcagcctgattgacgaccggccaaccttcgccaccgagggccgctcgctggctggccgcctgatcccgcgccagtcggtcgccgatatctcttga

SEQ ID NO: 135995 - DNA, 918 bp, Enterobacter cloacae
atgctacacctgacaccgctgaaatcattgctgctggccagcgcgctggctctgctggccgcgacgccggcctcggcgcaggagaaattcagggttatcaccaccttcacggttatcgccgatatggcgcagaacgtggccggcgacgccgccgtcgtcagctccattactaaaccgggcgcggagatccatgattaccagcccacgcccggcgatatcaaacgcgcgcagggggcgcagctgatcctcagcaatgggcttaatctcgaacggtggtttgcccgtttttatcagcacttacagggcgttccggaggtggtggtcagcgaggggatccagccgatgggcatcagcgcgggcccctatagcgggaagcccaatccccatgcctggatgtcggcagataacgccctgatctatgtcgataacattcgcgatgcgctggtgaagtacgatccgcctcacgccgacacctatcgccgtaacgccgaggcctacaaagagaagatccgtcagacgatggcgccgctgcaggccagactggcgcagctgccggcggataagcgctggctggtcaccagcgagggagccttctcctatctggcccgcgactatggcctgcgcgaactgtatctgtggccgatcaatgccgaccagcagggcaccccgcaacaggtgcgcaaggttatcgacaccatgaagaaagaacgcatcccgaccatcttcagcgaaagcaccatctccgataaaccggcgcgtcaggtggcgcgggaagccggggcccactacggcggcgtactgtatgtcgattcgctgagcgccgccgacggcccggtgccgacctggctcgacctgctgcgcgtcaccaccgaaaccatcgtcaacggtatccaggacgggatgaggaagcagccatga

SEQ ID NO: 135996 - DNA, 822 bp, Enterobacter cloacae
atgaatgcagcgcaagcgggactgtatgtcgaccagctcaccgtcacctggcgtaacggccacactgccctgcgcgacgcctcgttcagcgtgccgcgcggctccattgccgcgttggtgggggttaacggctcgggtaaatccacgctgtttaaagcgctgatgggctttgtccgcgttggtcacggcgagatcgccatactcggccagccggttacccgcgcgctgcgccagaacctggtcgcctatgtcccgcagtcggaagaggtggactggtccttcccggtgctggtggaggatgtggtgatgatgggccgctacggccatatgggctggctgcggcgggcaaagccgcgcgatcgcgaaattgtcgatgccgcgctggcccgcgtgggcatgagcgagttccgccatcggcagattggcgagctctccggcgggcagaaaaagcgcgtctttcttgcccgcgccatcgctcagcagggtcaggtgatcctgctggatgaacctttcaccggcgtcgatgtgcagaccgaagcgcggatcatcagcctgctgcgcgagctccgcgatgagggctgtaccatgctggtctccacccacaacctcgggtcagtgagtgaattttgtgattatacggtgatggtgaaaggcaccgtgctggccagcggcccgacagaaaccaccttcaccgccgagaatctggagcgggctttcagcggcgtgctgcgccacgtcgcgctcacaggcggggaagcgcaggttatcaccgatgacgagcggccgtttatcagccggcgcgcggcgggaggcccacgatga

SEQ ID NO: 135997 - DNA, 849 bp, Enterobacter cloacae
atgagctggctgctggagccgtttggctatcactatatgctcaatgcgatgtgggtgtcggcgctggtgggcggcgtctgcgcctttctctcctgctacctgatgctcaaaggctggtcgctgattggcgacgccctctcccactcgattgtacccggcgtcgccggggcctatatgctcggcctgcccttcgcgctcggcgcatttctctccggcggcctggcggcgggcagcatgctgtttttgcagcagcgctcgcggctaaaagaggatgccattatcgggctgatcttctcctccttcttcgggatcgggctgtttatggtgtcgctgaatccgacgtcggtgaatattcagaccatcatcctcggcaatattctggccatcgccccggaggatattatccagctggcggcgatcggctttatctcaatggcgattctactgctgaaatggaaagacctgatggtgaccttctttgatgaacaccatgcccgctcgattggcctgaacacccgcggcctgaagctgctgttctttaccctgctggccgcctgcaccgtggcggcgctgcagaccgtcggcgcctttctggtcatctgcctggtggtcactcccggggctaccgcgtggttgttaaccgatcgcttcccgcgcctgctggctatcgccgtggctatcggcagcctgaccagtttcttcggcgcctggctcagctactatctcgacggcgccaccggcggcattatcgtggtcgcgcaaacgctgctgttcctcatcacctttatcttcgcgccgaagcacggcctgctggccagccgccgccgcgccagggaggccgcatgctga

SEQ ID NO: 135998 - DNA, 855 bp, Enterobacter cloacae
atgctgaacctgttcctggccccgttccagtttccttttatggtcaatgcgatagcgatatcgatcgtcgtcgccattccctgcgcgctgctgtcggtgtttctggtgctcaaaggctgggcgctgatgggcgacgccatgagccacgcggtctttccgggcgtggtgctggcctacattatcggcatccccttcgccatcggcgcgtttatcgctggtctgctgtgcgccgtgacgaccggttttctcgacgataacagccgactcaagcgcgataccatcatggggattgtcttctccggcatgtttggcgccggactggtgctgtacgtagcgatccagtccgatgttcatctcgaccatatcctgttcggcgatatgctgggaatatccctccgcgatattgggcaaacgacggctatcgcactggtgattgcgttgattatcggtctcaaatggcgggattttttgctgcacgcattcgatccaacgcaggctaaagccagcggcctgcgcggcggactgctgcactacggcctgctgtgcatgatcgccctgaccatcgtcgcgacgctgcagtcggtggggattattctgtcgatttcgctgctgattgcccccggggcgatcgcgcttctgctggtgagacgctttatccacgccctgctgctggcggtagcggtggccatcggctgctcggcgggaggggtgtggctggcgttttatctcgacagcgcgccagcgccgactatcgtggtgctgtttaccgcgctgtttgtggtcgcctttgtcgcaagcacgatccgcgatagtcagaaacagaaaacttcagcaattatccccggtggcggctaa

SEQ ID NO: 135999 - DNA, 396 bp, Enterobacter cloacae
atggatattaaggtgtatgataaatgcatcttaaaaaagacgaaaggcggggagatggggaagcgtatcgaacgggaaaaaatgacgattcagcggatgattgccctctaccagcggcgctgtcccgaggcgcaggccgataatgcgcactatcaggcgctgaacgcctacgctgacaagcgccttgataagtgcgtgtttggcgagaacaaaccggcctgcaagcagtgtccggtgcactgctaccagccggcgaagcgcgaggagatgaagcagattatgcgctgggccgggccgcggatgctctggcgccacccgatcctcactgttcgccatctgctggacgacaggcgcccggtgccgccgctgccggaaaaatatcgaccgaaaaagtag

SEQ ID NO: 136000 - DNA, 888 bp, Enterobacter cloacae
atgccaatgaaatttaagcagattcaggcatttattaccgtcgcccgcgaaggcaatatgaccctggccgcagagaaaatggggatcacccagtcgggactgagccgactgctattgagcctggaagcggacctgagcgcatccttattcgaacgacataagcacggcatggcgttgagcgaatatggcagcgcctttttaccctacgcgctgacgatgctgaataccgaacaaaaggcgcgcgaggaaattgagctcatccgcggcgccgggaaaggcattctgcggattggctgcgtttccagtctgctgaccagccatttcatcgataagctggcggctttccatcagcgccatccccagatccatctgcggatcgtcgaccgcattgactccgagctgtataagctgttgctgatgcacgacatcgatatcgccctctgcggtcccttaccgcatgatgagaaaatcgtggtgcggggcaaaattaactggcaggaccggatctgcatcgtcgccaggcagcaccacccgctgcatcaggcggcggacgtcaccctggaggcgatgctggactatccgtggatcatgccgccgccgtctagtacgccaatgaacatcctggcggatatctttcgcgcccggcagttgccctgtccgcaaccggttattgagtgcgcctcatcctcagccattaaggcctttctgtgcgagagcgatctgttaacgtcgatgccggccccggtttaccgacacgaagaagcgcttggcctgctgcgcccgtttgtgctcgagggcagcgtttttatccgggatttctatgcctacagccatttcggggttctgtccggggcagccctgcagttgattcagcatctgaagcagtga

SEQ ID NO: 136001 - DNA, 942 bp, Enterobacter cloacae
atgacacagaacaatattctattaatttcaggcgctatattaccggtcatcattaccgtcatcatcggctatattagcggtaaacgaaaagactttaactggcagcaggcgggagacatcaataaaattgtgatgctctacgcattgccgctaagtattttcagcaatatggtgatgacgccgcgacacatcgtcatgaccatgggcccggtcgccgtggctatcatcctggcgctgattctcagcttcgtcattcccttactggtcgcccgctatctgtttcgacgcgacctcgccctcagtacgctgcaggcgctggccatcggctcgccggcagtcccgtttatcggcacctcagtgctggcctttttatttggcaccgtcagcgcgtcgctgatcaccgtgtccagcatcacgcaaaacgtcttccagctgccgctggtgatgatactgatgtcggtcgccaccggcgataagagccagcatatttcctttggcgcacgggtggtgaacgccattaaacaacccgtggtctggtcgccggtaatcgccctgatcatcgtgctggcggatatccatattccgcagactatctcgatgtcgctgggtctgctgggcaaagcctctggcgggctggcgctgtttgccgccgggatcgtgctctatacgcgcagcattgttatcaccaccgctaccattatcaccgttatcgcccgcaatattctggtccccggcgcctgctatctcattttattaaaaatgggcttcagcatggagcaaataaaggaagtcgtattgacgatggctatcccggtaggctccatcgcgataattattgctatgcagtataaaaccggcgagcaggaaatggcctcgacgatggcgctgagtattattgcctccatcattacgatgggcggatttattttcttaaccttttaa

SEQ ID NO: 136002 - DNA, 1710 bp, Enterobacter cloacae
atggcctctatcacattatcggctgctgaacttttactgcatcggctacaggcgctggacgtggcgtatatttttatcaactcgggcaccgattatcctccagtcattgaagcctgggcaaaggcccgggcgaccgggcaaaaggtaccggagttagtgatctgcccgcatgaaaacgccgccatcggcatggcccatggctattacctcggcaccggcaaggtgcaggcggtgatggttcacaccaacgtcgggctagccaacgccgcctgcggcgtcatcaatctggcgaacagcaatattccggtgctgatttttggcggccgcacgccgataagcgaacattcccacttcggctgccgtaatacgccgattggctacggccaggagatgcgcgaccaggcggcgctgatccgcgaatccgtgaagtgggattttgaactgcggctggccgatcagatcggcgagcatgttgaccgggcctgggcgatcgccagctccctgccgaaagggccggtctacctgagcttaccgcgtgagccactgtgcgaaacctttgccgtcgatgagaccgcgctgcaggctggcccttcgcagcagccggtccgctatgcgccagtccgggaagatatcgcccgcgcagccgaggcaatcgcctgcgccagacacccggtcatcttcgcccagcgcggcgcccgaacggcggaaggctttgcgcgcctcgatagtctggtgcgcgaatgggcgatccctctggtggaatactggggcaccgaggttaccctgagcgccgataatcccctgctcgccggggctgatcccagcgtctggctcgctgacgccgatgtgattctggtggtcgactcgcaggcgccatggatgatcgccgagggcgactgtcgccaggactgcaccgtgatccagatgggccccgatccgctcttctcccgctacccggtgcgcggctatcgcgcggacatcaacctggcgggcgagaccgatgaagtcttcagcctgctggaagaggcgctgcgcccgctgcaggccgcccgccagcagcatgtggcggagcgggcggcatatacgcagaaccgcatccagcaacagaaaaaccagcgcgacgcgcttatccatgccagccagagcggggccattaccaaaccctggctcagctactgcctcggccatctggctaatcaacaccgcggccggatcgtttctgaactgaccacgctgccgcagtttgccggactgacccatgccgagagctattaccaggaagcgctggccggcggcctgggcgaagccctgcccatcgcgctggggctgcagcttgcgcgccgggaagagctgattattgccgccgtcggcgacgggtcgtacctgttcgccaaccctgcggtctgccaccatattgcggaggtaatgaagcttcctgtcctcgtcgtggtcggaaataacggcggatggggcgccgtcgcgggcggcaccaaagcgctctacccggacggctacgcggcccgcgcggaaaccattccggccaccgcctttaccacctcgccggatttcgccgcgatcgccgcctccagtcgcgcggcggccctgtcggtttcccgggccgaagatctccccggcgtgctggaagaagcggtatccctcatacacacccgccgacaaagcgtgctggttgacgtgcagttagcccgctaa

SEQ ID NO: 136003 - DNA, 294 bp, Enterobacter cloacae
atgaactcaaaagcggccatcaccatcacctactgttcccagtgcaactggatgctgcgcgccagctggatggcgcaggagctgttacatactttcagcaccgacatcgcctcggtgacgctggtgccggggaccggcgggatcttcacgatcgatgtcgacggtcagcagatctgggagcgcaagcaggatggcggttttccggatgcggccgagctgaaacgccgggtgcgcgatgtctgcttcccggagaagccgctgggccatgtggataaaggtgaccagaaggggtga

SEQ ID NO: 136004 - DNA, 2364 bp, Enterobacter cloacae
atgtacaaatcgactccgtcagcagcatggtgtaaaaaacgcctgctggtgacctctttgtttgcagcaatttatcagacttctgccatcgcagcagatacttccgccgttagcggcgaggcggtggatgacacctcggaacaaatgaccgtcaccgcccccgcgccggtgcagaaagccggtagcgaacacagcatcagcgcccgggagctggagaataaaggcgctaacgattttggctcgatcatgcgctatgagccgctcatcagcgccaccggggccagcggcggctccggcaacggtaaaagcggattcgaccgcggaggttacaccggctacaacattcgcggtatggagagcaaccgcgtcggcatcgacgtggacggtatcgcgcaacccaacgccaccggccgcggctacgtcggccgcgccgggctcaacaccttcggcatcggccgcgattatatcgacccgtatatgtacggcagcgtggatatccagtccggcgccacctcgacggaaacggccaacagcgctatcggggggaatgtctccttccgcccgaaatcagcggatgattacctgcgcccgggcaagaccagcgccttcggctaccgcagcggttacgactctgcggatcgcagctggcacaacggggtgaccgtcgccggcggcgatgagttcctgcgcgggattttggtctatagccgccgtgacggccaggaaaccgaaaacaacagcggcaccgtcgacgcctacccggcgaactggcactccgatgcttttctggcctccgggatctggcagcctaacgatgagcacaagctgaccagcaccttcgactattaccataaaaccaaccacacccactacgatacctgggactccagcggcaacagcaccatcggcaccgccaaccagaccagccagacccggcgctggggcctgagcctgaaggatgactggacgccgatgaacgactacctcgacagcgtctccacaaaaatctactaccagcataccgaagcccatgactggacttatatgccggacagcatcacccgcagaatgcagacggtgaactctaactacgataccgacacctggggcctgcagaccgagctggcgaaaaccctgggccgccacgatctgagcgccggtttcaacgccagcaccagcaaaacccagcggccgttcagccagtcgccgatccccagcgtttacagcgagatcatgcagccggaggcagacagccgcagctacaccctcggcggctttgtccaggataagatcaacttcgaccttgatagccacaacttcgccattattcccggcgtgcgcgtggtgcatcaatcgactaagccggaaaatctgtccgaccttgccgccaacagcagcgtactgagcgaatcgtcggtggcgaatctgtacggcaaaaacagcgatacccaggttctgccgtcgttgaccttccagtacgacctcaccccgcgcctgatgacctacctgcagtaccagcgcggggcgcagttccccaacgccagccagctgtatggctcctggaacctcggctccagctacgccggcagccagcagtatgccctgatcggcaataccgatctgaagacggaaaccagcgataatctcgagtgggggctgaagggggaagttaccgaaggcatcaccctgcgcacggcgctgttctacaacagctataagaactttatcgcctatacccgctatacccgcgccaacaatccgggccagttcacgaatgtgccgtcgaacatctacaccatttatcaggcggaaaaccgcgataaagcctatatctacggcggtgagattagcaccaaatttaactttggcacctggtttgatcaggtggacggcctgagcgccaccctcgccctcggctatagcgaagggaaatcgaaatccagctacagcggcgataaatacgtcgacctcgacagcgtggcgccaatgaaagccatcgtcggcgtggcgtgggacgatccggcgaaacgctacggcaccgccctgacggcgacctttgtcaaagggaaacaggcgaccgccaccaaccgcgaaagctacagcaacagcggatccgccatcaccgatgccagcagcgactatatgcgcgtgccgggctacggcatgctggactggaccgcgtactggcaggtggcgaaaaacgtgcgcctcaatggcggggtctacaacctcaccgatcgtaaatactgggattacctgagcagccgcaatatcgagaccggcaccaaccaggacgccaacgataaagcgctggcggtgatgccgggccgcacctggcagctgggcgtcaacgtcgacttctga

SEQ ID NO: 136005 - DNA, 1032 bp, Enterobacter cloacae
atgccaaatgcacaccctgacctgtggcagcgctaccaggccaccaaagcggccagtaccgcgaaatatgcccgcgatatcgccgcggaaatggggatcagcgaagccgagctgaccgccgcccgcctcggccatgatgccgtgcgcctgagcgatgacgcccgggcgctgattgccgccctggagcgcgtcggcgaaaccaaatgcatctgccgcaacgagtatgccgtgcatgagcaggtgggccagttcacgcaccagcacctcagcggccacgccgggctggtgctgaacccgcgcgcgctcgacctgcgtctgttcctcagccagtgggccagcgccttccatctgaacgataatggccgtcagagcatccagtttttcgaccaccacggcgacgccctgctgaaagtctatgcgaccacgcagaccgacatggcggcctgggagaccctgatcgcggaatatcgggtggcggcgccggcaccgctgaccctgcgcccgctggagccggtgaaatatgccgataccgccgacggcgccgccctggagaacgactggcgcgcgatgaccgacgttcaccagttcttcggtctgctgcgtaaatatcagctttcccgccagcaggccttccgtctggtgagcgacgacctcgcctgccgcgtggatcgccatgcgcttccgtcgctgctggagacggtgcgccaggagggcaatgaaatcatgattttcgtcggcaatcgcggctgcgtgcagatctttaccggcgccctggaaaagctggcccccatgcgcggctggctgaatatcttcaatactacttttaccctgcatctgcgcgaagagagcctcgatgaagtgtgggtgacccgcaagccgacttcggacggacacgtcaccagcgtcgaactgttcgctaaagacggcacccagattgcccagctctacggccagcgcagcgaggggcaccccgagcagacgcaatggcgccagcaggtagaccgcctgacccgtgaagggcagcccgcatga

SEQ ID NO: 136006 - DNA, 819 bp, Enterobacter cloacae
atgatgcgctggttactgctcttgatcgctttcccgctgctgagtcacgccgccgttgagcggctcgtcacactcggcggagatgtcactgagatcgtttatgcccttcacgcggaggagagcctggtggcgcgggacagcaccagcagctggcccccggcggcgcaaaagttgccggacgtcggctacctgcgacagctgaacgccgaggggatcctcgcgttacgcccgcagctggtgttagcgagcgcccaggcgcagccctcgctggtcttacacaaagtgcaggcgagcggggtgaaggtggttaacgtgccgggcggcgaaagtctgtccgcgatcgataacaaagttgctgtcattgccgaagcgttaggcaaaacggcggcaggcgacgcgctgcgccagcagcttcagcagcagatcgccgccattcccacgcagccggttgctaagcgggtgctgtttattctcagccacggcggaatgaataccctggtggccggacagcataccgcggccgatggcgccattcgcgccgccggattgcagaacgcgatgcagggcttcgaccactatcgcgccatgtcgcaggaaggggtcgccgccagccaggcggatctggtggtgatctccgccgatggtctcaaagggatgggcggcgaagccgggctgtggaaactgcccggcctggcgcagaccccggcggggcgtcataaacagctgctgacgatcgacgatatggccctgctgggcttcgggccgcgcacaccgcaggcgataatcgcgctgcgaaacaaagcggagcagttgccctga

SEQ ID NO: 136007 - DNA, 996 bp, Enterobacter cloacae
atgcgccctgccctcgctcgccgtttgctgctgatgacgctgctgctggtctccctgacgttgtttgccaccaccctcggcgccatgcgcttgccgctggtcaacctgctgccttccggggatgacatgctgcgccatatctggctgaccatccgtctgccgcgggtgctgctggccctgctggtgggcgcggcgctggccctctccggctgcgtgatgcaggggctgtttcgcaacccgcttgccgacccgggcctgctgggcatcagcagcggcgccgcgctggcggtggccagctggctggtgctcccgttctccgctgcggggctgatcgctctgtatatgccgatgctggcggcgtttattggcagcctggcggtgatggtggtgattttcatcctcagtcgggcggaggagggttcgctgtcgcgcctgctgctggtggggatcgccatcaacgcgctgtgcggcgcgctggtcggcgtcctgtcctggctgagcaatgacgcccagctgcgccagctgtcgctgtggggaatgggcagtctgggccaggccgaatggccgacgctgctggtggccgcgaccttgattatcccggctgcgctggcggtgtggtggatggcgtcccgcctcaatctgctgcagcttggcgatgaagaggcgcactatctcggggtcaacgtgcaggcgctgcagcgctggctgctgctgtgcagcgcggtgctggtggccgccgcggtggccatcagcggagtcatcggctttatcggcctggtggtgccgcacctgatgcgcctgtggctgggaccggaccatcgcggactgatccccggctcgctgctggccggcgcgatcctgcttctgctggccgacaccctggcccgcaccgtggcggcgccggcggagataccggtcggtctgctcaccagcctgctgggcgccccctggtttctgtggctggtctttcgtcgggagaactccagacatggttaa

SEQ ID NO: 136008 - DNA, 780 bp, Enterobacter cloacae
atggttaatgaatactgcgcccaggggctgtcacttcaccttggtaaacgacagattatcgacaacgtctccgtcgcgctgcgcggcggcgagatgacggcgcttatcgggccgaacggcgccgggaaatccactctgctgcgcctgttgaccggctatctgactccggacagcggcacccgccatcttgcaggcaagccgctggaggcctggtcctccgaggcgctgtcgcgccggcgggcggtcatgctgcagcgaacggccctgcaggccgactggacggtggaaacggtcattgccatgggacgctcaccgtggggcgcgacggcggatccggcggtgctggcggcggtgatggccgtcaccggctgcgatggccttgccggtcgccgctatcccggcctctccggcggcgagcagcagcgggtacagctggcccgctgtctggcgcagctatggcgcgacggcgcgccgcagggctggctgtttctcgatgagcccacctcggcgctggacctttactatcagcagcacctgctgcgtttgctcaaacggctcaccgccggcgggcaactgcacgtctgcgtggtgctgcatgaccttaacctcgccgccctgtgggccgaccgcattctgttgcttcaccagggacatctggtcgcccagggcacgccgcaggaggtgatccagcagccggttatccatcgctggtacggggcggatgtccgcctcgtccagcacccggacaacgcggtcccccaggtttatctagcgccgtaa

SEQ ID NO: 136009 - DNA, 2562 bp, Enterobacter cloacae
atgagcacaattgacaatctcgacgcccacacgccgatgatgcagcagtatctcaagctaaaggcgcaacatcctgacattctgctgttttaccggatgggggatttttacgagctattttatgacgatgcgaaacgcgcctcgcagctgctcgatatctcgctgaccaagcgcggcgcctccgcgggcgaaccgatacccatggccggcatcccccaccacgccgtagagaactacctcgccaaactggtcaatcagggcgagtcggtggccatttgcgagcagattggcgacccggccaccaccaaggggccggtcgagcgtaaagtggtgcgtatcgtcaccccaggcaccattagcgatgaagcgctgctgcaggagcgccaggacaacctgctggccgccatctggcaggacagcaagggcttcggctacgcgacgctggatatcagctccgggcgctttcgcctgagcgaaccggccgaccgcgaaaccatggcggcagagctgcaacgcaccaacccggcggaactgctgtatgcggaagattttgccgaatcgtcgctgatcgagggccgccgcggtctgcgccgtcgcccgctgtgggaatttgaaatcgacaccgcacgccagcagctaaacctgcagttcggcacccgcgatctggtcggcttcggcgtcgaaaacgccccgcgcggcctgtgcgccgccggctgcctgctgcagtatgtcaaagacacccagcgtacctcgctgccgcacatccgctccatcaccatggaacgccagcaggacagcatcattatggatgccgccacccgccgtaacctcgagatcacccagaatctggccggcggcaccgacaacaccctggcctcggtactcgactgtacggtgacgccgatgggtagccggatgctcaagcgctggctgcatatgccggtccgcgataccgccgtgctggtggagcgccagcagaccatcggcgcgctgcaggagcgctataccgagctgcagccggtgctgcgccaggtcggcgatctggagcgtattctggcgcgtctggcgctgcgtaccgcccggccgcgcgatcttgcccgcatgcgtcatgccctgcagcaacttcctctgctgcgtgagctactggccgacgttgacagtcagccggtgcaaaaattgcgcgagaaaatgggcgagttcaccgaactgcgcgaactgctggagcgcgcggtgatcgacgccccgccggtgctggtccgcgacggcggggtcatcgccccgggctatagcgaagagctggacgagtggcgggcgctggccgatggcgccaccgattatctcgataagctggagatccgcgagcgcgagcggctgggcctcgataccctgaaagtcggctacaacgccgtccacggctactacatccagatcagccgcggccagagccacctcgcgccgatccactacgtgcgccgccagacgctgaaaaacgccgaacgctacattattcctgagctgaaggaatacgaagataaggtgctgacctccaagggcaaagcgctggcgctggaaaaacagctttatgacgaactgttcgacctgctgctgccgcatctcgccgatctgcaaaccagcgccagcgcgctggccgagctggacgtgctggtcaacctggcggaacgcgcggaaaccctgaactactgctgcccgacctttagcgataagccaggcattcgcatcagcgaaggccgccatccggtggtcgagcaggtgctgaaagagccgtttatcgctaacccgctgcagctggcgccgcagcggcggatgctgatcattaccgggccgaacatgggcggtaaaagtacctatatgcgccagaccgcgctgattgcgctactggcctatatcggcagctacgtcccggcgcagaaggtggagatcgggcccatcgatcgcatcttcacccgcgtcggcgcggcggatgacctggccagcggccgctcgacctttatggtggagatgactgaaaccgccaatatcctgcacaatgccaccgagcatagcctggtgctgatggatgagattggccgcggcacgtccacctacgacgggctatcgctggcgtgggcctgtgcggaaaatctggccaacaaaatcaaggcgctgacgctgttcgccacccactacttcgagctcacccagctgccggagaaaatggaaggcgtcgccaacgtccacctcgacgcgctggagcacggcgataccatcgcctttatgcacagcgtgcaggacggcgcggccagcaagagctatggcctggcggtcgccgcgctggcgggggtgccgaaagaggtgatcaagcgcgcgcggcagaaactgcgcgagctggagagtatctcgcccaacgcggcggcgacccaggtcgacggcacgcagatgtcgctactcgccgccccggaagagacctcgcctgcggttgaggcgctggagaatcttgatccggactccctgaccccgcgtcaggcgctggagtggatctaccgtctgaaaagcctggtctag

SEQ ID NO: 136010 - DNA, 153 bp, Enterobacter cloacae
atgctgacaaaatatgcccttgtggcaatcatcgtactctgtattacggtactgggatttacgctgttggtgcacagctcactatgcgagctgagtattaaagagcgtaatattgagtttaaagctgttctcgcttacgaatcgaagaagtag

SEQ ID NO: 136011 - DNA, 1368 bp, Enterobacter cloacae
atgaacaatcaattcacatggcttcatatcggtctgggttcttttcatcgcgcgcatcaggcgtggtatctgcatcgtctgattgcttccggggataatcgctggcgcatcgcggcggggaatattcgcaacgacgccgagcaggtggtacaggcgctggcggcgcagggaggacgttacgtcctcgagaccgtcagcccggaaggggagcgcgaatatgaagagatcacctcaatccagaaactgctgccgtggcaggccgggctacagccgctgattaacgaaggggcaaacccgcagaccaaagttatcgcctttaccgtgacggaaggggggtactacctgaacactcgccatcggctggaaaccagcaaccccgatctgcaggccgacctgcaaggcgagtgcaaaaccatttacggcaccctcgcgcggatcctggaaaagcgcatggccgacaacgccgggccgctgaccctgctcaactgcgataacgtgcgccataacggcgagcgtttccacgacggtatggtcgagttcctgcagctcaccggcaaacaggcggtgattgactggatggcggccaataccacctgtccgaacaccatggtggaccgcatcaccccgcgtccggcggccgatctgccggcccgcatcaaagcgcaaaccggaattgatgacaaagcgccggtgatgggggagacctttatccagtgggtagtggagaacaacttccgcgatgcccgcccgaatctggaggcagtcggcgtggagatggtggagtcggtcatcccgtatgaagaggcgaaaatccgtattctgaacgcgtcgcacagctgcattgcctgggcgggaaccttaatcggccagcagtatattcatgaaagcacgctgaccgatgttatctacgccattgccgaccgctacgttacggaggacgttattccgtgtctcggcgataacggcattgatctgccgacctaccgggatgtggtgcttaagcgctttaccaacccctatatccaggacaccaaccagcgcgtcgccgccgacggcttctcgaaaattccggcgatgatcgcgccaaccttgcaggagtgctaccaacgcggcgtccgccctgaggcgaccgccatgctgccggcgctgttcttcgtctttatggagcagtggcacaagggaactctgccgtatcagtaccaggacggcatcctggatgcgcaggcggtgcatgagatgttcgaggctcaggatccggtggctgtcttcgcccgtgataaagccctgtttggtgatctcgccaacaacgcggatttcctggcgctgatgcgcgagaaagtcgccgccgtttacacgctgattaactaa

SEQ ID NO: 136012 - DNA, 942 bp, Enterobacter cloacae
atgagtaaagaagacgatatccggttggatcagaaggtgcgtgccgcatggatgtactacatcgccggccagaatcagagcgagattgccagccagctgggcacctccagaccggtggtgcaacggctgatcgccgccgcgaaagaagaagggattgtgtcgattaatctgcatcatccggtagcgaactgcctcgattatgcgcagttgctgcaggaaaaataccgcttgatcgagtgcaatgtggtccccgcctttagcgaagaaagcaccctcgacagtgtgtcatttggctgctatcagctgatggctcgctatctgcaggatgataaagagaaaatcatcggtctgggctcgggcctgaccctgaaaaaagcgctgcagcgcatcgattttgacagcctgaatacccgctgcgtggcgctgatcagcgccatgaacgccgacgggcagtgcaattattacgatgacgtgcccctgctgctgacccgcaaaattaaggccaagtactatcagtggccggcgccgcgctacgcccaaagcgcggatgagtatgaaatgtggtgcaccaatcgcttattccgcagcgtctccggcgtcgcccgcgaggcggacgtgatttttgtcggtattggtccgctgggcacgcaaagtccgatctttaaagacggctttatcaatcaggcgcagatggatgagctgaccgcccgcggcggcatcggggagatcctcgggcggtttattgatgcgcaaggcgacgtggtagacagcgagatcaaccgcatgatcaccagctatgatatccgccagagccactgcccgcggattgccgctgcctgtggagaacataaacgaccggcgatcctggccgcccttaaaggcggctggattaatggcctggtgaccgatgagcataccgcccgctggctgctgacgcggtaa

SEQ ID NO: 136013 - DNA, 1002 bp, Enterobacter cloacae
atgaagaagataacgatttacgacctggcggaactttccggcgtttcggcgagcgcggtgagcgctatcctcaacggtaactggaaaaagcgccgcatcagcgccaagcttgcggaaaaggtgacgcggattgccgaggagcagggctatgcgattaaccgtcaggccagcatgctgcgcagtaaaaaatcacacgtcatcggtatgattatccccaaatatgataaccgctacttcggttccatcgccgaacgctttgaggagatggcccgcgagcgcggcctgctgccgattatcacctgtacgcgccggcgtccggaactggagatcgaagcggtaaaggcgatgctctcctggcaggttgactgggtggtcgcgaccggggcgaccaatccggataaaatttccgcgctatgccagcaggcgggcgtgccaacggtcaatctcgacctgccgggctctctctcgccgtcggtgatttcggataactacggcggcgcgaaagcgttgactcataagatcctggctaatagcgcccgccgccgcggagagctggcgccgctgacctttatcggcgggcgcagcagcgaccataacaccagcgagcgtttacgcggcttccacgatgcgcatcgcgagctggggcttagcgtgccgcaggcgaatattctggcccccggctattcgaaaggccacgttgaggactgcctgcaggagcggtttggcagcgcgaagacgctgttgcaggggatatttgttaactcgacgatatccctggaaggggttgtgcgctggctgtcgcaggtgggtctgaccggcagcgagcagccgccgatgggttgcttcgactgggatccgtttgtctatctgctggggcacgatatcgacatggtgcagcaggacgtgccggcgatgctggacgctgttttttcgattattgacgccggcgaagccagccagcagcggattgaaattcccccgcgactgatgagcagcagctga

SEQ ID NO: 136014 - DNA, 750 bp, Enterobacter cloacae
atgaaccactctgtctcctctatgaatacttccctcagcggtaaagtcgccgcgatcaccggcgcggcgtccggtatcggcctcgagtgcgcgaggaccctgctgggagctggcgcaaaagtggtgctgatcgaccgcgaaggcgaaaagctcaacaaactggtcgccgaacttggcgaaaacgccttcgccctgcaggtcgacctgatgcaggcggaccaggtcgataacctactgcagggcattttgcagcttaccgggcgtctcgatatcttccacgccaacgccggcgcctatatcggcgggccggtggccgagggcgacccggacgtctgggaccgcgtgctgcaccttaatatcaacgccgccttccgctgcgtgcgcagcgtcctgccgcatctgatcgcgcaaaaatccggggatattatcttcaccagctcgatcgcgggcgtggtgccggtgatctgggagcctgtctataccgcgtcgaaattcgcggtgcaggcatttgtgcacaccactcgtcgccaggtggcgcagtatggcgtgcgcgtcggcgccgtactgccgggcccggtggttaccgctctgctggacgactggccaaaagccaaaatggacgaagcgctggccaacggcagcctgatgcagccgattgaagtggcggagtcggtgctgtttatggtgacgcgttcgaaaaacgtcaccgtgcgcgacattgtgatcctgccgaacagcgtggatctctga

SEQ ID NO: 136015 - DNA, 1626 bp, Enterobacter cloacae
  misc_feature (210)..(219): n is a, c, g, or t
atgcaaaacgatacgcaaaacattattggcgtggatgtcggttcgggcagcgtgcgcgccggggtattcaatctgcggggcgagctcctcgcccacgcgacccgggaaataaccctgtttcgcagcgccggaaacaaggtcgagcagtcgagccgtgagatctggcaggcggtgtgctactgcattaaaacggcggtggccaacgccggnnnnnnnnnnaacgccggcgtttcgccgtcgtcgatcgccgggatcggcttcgatgccacctgctcgctggtggtgattggcgataacgatgcgccgctggcggtcgggccttcggacgatgcggaccgcaacattattgtctggatggatcatcgcgccaccgggcaggcggaaaagatcaatgccacgggccacccggtactgcggtacgttggcggcaaaatctcgccggagatgcaaacgccgaaaattttgtggctgaaggagaatcgcccgcacatctatcagcaggcgcgccacttcttcgacctcgccgattacctcacctggcgctcaaccggcgatgaagcccgctcggtctgcacggtgacctgtaaatggacctacctggcgcatgaacaacgctgggatgccggttacttccgccagattggcctcgcagagctggcggatgaagattttgtccgcatcggccagcggattgtcgatccaggcaccccctgcggcgagggcctttgcgccacggcggcagaggagatgggcctgccgatcggcacgccggtggcggtggggatgattgacgcccacgcgggcggcatcggtaccgtcggcgtgcttaacggcgcggtcaacaatatggcctatgtcttcggtacttcttcctgcaccatgaccaccactcaggaagcggtattcgtcccgggcgtctggggcccttactattcggcgatggtgccgggctactggctaagtgaaggcgggcaaagcgccgccggcgcggctatcgaccagctgctgagcttccatccggcggcggcagaagcgcgcgagcaagcgaaagccgcaggcgtccctctaccagtctggctggcggatcgcgttctgacgcaagttgcttcgccttctgaagcggtaacgctggccgccggtctgcacgtcgttccggagtttctcggtaatcgcgcgccgcttgccgatccccacgcgaaagcgctgattgccgggctggggatggagcgggacctggataacctgaccgcgctgtacgttgccggcttatgcgggattggctatggtctgcgacagatcattgacgcccagcgcgcctgcggaattgagagtgaaaatatcgtcatcagcggcggagccgggcagcatccgctggtgcgtcagctgttggccgacgcctgcggcgttagcatcgtgagcaccgccagccgcgagccggtgctgttaggttccgccatcctcggcgcggtggcgggcagagtcgcggcttcgctgccggaggccatgaagcagtttactcaggtggacgccacctatcacagcgagacggcgtttagcccgcttcatcagcgcaggtatgcggcctataaggcgctacaacaggccggcaggctgattcgcgaataa

SEQ ID NO: 136016 - DNA, 1053 bp, Enterobacter cloacae
atgactgatattacgcagttgctgggcaaagatgccgagagcctgttgcagcaccgttgtataaccattccgtccgaccagctgtatctgcctggcgcagattatgttgatcgggtgatggtggataacaaccgaccaccggcggtgctacgcaatatgcagaccctgtacaataccggacgcctggggggaaccggctacctttccattctgccggttgaccagggcgtggagcactcggcgggcgcctcctttgccgccaacccgctgtactttgatccgaaaaatatcgtcgagctggcgatcgaagccggctgtaactgcgtggcgtcgacctacggcgtgctggcctcggtgtcgcgccgctacgcgcatcgcatccctttcctggtgaagctcaaccataacgaaacgctgagctaccccaccgaatacgaccagaccctctacgccagcgttgagcaggcgttcaatatgggggcggtggccgtgggagcgacgatctatttcggctcagaacaatcgcgtcgtcagatagaagagatttccgccgcctttgagcgggcccatgagctgggcctggtcaccgtgctgtgggcctatctgcgcaattcggcgttcaagaaagacggcgtcgactatcatgtttccgctgacctgaccggtcaggccaaccacctggcggccaccatcggcgccgatatcgttaagcaaaagatggcggagaataacggcggctacaaagcggttaacttcggctataccgacgatcgggtatacagcaaactgaccagcgataaccccatcgatctggtgcgctaccagctggccaactgctatatgggccgcgccgggctgatcaactccggcggcgcggcgggcggggagaccgaccttgccgacgcggtgcgcacggcggtgatcaataaacgcgccggcggcatggggctgatccttggccgcaaagcgtttaagaaatcgatggccgacggcgtgaagctgatcaatgccgtgcaggatgtttatctggatggcaaagtgactatcgcataa

SEQ ID NO: 136017 - DNA, 801 bp, Enterobacter cloacae
atgaaacgcatcaacgccctgaccatcgccggcaccgatcccagcggcggggccggtatccaggccgatctgaaaaccttctccgcgctgggggcctatggctgctcggcgatcaccgccctggtggcgcagaatacccgcggcgtacagtcggtctatcgcatcgaaccggattttgtggccgcgcagctcgactcggtgttcagcgatgtgcgtatcgataccaccaaaatcggcatgctggcggagaccgatattgtggaagccgtggccgagcggctggcgcgctaccgggttgctaacgtggtgctggataccgtcatgctggcgaaaagcggcgatccgctgctgtcggcttcggcggtggagaccctgcgtcaacgattgttgccgcaggtgtcattgatcaccccgaatctgccggaagcggccgcgctactcgatgccccccatgcgcgtaacgaacgggaaatgctggagcaggggcgggcgctgctggcgctgggctgcggcgcggtattgatgaagggcggccatctcgacgatgccgaaagcccggactggctcttcacccgcgaaggggaacagcggttcaccgcgccgcgagtgcagaccaaaaatacccacggcaccggctgtacgctctccgccgcgctggcggcgctgcgcccgcgtcacacggactgggcggccaccgttaccgaggcgaaggcctggctgtcggcggctctggcgcaggccgactctctggaggtgggccacggtatcgggccggtgcaccatttccacgcctggtggtaa

SEQ ID NO: 136018 - DNA, 774 bp, Enterobacter cloacae
atgcctgagctgttgaatcccgcgcctgtcgcgcacctgcgccatctgctgcgcgcccattccccccttgtgcactgcatgactaatgacgtggtgcagacctttaccgccaatgttctgctggccgtcggcgcctcgccggcgatggtgatcgatccccgcgaagcggcgcaatttgccgctatcgctgatgcgctgttaattaacgtcggtaccctgaccgaagatcgcgccgtggcgatgcgcgccgcggtggagcacgcccgtcaggccggcaagccctggacgctggatccggtggcggtcggcgccctgaccgtgcgcacggccttttgtcacgagctgctggccctccagccggcggccattcgcggcaatgcctctgaaattctggcgctggccgggatgagcgccggcgggcgcggggtggataccaccgatacggccgctgcggcgctgccggcggcccaggcgctggctcgtcggctggctaccgtggtggcggtcactggcgaggtggactacgtcaccgacggcgagcgggtgctcagcgtggcggggggcaatccgctgatgacccgggtggtgggcaccggctgcgcgctgtcggcggtggtggcggcgagcgcggcgctaccgggagaccggctggaaaacgtggccgccgcctgcgggctgatgaagcaggccggggagatcgccgcccgtcagggaggcccaggcagctttattccggcgtttctcgacgcgctgtatcaggaggtgcagggatga

SEQ ID NO: 136019 - DNA, 423 bp, Enterobacter cloacae
atggccgtttatcaccatgcgctggtactgattaacagcagtcaggacggcgtcccgctgctccagcatgccgccagaatggcagaagagaacggcatgcgcatcaccatcgcccacatcagcaccgattaccgggcgctgaactatgtttccgacagcctgcgcgacgatcgggtctcgcaggaggtgatccaggccaaagccctgctcaacgagctggcctgcaccgtctccctgccggtggataccctctcgctggtgaccacccgccggtttgaagacgtagaaacctgcgttcggcagcggcagatcgatttaattattgccggacaccataaccggctgctgggcgtcctctcctcacactcgctggagtacatcaaccacttaaccgtagacgtgctgatcaagcacctgccctag

SEQ ID NO: 136020 - DNA, 915 bp, Enterobacter cloacae
atgatgaacgaaccctggcagcggctgcccgcgctctctcttaaacagcttcagtatttcgtcaccctggcccagctgcgccattttaccgataccgccagtcggctgacgattagccagccggcgctgagcagcgccctgcggcagattgaaacggtactcggcggtaagctggtcaaccgtaccgctgcgacggtcactctgactgaactgggggcggcgattttaccccacgcccagcggatcctcagcgtggcgcaggcggccttttccgatatgcagcagattgtcgaggcgggcggcgacgggacggtgcgtatcggtctggtgccgtcggtcagttcgctgctgtttccgttgctgccgcagaccctggctgaggcctttccgcgtctgcgcattgaatttcacgatcagaccaacgatgcgcttatccaggcgctgcagcgcggcgagattgatttcggcatcggggcgatcgacagttcactgcccgcagaactgctggtctatccgctgcgcgaagatcccttcgtggcggtgctgcaccgcgacgatccgctggccgcgcaggcgcatctgccgtggaaacagctggtggggcgggatattgctgtgttctcgaagggcaatatccagcggctggtggcggcattagtggagagccatcgcctgacgctgaccacccgctaccaggtggactatatcgaaaccctgtatggtctggtgcgctcgcgcttagcggtggctattctgccggcgctgtacaccacccatctgcaggacccggcgctcagggtcgcccacctgcagcagccggcgctcgcccgcacagtggccctgatgcgcggcccgcaggcgctgcccccgcttattgaagactgtttttccctgctgcaggccgccttgcgctag

SEQ ID NO: 136021 - DNA, 1812 bp, Enterobacter cloacae
atgtccagcaatgctcaagtccgccgtcgcgccgtgcaggccgcgcgcggtgaatccccgtttgatctgctgctgatcgatgcgcagatcgtcgatatggccacgggcgaaattcgcgccgctgacgtcggtatcgtcggcgagatgatcgccagcgtccacccgcgcggcagtcgcgaagacgcccatgaagtgcgttccctggccggtggctacctgtcccccggcctgatggacacccacgtgcacctcgaaagctcgcacctgccgccggagcgctatgcggaaatcgtcctcacccagggcaccaccgcggtgttctgggatccgcatgagctggccaacgtcctcggcgtcgctggcgtgcgctatgcggtggacgccagccgccatctgccgctgcaggtgatggtcgccgccccgtccagcgtcccctccacgccgggtctcgaaatgtccggcgctgatttcgccggcgcggagatggagaccatgctcggctggccggaagtgcgcggcgtggcggaggtgatggatatgcacggcgtgctgcacggtagcgagcggatgcaggagattgtccaggccggtctcaacagcggcaaactgattgaaggccacgcccgcggcctgagcggcgctgacctgcaggcctacctcgccgccggcgtcacctccgatcacgaactgacctcggcggacgacgcgctggaaaaactgcgcgccgggctgacgatcgagatccgcggctcgcacccctatctgctgccggatatcgtcgcggcgttaaaaacgctgccgcacctctcctcgcagatcaccgtctgcaccgatgacgtgccgccggatatactactggagaaaggcggcatcatcgccctgcttaatctgctgatcgagcacggtttaccggcggtcgatgcgctgcgattcgccaccctcaacgccgctattcgcctgcagcgccacgatctcgggctgattgccgccgggcggcgcgccgatctggtggtgtttgattccctggagaaactggtggcccgcgaagtctacatagacggtaagctgctggcccgcgcgggcaacctgctgacaccgatcgcgtccgccgcgggcgtcacgccgccgcgcgatactttgcagatcgcccccctccgcgccgatgactttattctgcgcgtccagggcattcgtcacggcatcgcccgcctgcgccatatccgcggcgcgcgcttcacccagtggggcgaagtggaagtgcaggttcgtgacgggaaagtccagctgcccgccggcttcagtctgatctgggtcaagcaccgccacggccgccatcaggcgacgccgcaaatcgccctgcttgaaggctggggtgagctgcgcggcgccatcgccaccagctactcccacgactcgcataatctggtggtgctcgggcgcgacgctaatgatatggcgctggcggccaaccagcttatcgcctccggcggcgggatggcgctggcgcaacagggcgagatccttgcccatgtggcgatgccgattgccggcatgctgtcggatctcccggccgcggaactggcgcgtcagttccgcgagctgcgcgatctgagcagccaagtcgccgactgggagccgccgtaccgggtcttcaaagccattgaaggcacctgccttgcctgtaacgccgggccgcatttaaccgatttgggtctgaccgacggcggcagccgccagatagtcgacccgttgatagcctgccgggagatcccggagccaaccgatcacaacaataatcctcagggagcctga

SEQ ID NO: 136022 - DNA, 1344 bp, Enterobacter cloacae
atggccgataacacacttcactcttccgcccgcgctaactggctggagcgccgctttgcgctgcgctcgcgcggcggcacgctacgcaccgaatgcctggccgggatcaccggctttctcgccgccgcctatttactggtggttatcccggggctgctggcgatcggtgggatggataaaggcgccgccaccaccggcaccattctggtcttcgtcgtcggctcgctgctgatggcgttttatgccaacctgccgtttatcgtcggcccgggcattggcggctcggtgctggtgggggtgacgctggccggtagcgaagggattggctggcagactggcctcggaattgcctgctggtcggggatcctcttcttcctgctgacccgctttggcctgcgcgaagtggtcacccgctcggtgccgcagtcgatcaagctgggattgacggcctccatcggcctgtttgtcgccgtcctcggttttcgcaatgccgggctggtgctggccaatgcgaaaaccaacgccctgatgctcggcgactttctcgcccccggcgcgctggtggcgctgtgcggcctgttcctggcgatagccctgcaggcgcgtaaggtaccgggcgccattttgtgggctattttgtgcgccacgctggtgggtatcccgttcggcgtgactaaactgccgacgcattttatcgatgccccccactcgctggcgccggtgctgggacaggttgacctgctgggggcgttaaacatcgccttcctgccgttcctgttcgtctttttcgcatctgagtttttctccaccatggggacaacgctggcggtgggcggcgaggcgggtctgctggatgaagaaggcaacatgccgcagattaatcgcccgttcatggtcgattcgattgccgccgcgctcggcccgtgggtgggcattccggcggctacggcgctgattgaatcttcggcggcagcggaagcgggcggcaaaaccggcctcaccgcgctgtcagcggcggtaatgttcctgctgatgctgctgttcacgccggtggcgttgatgatcccgaaagaagccaccgccccggcgctgatcctgattggcctgaacatgttcagcggcctgcgcaaagtggatcttgccaacttcaccgacgggctgccggtgctgatgatggtgatgatcacccttatcgccaacagctttggcaccgggattgccggcgggctgctgttttacattgtgatcaaggctatcgccggtaagtggcgggagatcccgattggcctgtgggtattggccgtcccgctggtgtattacttcgcgaccttagtcaggcattaa

SEQ ID NO: 136023 - DNA, 900 bp, Enterobacter cloacae
atgttcaggctggaagatctgaccttatttgtccgcgccgcggcgctgggcagttttagcgacgcggcgcgcgaggccgggcagcagccggcgcaggtcagcgcggcaattaagcgtctggagacgatcctcaatattcgcctgtttgcccgttcgacccgcagcctgcgcctgacgccggagggggagacctggctgccctacgccacccagatgctcgataccctcgaggccggtctgcagaagatccagaccccggatgatgaagttcgcggcatgttgcagattgccgtgccgtcggacctcgggcgtaacctgctcctgaccctgttccgcgatttccgccaacgccacccggcgctgcgcctgcggctgctcttttccgatcagctgaccgacgtgtttaaagatccggtggacgttgcgtttcgctatggcaataacgacgatgcctcgtttatctcgctgccggtggcgccggaaaatcgtcgggtgctggtggcctcgcctgagtggatcgcccgccatggcgaaccgcagaccctcgaggaactcagccagcacaatgcgttgatctacattttgcgcggccgtccgttcgaccgctggtcgctgagcctcgacggcgtggttcagcagcagaaggtttccggcacggtgatgagcgacgacgccgaggtgatccgtcggctggcgatcgccggggagggcattgcctataaatcgatgctcgacgtcagcgacgatctgcgggcggggcgcctgcggcgcctgctgccgcgttatcagggggatgtagtgccgttgaatctgatttgtccgcaccgcaaacagctctctgccgcggtgcgtttgttatatgaagaggtgaaatcacattgtgaagggcttaatgcctga

SEQ ID NO: 136024 - DNA, 318 bp, Enterobacter cloacae
atgcgtaaaacaaaaatgatgcttctgggcgtacttcttgccaccgctggcgccagctggacggctactgccgcggggatcgatcagtatgcgctgaaagagttcaccgccgatttcacccagtttcacatcggcgacaccgttccggcgatgtacctcaccccggaatacaacatcaaacagtggcagcagcgtaacctgcctgcgccggacgccggcagccactggacctatatgggcggtaactacgtgctgatcaccgataccgaaggcaaaatcctcaaagtgtacgatggcgagatcttctatcaccgctga

SEQ ID NO: 136025 - DNA, 246 bp, Enterobacter cloacae
  misc_feature (216)..(225): n is a, c, g, or t
atggcgagatcttctatcaccgctgatccgcgcaatctccacgtccgccccagcgagccagcggactctccggcgctgcgccagatcttcctgcgggcgcgcagtttatcgtggacctggcttcccgccgcggcgtggcggctggaggatttcgatgccgccaccgcggatgaacaactgtgggtcgcggaatgcgacggccagccggtgggcttnnnnnnnnnngcttcgatggtccagccatga

SEQ ID NO: 136026 - DNA, 174 bp, Enterobacter cloacae
atgacgctggtagaagcgcaggtcgaacggacctttaccgctagcggaacgctgaagtgcctgatggaaaataaaaacgccctgcgcttctaccagcgtcatggctggaccatcgaagcacagggcgcgtcgcccgagggcagatactggctaatgcgctcgccgcggccttaa

SEQ ID NO: 136027 - DNA, 1110 bp, Enterobacter cloacae
atgaattcgcaatcccaggccaaatcccctgagcgcctacgtgcgatggtcgccgggacactggccaatttccagcacccaaccctgaagcataatctcaccgcccttaaggcgctgcaccatgtcgcctggctggacgataccgtccatattgaactgcaaatgccgttcgtctggagcagcgctttcgaagcgctgaaagagcagtgcagtgccgaactgctgcgcatcaccggcgcgaaggccatcgactggaagctgacccacagcatcgcgaccctcaagcgggtgaaaaaccagcccggggtcaacggcgtgaaaaacattatcgccatcagctccggcaaaggcggcgtcggtaaatcttctactgccgtaaacctggcgctggccctggcggcggaaggggcgaaggtgggcattctggatgccgatatctatggtccgtcgattccgaccatgctgggtgcggaagacagccgcccgacctcgccggacggcacccatatggcgccgatcatgaaatatggtctggcaaccaactccatcggctacctggtgaccgacgacaacgccatggtctggcgtgggccgatggccagcaaggcgctgatgcagatgctgcaggagaccctgtggccggatcttgattacctggtgctggatatgccgccgggcaccggcgacatccagctgaccctggcgcagaacatcccggtgaccggcgcggtggtggtcactacgccgcaggacatcgcgctgatcgacgccaaaaaaggcatcgtgatgttcgagaaagtggaagtgccggtgctggggatcgtggaaaacatgagcatgcatatctgcagcaactgcgggcaccacgagcctatcttcggcaccggcggcgcgcaaaaactggccgagaaataccacacccagctgctgggccagctgccgctgcatattacgctgcgggaagatctggataacggcacgccgacggtggtggcgcgtccggacagcgaatttaccgacatctaccgccagctggcgggccgggtggcggcccagatgtactggcagggagaagtgatcccgggtgagattgccttccgcgccgtttaa

SEQ ID NO: 136028 - DNA, 2043 bp, Enterobacter cloacae
atgctcactatgactcaagtcgcgaagaaaattctggtaacgtgcgccctgccgtacgccaacggctccatccacctcggccacatgctggagcacatccaggctgatgtctgggtccgttaccagcgaatgcgcggccacgaggtcaacttcatctgcgccgacgacgcccacggcacgccgatcatgctcaaagcgcagcagctcggtatcacaccggagcagatgattggcgaaatgagtcaggagcatcagaccgatttcgccggcttcgacatcagctatgataactatcactcgacgcacagcgacgagaaccgcgagctgtcggagcttatctacacccgcctgaaagagaacggttttattaaaaaccgcaccatctctcagctctacgatccggaaaaaggcatgttcctgccggaccgttttgtgaaaggcacctgtccgaagtgcaaatctccggaccagtatggcgataactgcgaagtgtgcggcgcgacctacagccctaccgagcttatcgacccgaaatcggtggtctccggcgccacgccggtgatgcgtgactccgagcactttttcttcgacctgccctcgttcagcgaaatgctgcaggcgtggacccgcagcggcgccctgcaggagcaggtcgcgaacaagatgcaggagtggttcgaatccggcctgcagcagtgggacatctcccgcgatgcgccgtacttcggcttcgaaattcccaacgcgccgggcaaatatttctacgtctggctggacgcgccgatcggctacatgggctccttcaagaacctgtgcgacaagcgcggcgacaccaccagcttcgacgaatactggaagaaagattccacggccgagctgtatcactttatcggcaaagacattgtctacttccacagcctgttctggccggcgatgctggaaggcagcaacttccgtaagccgactaacctgttcgtgcacggctacgtgacggttaacggcgccaagatgtccaagtcgcgcggcacctttatcaaggccagcacctggttaaatcatttcgatgccgacagcctgcgctactactacaccgccaagctctcttcacgcatcgatgacatcgacctgaacctggaagatttcgtgcagcgcgtgaacgccgacatcgtcaacaaggtggttaacctcgcctcacgcaacgccggctttatcagcaagcgtttcgacggcgtgctggccgcggagctggccgacccggcgctgtacaaaaccttcaccgacgcggcggaaagcatcggcgaagcgtgggacagccgcgagttcggtaaagccatccgcgaaatcatggccctcgccgacgtggctaaccgctatgtcgacgagcaggcgccgtgggtggtggcgaaacaggaaggccgcgacgccgacctgcaggccatctgcaccatgggcctgaatatgttccgcgtgctgatgacctggctgaagccggtcctgccgcagctggccgcgcgtgcggaagcgttcctcaacagcgaactgagctgggacgccattcagcagccgctgctggcgcataaggtcaatccgttcaaggcgctgtacaaccgtatcgagatgaagcaggtggaagccctggtagaagcctctaaagaagaggtgaaagccaccgcggcgccggtcaccggtccgctggcggacgatccgattcaggagaccatcacctttgacgatttcgccaaagtcgatctgcgcgtggcgctgattgaaaacgcggaattcgtcgagggctccgacaagctgctgcgcctgacgctggatctcggcggcgaaaaacgcaatgtcttctccggcatccgctccgcttacccggatccgcagccgctgattggccgcctgacggtgatggtcgccaacctggcgccgcgcaaaatgcgcttcggcatctccgagggcatggtgatggccgccggccctggcgggaaggatatcttcctgttaagccctgacgacggcgccaagccgggtcagcaggtgaaataa

SEQ ID NO: 136029 - DNA, 471 bp, Enterobacter cloacae
atgctcagtaatgatattcttcgtagcctgcgctacaccctgaaagtcaataataacgatatggtgcgcattctcgcgctctccgctatggaatccaccgccgccagcttcgacacctggacgacgaaagaggatgaagagggctttgttcgctgcccggacattatcctgtcgggtttccttaacggccttatctatgacaagcgcggcaaagatgattcggccccggagctggcgctggagcgtcgggtgaataacaacacggtgctgaaaaagctgcggatcgccttctcgctgaaaacggacgatatccaggcgattatgagcgagcagaaataccgggtgtcggtgccggagatcaccgccatgatgcgctcgcctgaccacaaaaactaccgcgagtgcggcgaccagtttctgcgcaatttcctgcgcggactgacccagcgggtgcataacccgaaggcatga

SEQ ID NO: 136030 - DNA, 720 bp, Enterobacter cloacae
atgctgagagtattgatcgtcgatgatgagccgctggcgcgggaaaacctgcgcattttgctggagacacagcgcgatatcgagatcgtcggcgagtgcggcaacgcggtggaggccattggcgcggtgcataagctgcgtcccgacgtgctgtttctcgacatccagatgccgcgcatcagcggtctggagatggtcgggatgctcgacccggagcaccgcccctatatcgtgtttctcaccgcctttgatgaatacgcggtgaaagcctttgaggagcatgcctttgactatctgctgaagccgattgaagctgcccggctggagaaaaccctcgcccgcctgcgccaggagcgtaatctgcaggatgtgtcgctgctggatgatgctcagcagacgctgaaatacattccctgtaccggccacagtcgtatctggctgctgcagatggaggatgtggccttcgtcagcagccggatgagcggcatctacgtgaccgaccgcgagggaaaagagggctttaccgaactgaccctgcgcaccctcgagagccgcacgccgctgctgcgctgccatcgccagtatctggtgaatatggcgcacctgaaggagattcgcctggaggagaatggccaggcggagctgctgatgcgcgccgggcaaacggtgccggtgagccggcgctatttaaaaagcctgaaagaggcgattggcctgtaa

SEQ ID NO: 136031 - DNA, 831 bp, Enterobacter cloacae
gtggtctacgccgacggcaacgaggtgccttaccgctgctcgattcatccgcactgtaagctggggtcgacgctggtgatccccctgcgcggcgagaaccaacgggtgataggcaccattaaactgtatgaggcgaaaaatcgcctgttcagttcgatcaaccgcaccctcggggaggggattgcccagctgctgtcggcgcagatcctcgccggacagtacgagcggcagaaggcgctgctgacgcaatccgaaatcaagctcctgcacgcccaggtcaacccgcacttcctgtttaacgcgcttaacacgctgaaggcggtgatccgccgcgacagcgatcaggccggccagctggtgcagtatctatcgaccttctttcgcaagaacctgaaacggccgacggaaattgtcactcttgccgatgagatcgagcatgttaacgcctatctgcagattgagaaggctcgctttcaggctaacctgcagatccagatggcggtgccggaagggctggcgcatcaccagctgccggcctttaccctgcagccgatcgtggagaacgccattaagcatggtacatcgcaacatcttggcgtcggcgaaattaccatccgcgccagccaggacgatcgctggctgcagctggatatcgaagataacgccgggctgtaccgggccaacccccaggccagcgggctggggatgaatctggtggacaggcggctgcgggcgcgttttggcgccgactgcggcatcagcgtcacctgcgagccggagcgctttacccgtgtcaccctacgtctgcccctggaggagaatgcatgctga

SEQ ID NO: 136032 - DNA, 858 bp, Enterobacter cloacae
  misc_feature (752)..(761): n is a, c, g, or t
atggtacgcgctttcaggcatgtgtggtttgcgggtatgtacgagtttgatctggtgttgctgctgcttcagcagatgtgcgtatttttggtcatcgcgtggttgatgagcaaaacccgactgtttatccccctgatgcaagtcaccgttcgcctgccgcacaagctgctgtgctacgtcactttctccattttctgcattatggggacctatttcggtctgcatatcgaagactccatcgccaacacccgcgccatcggcgctgtgatgggcggcctgctcggcgggccggtggtcggcgggctggtagggctcaccggcggcctgcaccgctactcgctggggggaatgaccgccttaagctgcatggtttccaccatcgttgaggggctgctgggcggtctggtgcacagcgtgctggtcaaacgcggccggccggacaaagtctttagcccgctgaccgccggggcgatcaccttcgtggccgagctggtgcagatgatgatcattctgctgattgcccgcccgttccaggacgccctgcatctggtgcagagcattgccgcgccgatgatggtcaccaataccgtcggagcggcgctgtttatgcgcattctgctggataaacgggcgatgttcgagaagtacacctccgccttttccgccacggcgctgaaggtggcggcgtccaccgaggggatcctgcgtcagggattcaacgaagagaacagcatgaaggtggcccaggtgcnnnnnnnnnnccgatcgcgacaagctgctggcgtttaccggcatcggcgacgaccaccatctgccgggcaagcctatttcctcctcgtatacgcaacgggcgattga

SEQ ID NO: 136033 - DNA, 738 bp, Enterobacter cloacae
atgaaggcgcttcgtgagccgctgtggtggcttatcgcgctgtttatcggcctgctggcagggctgccctacagcgcgccgctgttcagtcggctgttcccggagctgccgcggccggtctaccagcaggagagcttctgggcgctcactctcgatcacggctggctggtggtggcgtccagcctcgcggcaacggcaatcgggctgggggctggggtggcggtcacccggcccgccggcggcgcgtttcgtccgctggtggagaccatcgccgctatcgggcagacctttccgccggtggcggtgctggcgatggcggtgccggtgctgggctttggctggctgccggcgctgatagccctcgcgttgtatggcatactgccggtgctgcaggggacactggccgggctgggttcgataccgcctggggtgtcaggtgtggctgaagggatgggaatgaccggctggcagcgtctgtataaggtggagcttccgctggcggccccggtgatcctggcggggatccgcacctcggtcatcgtcaatattggtaccgcgaccattgcctcgacggtgggggccagtacgctcgggacgccgatcatcatcggcctgagcggctttaataccgcctatattgttcagggggcgctgctggtggccctggcggcgattatcgtcgaccgcgcgtttgagcgtctgacccgctggatcagccgacaccgccacgcacaataa

SEQ ID NO: 136034 - DNA, 948 bp, Enterobacter cloacae
atgattgaatttcacggggtcagcaaagtgtttgccggccacccggcggtgaaggacctgaccctggagctgcgcgaaggcgctttctcggtgctggtggggacttccggctcgggcaagtcgacgacgctgaagatgatcaaccgtctgctggagccggaccggggcaccattcgctttgccggcgaggacatccgccagcagccggtcctgaccctgcggcggcggatgggctatgccatccagtccatcggcctgtttccccactggacggtggcgcagaatatcgccaccgtgccgcagctgcaaagatggccgcgggcaaggatcgccgaccggatcgacgagctgatggcgctgctggggctggaggcgacgctgcgcgaccgttacccgcatcagctctccggcggccagcagcagcgggtgggggtggcgcgggcgctggcggcagatccggaggtgctgttgatggatgagcccttcggcgccctcgacccggtgacccgcgaggcgctgcagcaggagatgctgcgcatccaccgtctgctgggacggacgattgtgctggtgacccatgatattgacgaagcgctgcgtctggcggaccacctggtgctgatggacgggggcgaggtggtccagcagggggcgccgctggagatgctcctgcgaccgaaaaatagctttgtacagaccttttttggccgcagcgagctgggcgtgcgcctgctgtcgctgcgcgaggtaggggactatttgcgtcccgacgaacggctggcgggcgaggggctgaccgtcaccatgaccctgcgggaagcgctgtcgcagtttgtcgcccggcgctgcgagacgctgccggtggtcgatgccgaaggcaggccctgcggtacgctgcattttgccgatctgctgcgtcaggagatgagccatgaaggcgcttcgtga

SEQ ID NO: 136035 - DNA, 1158 bp, Enterobacter cloacae
gtgaccattcgctgtactcaccgcgtcggtctgctgctgacaggtctgctgctggttacgctggcgctgccgtttgtcacttatgcgccgaatcgcttactctccggggaagggcgcgggctgtggcaggcgctgccctggctcgccggcgttcagctggcggcggcccttaccgggatgctgctctgctggctgccgggcaggatcgtgccgtttctccacctgctgctggccgaactgctcttcccgctgcttatctggggcagcggccaggcggcgcttgagctctcccgccatggctcgccgttggcgcgcacctcgcccggcagcggcctgtggctgtcgctggcgctttgtctgctgctggccagcgaggccatccgtcatcttaccgtccggccgctctggcgctggctgctcaatgcgcaagtctggctgttgccgatcatcctgctcgctatcggggcgctcgatcagctctccttgctgaaggagtatgccaaccgtcaggaggtatttgatgacgccctgcgccagcatctgcttttgctgttcggcaccctgctgccgggcctgctgattggcctgccgctgggggtatggctgtggcggcgtccgcgctggcaggcgccggcttttaccgcgctcaatgtgatccagactattccgtcggtagcgctttttggcctgctgattgcgccgcttgccggtctggcgcgttatttcccgacgctgggcgagctgggcgtctccgggaccggcgtggcgccagccctgatcgctctaactctctatgcgctactgccgctggtgcgcggggtggtgaccggcctgcagcaggtgccgcaggatgccctggaaagcgcgacggcaatgggcatgagcgccgggcagcgctttcgtcaggtgcagcttccgctggcgatgccggtactgctgcgcagcctgcgggtggtcagcgtgcaaaccgtgggcatggcggtggtggccgcgctgatcggcgccggcggctttggcgcgctggtgtttcaggggctgttgagcagtgcgctggatctggtgctgctgggcgtggtgccgaccattgccctggcggtggtggtggatgccctgttcgccctgtggggcgcctggctaaaaggagaggccaatgattga

SEQ ID NO: 136036 - DNA, 318 bp, Enterobacter cloacae
gtgaccatcaaagcggcggcgcaacagacctccggcgttaacgcggcgatggcctacggcaccgatggcccggtggcggccctggggttacagacgctgagcgacccgcagggcgtgcagccgatatatgccccgacgccggtggtgcgcgaggcggtgctgaaggcctacccgcagatcgccgactggctgcagccggtcttcgccagcctcgatgaaaaaacgctgcagcagctgaacgcccgcattgcggtggagggccaggatgcgaagcgcgtggcggcagattatctgcagcagaaaggcctgctgaagtaa

SEQ ID NO: 136037 - DNA, 198 bp, Enterobacter cloacae
atggcgggcgaggctgccgtgtccgaccccatcggcctggcactggcatgggcagcctccctggcctcgatcgcggtggcggtcgtggccgcaggtcacgcgggcgtctacaagcgtgatgagcagtcggccacgccgtggggactgctcatcagcggcggcactgccctcccgctcgctggccatccgttcgcgtga

SEQ ID NO: 136038 - DNA, 489 bp, Enterobacter cloacae
atgaaggaaaagcaagcagacccgatcaaaacatttcgcgcccaatgggcagtgatgacgttctacgagcgctttgaacaggtgatcgcgctcgcgctgtccgcaatcattgccgttatcatcgtggtctcgctgctgcagctgatctcgatcgtcttcagcctgctgatcattgatgcattcaatccgctcgatcacaaggtcttccagaccgtgttcggcatgatcatgacgctgctcattgccatggagttcaagcattccatcgtgagggtggccttgcggcgcgacagcatcatccaggtcaagacggtgatcctgatcgggctgatcgccctggcgcgtaaattcgtgatcctcgacccggagaccggccccgccaaggtcgcggcgcttgcaggcgcgacactggccctcggggcgacttactggctgctgcgcgagcgcgatgaccggacagccggggaaagctcagatgatcagtcgtga

SEQ ID NO: 136039 - DNA, 963 bp, Enterobacter cloacae; identical to SEQ ID NO: 104004

SEQ ID NO: 136040 - DNA, 306 bp, Enterobacter cloacae; identical to SEQ ID NO: 104005

SEQ ID NO: 136041 - DNA, 138 bp, Enterobacter cloacae
atgacgtccatgcctgtgatgagaggctataccaataagctgttattccccttttttatggtcgtgttccttcagtccgggatgctttggcttgttttccggagtgacacgccttcttttatcttctttgccagttga

SEQ ID NO: 136042 - DNA, 1359 bp, Enterobacter cloacae
atgcttgtgaccatgtcagataaagaactcagtcggatcaacatcattcagtcagttgttgaaaagcgcatgcgccgtcgcgacgctgctcatcagcttgctttgaccgaacgtcagacacagcgtttgatgaaccgctttcgtgaatctggtgctgcaggtctggcaaaccttcgacgaggacgccccggtaatcacagacttcctgagtcactgaagctgcgtgtactttctttacttcacgatcattacagcgactttggaccaacgctggccgcagaaaaattgcgcgaacgccataacatcacggtgtctgttgaaacactgagaaaatggatgacggctgatggactctgggtcccatactcacgtcgcaggccacgtgttcatcaacccagataccggcgtgactgccttggagaacttgttcagatcgatggttccccgcatgactggtttgaaggacgtgcccccaaatgctgcctgctcgtcttcattgatgatgctactgggcgcctgatgcacctccgtttcggcgagactgaatcagcctttgattacatgatggccacccgcgcgtatcttgaacagcatggcaaaccactggcgttctacagcgataagcacggcattttcagggtcaataatggtggcactaccacaactggaatcactcagttcggccgggtgctttccgaactggggatcgagttgatatgcgccaacagcccgcaagctaaaggtcgcgttgagcgcgcaaaccagactcttcaggatcgacttatcaaagaaatgcggcttgaaggcatcagcagcatcgaggatgccaatgcctggctggattccttcattattgacttcaatcgtcgttttgccagaccagcaaaatatcccaaagacctgcatcgaccggtgcttgaaagctctgaagatctggatgatatctttgcttggcaggaatcacgaaaactctcgaaaacactgactttccgttacgataagatgatatatctcgttgaacctacggaagaaaataccagaattgcaggtgaaaaaatcacagtttacgactacccaaatggtacgctggcgtttaaatatggctaccgatcactcaattatcaggtcttcgataaactggaatgcatcgaccaggggcaaatcgttgataacaaacggctcggtgctgtactgaaactggctcaggacaagatggatgaattggatcgagagggaaagcgagataggagtaaaaaaatgcccaaacgacgtgcacaagcccgggttcaggagcaactcagagccatcaaccccgtactggctaatcctgaagagttccgagccagtctgaaacgctag

SEQ ID NO: 136043 - DNA, 483 bp, Enterobacter cloacae
gtgggacgtataaccacgcccgagccgttatccagctctcatcagctggctgagttcgtcagtggagagacagtcctcgatgaatggctaaaacagagaggtttaaaaaatcaagctcttggcgctgcccgaacgttcgttgtttgcaagacgggtacgaagcaagtagctggtttttactctttggccaccggtagcgttaaccatacggaagcgacaggtagtcttcggcgtaacatgccagatcctataccggtgattatactcgctcgcctggcggtagatgtctcattgcacggaaaaggggttggcgccgatttactccacgatgcagttctacggtgttatcgcgtagctgagaacattggggttcgtgcgataatggttcatgcgcttactgaagaagccaaaggtttctatgctcaccatggatttaaggcatcacaaactcatgagaggactctgtttctaaagcttccatga

SEQ ID NO: 136044 - DNA, 267 bp, Enterobacter cloacae; identical to SEQ ID NO: 125559

SEQ ID NO: 136045 - DNA, 255 bp, Enterobacter cloacae; identical to SEQ ID NO: 102310

SEQ ID NO: 136046 - DNA, 258 bp, Enterobacter cloacae; identical to SEQ ID NO: 102309

SEQ ID NO: 136047 - DNA, 204 bp, Enterobacter cloacae
atgacgaaacaggaatggattttaagactacgccgctgtacatctaaggaaactctggaaaggataatagaaaaaaataaatattccctgacggatgacgaacttgagcactttaatgccgcagtggatcaccggctggcggaaatggcaatggggaagttttatgataaaattcctgcaggcgtctggaaatatgttaaataa

SEQ ID NO: 136048 - DNA, 270 bp, Enterobacter cloacae
atggatgagaaagtattctttcacctgagttatgaaaccatgcttggcgacacggaagattttattaacgcgtgtcttgaacgggcaaaccgtgcggactgcaatgatgccgatgcggagattgcccgggcacgcagcgcgatcgaactctggtaccacctggcgatggcgggccgtgccccggaagacgtcgccgacagggaccatctgcgcctcaccggaatgctcctgcgcgctcccacagcagaacaacgttcatggcagcagtaa

SEQ ID NO: 136049 - DNA, 474 bp, Enterobacter cloacae; identical to SEQ ID NO: 102215

SEQ ID NO: 136050 - DNA, 651 bp, Enterobacter cloacae; identical to SEQ ID NO: 102213

SEQ ID NO: 136051 - DNA, 435 bp, Enterobacter cloacae; identical to SEQ ID NO: 102212

SEQ ID NO: 136052 - DNA, 1098 bp, Enterobacter cloacae
atgaaaggacgttgggcaaaatatgtagcgacgggggcaatgctggccatgctcgccgcctgttcctcaaaaccgaccgaccgcggtcagcaatatagcgatggcaagttcacccagccgttttcactggtaaaccagccggatgccgtcggggcgccgatcaacgccggcgacttctccgagcaggttaatcaaattcgtaacgcctcgccacgcctctataatagccagagcaacgtctataacgcgctgcaggagtggctgcgcgccggcggcgacacccgtacgctgcgccagtttggcatcgacgcctggcagatgcagggcgtcgacaactatggcaacgtccagtttaccggctactacacgccggtggtgcaggcgcgccacacccgtcagggcgaattccagtaccccatttaccgtatgccgccgaaacgcggtaagctgccgtcccgcgccagcatctatgccggcgcgctgagcgataactatgtgctggcgtacagcaactcgttgatggataacttcatcatggacgtgcagggcagcggctatatcgactttggcgatggttcgccgctcaacttctttagctatgccgggaaaaacggctggccctatcgcagcatcggcaaagtgctaatcgaccgcggggaagtgaagaaagaagatatgtcgatgcaggcgatccgcgagtggggtgaaaagcacagcgaagcggaagtgcgcgagctgctggagcagaacccgtcgttcgtgttctttaaaccgcagtctttcgcgccggtgaaaggggccagcgctgtgccgctgatcggccgcgcctcggtggcctccgaccggtcgattattccgccgggaaccaccttgctggccgaggtgcctctgctggataataacggcaagtttaacggccagtacgaactgcgcctgatggtcgccctcgacgtcggcggggccatcaagggccagcatttcgacatctatcagggcattgggcctgacgcaggccaccgtgccggctggtataaccactacggccgcgtatgggtgctgaaaaacgccccgggcgcggggaatgtttttagcggctaa

SEQ ID NO: 136053 - DNA, 822 bp, Enterobacter cloacae
atgtctgttgtaatcagcgatgcctggcgccagcgttttggcggtacggcacgtttatatggtgaaaaagcgctgcaatgttttgccgacgcccacgtctgcgtggtcgggatcggcggggtcggctcctgggcggcggaagcgctggcgcggaccggcatcggggcgatcacccttatcgatatggacgatgtctgcgtcaccaacaccaatcgtcagatccacgccctcagcggcaacgtcgggctggcgaaagcggaggtgatggcggagcgtattcgtctcatcaacccggagtgtcgggtgacggtggtggatgatttcgtgaccccggaaaacgtggcggaatatcttggcgtcggctttagctatgttatcgacgcgatcgatagcgtccggccgaaagcggcgcttatcgcctggtgtcgccgctacaaggtgccgctggtgactaccggcggggcgggtggtcagattgacccaacgcagatccaggtcgctgacctggcgaagaccatccaggatccgctggcggccaaactgcgcgagcggctgaaaagccagtttggggtggtgaaaaacagcaaaggtaagctcggtgtagactgcgtcttctctacggaagcgctggtctacccgcaggcggacggcagcgtctgcgcaatgaagagcacggcggaagggccgaagcggatggactgcgcttccggctttggcgcggcgacgatggtgaccgcgaccttcggcttcgtcgcggtgtcgcatgccctgaagaagatgctggcgaaagcgcagcgtgacgctgcggctgccggaaagtag

SEQ ID NO: 136054 - DNA, 432 bp, Enterobacter cloacae
atgacaactctgcaccccttcggcacaaccattaccgacgctacgctgcgccagatcttcgccccgctgaaccagtgggaggataaataccgtcagctgattttattgggcaaaaagctgccgacgctgaccgacgagcgcaaagcgcaggcccatgagattgccggctgtgagaaccgcgtctggctgggctatgaggaggacgccgagggcaggctgcacttctttggcgacagcgaaggaaggattgtgcgcggtctgctggcggtacttttaaccgccgtggaaggaaaaacccgcgccgggatcctggcgcaggatccgctggcgctgttcgacgagctggggctgcgcggccagctcagcgcctcgcgcagccagggcctcagcgccctgagcgaggcggtgctcgccgccgcccgcgaaaggtaa

SEQ ID NO: 136055 - DNA, 1206 bp, Enterobacter cloacae
atgaacgcattcaacccggcgcactttcgcgcgcagtttccggctctggccgatgccggcgtctatctcgacagcgcggcgacagcgctcaaaccgctggcggtgatcgacgccagcgaccagttttatcgcctgagcgccggcaatgtccatcgcagccagttcgccgccgcccagcggctgaccgagcgctacgaggcggcccgcgatcgcgtggcggcgtggcttaacgccccgtccggcaaagatatcgtctggacgcgggggaccaccgaggccatcaatatggtggcgcagagctacgtccggccgcgcctgcagcctggcgatgaaattatcgttagcgaagccgagcatcatgccaacctcgtgccctggctgatggtggccgggcagaccggcgccagagtggtcaaactgccgcttggcgccgaccgtctgccggatatcgccagcctcagcgcgctgattaccccgcgcagccgggtgctggccatcggccagatgtccaacgtcaccggcggctgcccggacctggcccaggctatccgccttgcccacgccgccgggatggtggtgatggtcgatggcgcccagggggcggtgcatttccccgctgacgtgcaggcgctggatatcgatttttacgccttttccggccataagctgtatggcccgaccgggatcggcgccctgtacggcaaaagcgagctgctggcagcgatgtcgccctggctcggcggcgggaaaatgatcgccgaggtcagctttgacggctttacgccgcagccggccccctatggcctcgaggccggtacgccgaatgtcgccggggttatcggcctcagcgccgcgctggagtggctggcgcagagcgatatcggccaggcggaaaactggagccgcagtctggcgagcctggcggaagaggaactggcgaaacggccgggcttccgctctttccgctgccagcagtcaagcctgctggcctttgaatttgagggtattcatcacagcgatctggtgacgctgctggcggagtccggcattgccctgcgcgccggacaacactgcgcccagccgctgctggcggccttaggggtcagcggcaccctgcgggcctctttcgccccctacaatacccaagacgatgttgcggcgctggtccacgcggtggatcgcgccctggaaattctggtggattaa

SEQ ID NO: 136056 - DNA, 231 bp, Enterobacter cloacae
atgaaaatgactaaggccgctgcgattatctctgcctgtatgctgactttaggcctgagcgcctgttcctctaactatgtgatgcataccaacgatgggcggaccatcgttaccgacgggaaaccgcaaaccgataatgacactggcatgatctcgtataaagacgcgtggggcaacaaacagcagatcaatcgctctgacgtgaaacaactgggtgaactggacgagtaa

SEQ ID NO: 136057 - DNA, 918 bp, Enterobacter cloacae
atgtcgaagcgattaccacctctgaatgcattacgtgtttttgatgcagccgcacgtcatctcagcttcactcgggcagccgatgagctttttgtgacgcaggccgcagtcagccatcaaatcaagtctctcgaggattttctgggccttaagctgttccgtcggcgcaatcgttcgctgctgttaacggaagaagggcagagctattttcaggatattaaagagattttttcgcaactgacggaagcgacgcgtaaactgcaggcgcgcagcgccaaaggggcattaacggtcagtttattgccaagtttcgccattcagtggctggtgccaagactcacaagctttaactcagcttatccgggaatcgacgtcaggatccaggcggtggaccgtcaggaggataagctggcggacgatgtcgatgtggcgattttttatggtcgcggcaactggccgggcctgcgtgtggaaaaattgtacgccgagtatctgctgccggtctgttccccgctcttgctcaccggcgacaaagcattgaaaacgcctgccgatctggcgcaacataccctgcttcacgatgcgtcccgccgcgactggcaaacttatacccgtcagcttggtctaagccatattaatgtgcagcaggggccgattttcagccatagcgcgatggtgctgcaggcggccattcacgggcagggcgtggcgctggccaacaacgtcatggcgcagtccgaaattgaagccggtcgtctggtgtgtccgtttaatgatgttctggtcagtaagaatgcgttttaccttgtttgccatgacagtcaggcagaactgggtaaaatagccgctttccggcagtggatcctggcgaaagcggcaagtgaacaagaaaaattccgctttcgttatgaacaataa

SEQ ID NO: 136058 - DNA, 396 bp, Enterobacter cloacae
atgaccagccgttttatgctgatattcgccgcgattagcggctttatctttgtggctctgggcgcctttggcgcgcatgtcttaagtcaatcgctcggcgcggcggagatggcctggatccataccggcctggagtatcaggccttccataccctggcgatttttggtctggcggtggcgatgcagcgtcggatcagtatctggttctactggagcagcgtatttctggcgttagggaccgtgctgttcagcggcagcctctattgtctggcgctctctcatttacgtctgtgggcgttcgtgaccccggtgggcggcgtaagcttcctcgccggttgggttttaatgttaattggtgcaattcgtctgaaacgtaagggcgttgttcatgaataa

SEQ ID NO: 136059 - DNA, 1101 bp, Enterobacter cloacae
atgaataaggttgtcctctattgtcgccctggttttgagaaagagtgcgcagcagaaattaccgataaggcagcccgccttgaggtgtttggttttgcccgggtcaaagaagactctggctatgtaatttttgaaggttatcagcaggacgacggcgagaagctggtgcgcgatctgccgttcagctcgctgattttcgcccgtcagatgtttgtggtcggcgaactgctgcgcgacctgccgccggaggatcgcataaccccgatcgtcggcatgctgcagggcgtggtggagaagggtggcgagctgcgtgtggaagtggcggataccaacgaaagcaaagagctgatgaagttctgccgcaagtttacggtgccgttacgcgcggcgctgcgcgaggcgggcgtgctgaccaactatgaaacgccaaagcgaccggtggtgcatgtgttctttatcgcccccggctgctgctataccggctactcatacagcaacaacaactcaccgttctatatgggcattccgcggctgaagtttccgtccgacgccccgagccgttccaccctcaagctggaagaggcgttccacgtttttattccggcggacgagtgggacgagcgtctggcgaacggcatgtatgccgtcgatctcggcgcctgcccgggcggctggacctatcagctggtgaagcgcaacatgtgggtctcttcggtcgataacggcccgatggcccagagcctgatggataccggccaggtgacctggctgcgcgaagacggtttccgctatcgtccgaaccgcaacaacatctcgtggatggtctgcgatatggtggagaaaccggcgaaggtggcggcgctgatggcgcagtggctggtcaacggctggtgccgggagaccatcttcaacctcaagctgccgatgaaaaagcgctatgaagaggtgtcgcagaatctggcctatattcaggcccagctggacgagcacggcgttaacgcccagatccaggcgcgtcagctgtatcacgatcgtgaagaggtgaccgttcacgtgcgccgcctgtgggccgccgtcggcggacgtcgcgacgagcgttaa

SEQ ID NO: 136060 - DNA, 720 bp, Enterobacter cloacae
atgagaataaatgaaagcagcccgccagcaggcgatcgtcgattcctgatcacccacagcagcctgaccaccgaaacgttgtcaaaacagctcaacgtcagcagggaaactattcgccgcgatctgagcgagctgcaggcgcagggcaaagtgctgcgtaaccacggccgggccaaagtgatccaccagcgcagccaggacagcggcgatcctttccacatgcgcctgaaaagccattacgcgcataaagccgacatcgcccgcgaagcgctggcctggattgacgaagggatggtgatcgccctcgatgccagctccacctgctggtatctcgcccgccagctgccggaccgcccgctgcacgtctttaccaacagccagcccatctgccaggagctggccaaacgcgaccagatcacgctcacctgctccggcggcactctgcagcggaaatatggctgctacgtgaacccggcgctgatttcccagctgaaatcgctggagatcgatctgtttattttttcctgcgaaggcatcgacccgcagggcgcgctgtgggactccaatgcgttcaatgccgacttcaaatcgatcctgcttaagcgggcggcgcagtcgctgctgctgatcgacaaaagcaagttcaaccgctccggcgaggcgaggattggtcatctggatgacgtgacgcatattgtgtcggatgcgccgcagccttaa

SEQ ID NO: 136061 - DNA, 423 bp, Enterobacter cloacae
atgctcaaaaccatttccccgctgatatcgccggaactgctgaaagtgctggccgaaatgggccatggggatgaaatcattttttccgatgcccatttcccggcgcacagcatggggccgcaggtgatccgcgccgatggcctgcgagtcagcgatctgctgcaggcgattatcccgctgttcgaattagacagctatgcgccgccggtggtgatgatggccgccgtcgaaggcgatgcgctcgacccgacggtggaacagcgctatcggcaggcgctctcggcgcaggccccctgcccggatatcgtgcggattgaccgctttgccttctacgaccgggcgcaaaaagcctttgcgatcgttatcacaggagagtgcgctaagtacggaaatatccttttaaaaaaaggagtcacgccgtaa

SEQ ID NO: 136062 - DNA, 1419 bp, Enterobacter cloacae
atgaagcaagacgttatcctggtcctcgactgcggcgccacgaacgtgcgggcgatggccgtggatcgacaagggaacattatcgcccgcgccgcaacggcgaacgccagcgacatcgcggcggaaaaaagcgactggcaccagtggtcgctggaggccattatgcagcgctttgccgactgctgtcggcagatccatgaccagctggcctcctgcacggtgcgcggcattaccgtcacgacctttggcgtcgatggcgcgctggtagatgagaagggcgccctgctgtatccgatcatcagctggaaatgcccacgcaccgcggcggtgatggagaatatcagccagtatatgcccgcgcgccagctgcagcagatagccggcgtcggcgcgtttgcgttcaacaccctgtataagctggtgtggctgaaagagaaccacccgcagctgctggcgcaggcccatgcctggctgtttatttcatcgctgatcaaccatcggctgaccggggagttcaccaccgacctcaccatggcgggcaccagccagatgctcgatctccggcagcgcgatttcagcgcgccgatcctgcaggcgaccggcctgccgcgccgcctgttcccgcggctggttgaagcaggccagccgatcggcgccctgctgccggaggccgctgcgctgctgggccttcccgtcgggatcccggttatctcggccgggcatgacacccagttcgctctgtttggcgccggcgccgggcaggatgagccagtgctctcctccgggacctgggagatcctgatggtgcgcagcgcgcaggtcgacacctcgctgctctgtgactacagcggctccacctgcgagctggacagccagccgggccgctataacccggggatgcagtggctggcctccggcgtgctcgagtgggtgcgcaaactgctgtatagcgctgacaccccatggcagacgctgattgacgaagcgcaggcgatcccgcccggcgcccagggcgtcaggatgcagtgcgacctgctcgccagccagcacgccggctggcagggcgtcacgctcaacaccacccgcggccatttttaccgcgccgcgctggaggggttaagcgatcagctggcgcagcatctgcaaaccctggaaaaaatcggcggcttcagggcgaaagagctgctgctggtgggcggcggcagccgcaacgcgctatggaaccagatcaaggccaaccgactcgggataccgatccaagtcctcgacgatgccgaaaccaccgtggccggcgcggcgatgtttggctggtatggcgtgggcgagttctcttcgccagaacaggccagagcgcaggtcgcgtaccgctaccgctatttctggccgcaaactgaacctgaactgatagaggaagcctga

SEQ ID NO: 136063 - DNA, 1776 bp, Enterobacter cloacae
atgaaaaaaatcagcttaccgaagatcggtattcgtccggtaatcgatggtcgtcgcatgggggtccgcgagtcgctggaagcgcaaaccatgaacatggcgaaagccaccgccgcgcttatcagcgagaaactgcgccacgcctgcggcgcccgggtggagtgcgtgattgccgatacctgcatcgccggcatggccgagtcggccgcctgtgaagagaaattcagcaaccagaacgtcggcgtcaccatcaccgtcaccccctgctggtgctacggcagcgaaaccatcgacatggatccgctgcgcccgaaggccatctggggctttaacggcaccgagcgtccgggggcggtctatctggccgcggcgctggcggcccatagccagaaagggatcccggcgttctccatctacggacatgacgtgcaggatgccgatgacacctcgatcccggcggatgtcgaagaaaagctgttgcgcttcgctcgcgccggcctggctgtcgccagtatgaaagggaaaagctatctgtcgctgggcggcgtctcaatgggcatcgccggatctatcgtcgaccacaacttttttgagtcctggctcggcatgaaggtgcaggctgtcgacatgacggagctgcgccggcgaatcgatcaaaaaatctatgatgaaaccgagctggagatggcgctggcgtgggcggataaacacttccgctacggcgaagatcagaacgctgagcagtataagcgcaatgaaacgcagagccgcgcggtgctgaaagagagcctgctgatggcgatgtgcatccgcgacatgatgcagggcaacccgaagctcgcagaaaaagggctggtggaggagtcgctgggttacaacgccatcgccgccggtttccagggtcagcgccactggaccgatcaataccccaatggcgataccgccgaagcgctgctcaacagctcttttgactggaacggggtgcgcgaaccgtttgtcgtcgctaccgaaaacgacagcctcaacggcgtggccatgctgatgggccatcagctcaccggcaccgcccaggtgtttgccgacgtacgcacctactggtcgccggatgccgttgaacgggtcaccgggcagccgctcaccgggcgggcggagcacggcatcattcacctgattaactccggctctgcggcgctggacggctcctgccagcagcgcgacgcgcagggcaacccgacgatgaaacctcactgggagattgagcagaacgaggcggatgcctgcctcgcagcgaccgaatggtgcccggcgatccacgaatacttccgcggcggcggcttctcttcccgcttcctgaccgaaggcggcgtgccgttcaccatgacccgggtgaacatcatcaaaggtctggggccggtgctgcaaattgccgaaggctggagcgtagcgctgcccaaagcgatgcacgaccagctcgacgcccgcaccaactccacctggcccaccacctggtttgccccacgcctgaccggcaagggcccgttcagcgatgtgtactcggtgatggccaactggggcgccaaccacggcgtgctgaccatcggccacgttggcgcagatttcattaccctcgccgccatgctgcgcattccggtctgcatgcacaacgtggaagaggcgaaaatctatcgcccttccgcctgggccgcgcacggcatggatatcgagggccaggactaccgcgcctgccagaactacgggccgctgtataagcgttaa

SEQ ID NO: 136064 - DNA, 1311 bp, Enterobacter cloacae
atgggaaacacaacgataccaacgcaaagttaccgcgccatggagagcgggcagagtaagagctacattattcctttcgctctgctgtgctccctcttttttctgtgggccgtggctaataatctgaatgatattttattaccgcaatttcaacaggccttcaccctgactaacttccaggccggattaattcaatcggccttttactttggctattttattattcccatccccgccgggatgttgatgaaaaaattcagctacaaagccggcatccttacgggtctgtttttatatgcctgcggcgccgcgctgttctggcctgccgccgaagtgatgaattacaccttatttctcattggattatttattatcgctgccgggcttggctgtctggaaaccgcggccaacccgtttgtcaccgtcctcggtccggaaagcggcggtcacttccgccttaatctggcccagacctttaactcattcggcgccattattgccgtggtatttggccagagtcttattttgtctaacgtcccgcatcagccgcaggaggtgctggataaaatgacgccggaacagctcagcgcctggaagcacagtctggtcctgtcggtacaaaccccctatatgattatcgtggccattgtcctgctggtcgccctgctgatcgtctgcacccgcttcccctccctgcaaagcgatgaccacagcgacagcgcgcagagcacttttttcgcctcgctgacgcgcctgatgcgcatccgccactggcgctgggcggtactggcccagttctgctacgtcggcgcgcaaaccgcctgctggagctacctgattcgctacgctatcgaagagatcccgggcatgacggccggtttcgccgccaactacctgaccgccaccatggtctgcttctttatcggccgttttaccggcacctggcttatccgccgcttcgcgccgcacaacgtgctcgctatctatgcgtttatcgccatgctgctctgtttgctctccgccttcagcggcggccacgtcggtttgctggccctgaccctgtgcagcgcctttatgtccattcagtacccgaccatcttctcgctggggattaagcatctgggccaggacaccaaatatggctcgtcatttatcgtcatgaccattatcggcggcgggatcgttaccccggtgatgggctttgtcagcgacgccgccggcaatatcccgaccgccgaactggtcccggcgctgtgcttcgccatcatctttatttttgcccgtttccgttcacaagcggcgacgaactaa

SEQ ID NO: 136065 - DNA, 648 bp, Enterobacter cloacae
atggaaagaaacagactggcccggcagattatcgatacctgcctggaaatgacccgcctggggttaaatcaggggaccgccggcaatgtcagcgtgcgctatcagggaggaatgctgatcacccctaccggtatcccatatgaaaagctgacggaagacaagatcgtctttattgatgccgacggccagcatgagcagggaaaactgccctccagcgaatggcgttttcatcaggcggcctaccagacgcgacccggtgcccaggcggtggtccacaatcacgctgtccattgtacggcggtgtcgatcctcaaccggcccatcccggccatccactatatgatcgccgcggccggcgggaattcgatcccctgcgcgccctatgccaccttcggcacccgcgaactgtctgagcatgtcgcggtggcgctgaagcaccgcaaagccacgctgctgcagcatcacggcctgatcgcctgcgaggccagcctggagaaagcgctctggctggcgcatgaagtggaggtcctggcccagctctacctcagtacgctggcgattaccgacccggtcccggtgctggatgacgaggcgatcgccatcgtgctggagaagttcaaaacctacggattacgcattgaagagtga

SEQ ID NO: 136066 - DNA, 1149 bp, Enterobacter cloacae
atggcaaacagaatgatcctcaatgaaacggcatggtttggccggggggcgataaacgcattaaccgatgaagcggtgcggcgcggttatcgtaaagcattgatcgtcactgacagcactctcgcccgctgcggcgtggcggcgaaagtcaccgacaaactggatgccgccgggctggcatgggatatgttcagcgacgtgatccctaacccgaccatcgccgtggtccagcaggggctgcaggcctttcaacgcagcggggcggattacctgatcgccatcggcggcggttcgccgcaggatacctgtaaggcgatcggtattattcagcgtaacccggaattcgccgatgtccgtagcctcgaggggctgtcgcccacccgtcagcccagcgtgccgatcttcgcggtgccgaccaccgcgggtaccgcggcggaggtgacgattaactatgtcatcaccgatgaagaacagcggcgcaaattcgtctgcgtcgatccgcatgatatcccgcaggtggcctttatcgatgccgatatgatggacgctatgccgccggcgctgaaggcggctaccggcgtggacgccctgacgcatgctatcgaagggtacctcactcgcggcgcctgggctttgaccgatgctctgcacctcaaggccatcgagatcatcgccggcgcgctgcgcggctcggttgccggcgacgccggcgcgggggaagctatggcgctcggccagtatgtggcggggatgggattttccaacgttgggcttggcctggtgcacggtatggcgcatccgctcggcgctttttacaacacgccgcacggcgtggcgaatgccatcctgctgccgcacgtgatgcgctttaatgctgaggcgaccggggaaaaatatcgcgacatcgcccgggcgatgggcgtcagggtggaagcgttaagcctgaccgccgcgcgcgaggcggcagtagaggcggtctgccagcttaaccgcgatgtcggtattcccggccatctgcgcgaggtgggcgtcaggaaagaggatattccggcgctggcccaggcggcgctggcggatgtgtgtaccggcggcaacccgcgcgaggcgagcctggcggatatcgtcgggttatatcaggcggcctggtga

SEQ ID NO: 136067 - DNA, 756 bp, Enterobacter cloacae
gtggctgttcatctgttaatcgtcgacgcgttaaatctgatccgccgcatccacgcggtgcagggttcaccctgcgtcgatacctgcctgcatgccctggagcagctgattgtccacagtcagcccacccacgcagtggcggtgttcgatgatgaggatcgcgcccacggctggcgccaccagcgcctgccggagtacaaagccggccgcgcgccgatgccggagacgctggtggccgagatgccggcgctgcgggccgccttcgaacagcgggggatccgctgctgggcctcgccgggcagcgaagcagacgatctcgccgccaccctggcggtgaaggtggcccaggcgggccatcaggccaccatcgtctccaccgacaaaggctactgccagctgctgtcgcccaccatccgcatccgcgactactttcagaagcgctggctggacgcccccttcatcgccagcgagttcggcgtcaccccggagcagctggcggattactgggggctagcggggatcagcagctcgaaggtgccgggcgtggcgggcattggacccaaaagcgccgcccagctgctgaacgagtttcaggacctggaggggctgtacgcccgtctggccgaggtcccggagaagtggcgcaaaaagctggccgcgcatcaggagatggccttcacctgccgggaggtggcccgcctgcagaccgacctccagctggacggcaatctgcagcagctgcggctgacgcgctga

SEQ ID NO: 136068 - DNA, 1530 bp, Enterobacter cloacae
  misc_feature (1343)..(1352): n is a, c, g, or t
gtgaatgtccgggtgattgccgccacccacgttgacctggcccaggcgatccgcgagcgccgctttcgcgaggatctctactatcgactgaatatcgcggtggtgccgctgccgccgctgcgccagcgtcggcaggatatcccgctgctggcgcaccactttttatcactctacgcccggcgcctcgggcggccaaccctgcgtctggcgccggaatcactggcccggctgatggactattcgtggccgggcaatattcgcgagctggaaaataccctgcacaacgcggtgctgctcagtaaagaagaggagatcagtcctgcccagctgcgcctggcgacgctcaacgacgccccggggccggcgagcgatcatgaactggacgactttattcgccaccagttggcgcttcccggcgagccgctgtggcagcgagtgaccagcgccctgattcgccacgccatggcgcattgcgacgataaccagagccaggcggccgcgctgttggggatcagccggcataccttgcgcacccagctcgctaacctcgggctgatcaaaagccgccgccgcccgcctgcgccgccgcgggcgttcgccaacgcagccggggccgatcgcgaactgcgcattggctaccagcgcttcggcagcctcgggatcctgaaagcccgtcagagtctggaaaccgccttcgccagcctcggcgtcaacgtgctgtggagtgagtttcctgccggaccgcagctcctccacgccctcgcctgcaacgagatcgacttcggcaccaccggagaagcgccgccggtgtttgcccaggccagcaatagcgaactgatgtacgtggcgtgggagccgccggcgccgcgcagcgtggcgatggtcgtcccgcaggagagcgacattcgccagctcagcgatctgcgcggtaaacgcatcgccctcaataaagggtcgaatgtccactggctgctgctgcagatcctcgaggacgccggcctgggtctgaacgatgtgcgggtggtctataccccgccgaaatatccgctgaccgccagcgactatctggcggttgacgcctggatgatgtgggatccgctgctcagcgacgccgaacacaccggcgagctgcgggtggtcgccagcggcgaaggccgggtcaacaaccatcagttttatctttcgcgacgggactacctcgctcagcatggcgatatcatgcgccgcctgctgacggagctgacccacaccgggcagtttatcgactcgcatcgcggcgaagcggcccgcttactctcggcagagctggggatcgacgcccggtcgctgagcatggccctcgnnnnnnnnnncgcccgccgcagccatcgcccgcggccgatggatctgtcggtgatccgcgcccagcagaccatcgccgatcgcttttacgccctcgggcttatcgccaaaccggtcccggtgcgcgaagcggtgtggtacggcgaacccgcgccggacgtcatcagaccgctgatggcggtcagttag

SEQ ID NO: 136069 - DNA, 360 bp, Enterobacter cloacae
  misc_feature (339)..(348): n is a, c, g, or t
atgctgaacccagaatccccttccaccgctcccgcgctgatcgacccggcgtcgaaggccttccagagcctgctggacaaactcgcgccaacggaggcgaccgtgctgatcgtgggcgaaaccggcaccggcaaggaggtggtggcccgctatctccatcatcacagcgcccgtcgccagcagccgtttctggccgttaactgcggcgcgctgaccgagagcctcgccgaagccgaactgttcggccatgagaaaggcgccttcaccggcgcgcagcagggacagcccggctggtttgaagccgcggaaggggggacgctgctgctggacgagatcggnnnnnnnnnncgattaaagtga

SEQ ID NO: 136070 - DNA, 1173 bp, Enterobacter cloacae
atgacgcagcaagctcccgacaagatcaatgtcttctggttcttacctacccatggcgatggccgttatctgggtaccaccgagggtggacgcccggtcgatttaccttatctgcagcaggtggcgctggcagccgacagcctgggctactacggcgtgctgatccccaccggtaaaagctgtgaagattcgtggctggtggcctcggcgctggcgccgttgacccgccgtctgcgctatctggtggcggtcaggccgggcctgcagccgccaaccctggcggcgcggatggcggccaccctcgaccgtttatcggaaggtcggctgctgatcaacgtcgttaccggcggcgacccggtggaaaacaaaggcgacggtatcttcctcagccacagcgagcgctatcaggtgacccgcgaatttcttgatgtttacacccgcctgctgcgcggggaaaaagtggattatcacggcgagcatattcacgtggaaggcgctgaggtgttgttcccgccggtgcaggagaatggcccgccgctctatttcggcggctcttctgatgcggccattgatgtggcggccgagcagatcgacagctatctgacgtggggcgaacccccggaactggtggcggagaagctggcggtggtgcgcgagcgcgccgcggcccgcggacgcaccctgcagtacggcattcgtctgcatgtcattgtgcgcgaaacggaagaagaggcatgggccgccgccgaccggctgatcgcccatcttgacgacgataccattgcccaggcgcaaaagatcttcgcccgcatggactcggccggccaggcgcggatgagcgccctgcatcagggatcgcgcgataatctgcgcattgcgcccaatctgtgggccggcgtcggactggtgcgcggcggcgcgggtaccgcgctggtaggtaatccgcagcaggtagcggaacgcatccgcgaatatcaggcgctcggcatcagcaactttatcttctccggttacccacatctggaagaagcgcaccgctttgctgagctggtgatgcctctgttgccgctggaaaacggggcctcgtcgaaggcgcgtagcgtgaacaccggtccgtttggcgaaaccatcggcggcgataagcgcccggtgcgccaggtcagcgccagctga

SEQ ID NO: 136071 - DNA, 930 bp, Enterobacter cloacae
  misc_feature (884)..(893): n is a, c, g, or t
gtggcgcagcgttttgccgacgccgcggcgtccagcggcggacggcttcgccacctgcgcgatcgggcgctcgcttttcatcaggggacggtaaccaccgacggcggcctgcagcttaaggccgatctgctggtgctggcgatcagtcatccaccgccttcgctgccggcacaggccgaagcctggcgtcatcatccggcgctgattgccaacccgtggcagccaggcgcgctcgatgccatcgccccacacgcccgggtggcggtgatgggcaccggattaaccatggccgatacggtcgcgacgctggaccggctgggccaccgcggcagtatcgtcgccttttcgcgccatggcctgctgtcgcgcggcaaccttagcggcgcaggggcaacctggcctggcgactatcagcagggcagcctgcgccagcgcctgcgccagatccgcctcgacgtcgcgtatgcggcgcagcagggcctgagctggcaggtggtgctggatgcggttcgtcagcaggggcaacggatctggcaggcgctcagcgtcgccgatcgccagcgttttctgcgccatctgcgccattactgggatgtccaccgctaccgcgtggcgccgcaggtcgccgaggtgctggaggcgcgccagcgcacgggcagtctgcaggtgcaggcggccaggctactgtcgataagcggtgaaggcgaaacgctgcgtctgacgctggcgcggcgcggcggcggcgtgcagacgctgagcgtcgatcacctgatcctgaccaccggacccgcacaccgcgccctgaccgacagccagccatttttacaggacctcgcccgccgcggcctgattcgcgccgatgccctcggcatgggcctggaggnnnnnnnnnncgggatcccgcaggactcccgatgtcctgcgtactga

SEQ ID NO: 136072 - DNA, 1326 bp, Enterobacter cloacae
atgtcatcacaacgtgaaattcgtcttaacgctttcgatatgaactgcgtcggccatcagtcgccgggcctgtgggcgcatccccgggatcgctcctggcagtataaagatctggagtactgggtggatctggcgcggcttctggagcgcggcaagttcgacgggctgtttatcgccgacgtgctggggatctatgacgtgctgaacggcagcggcgatgcggcgatccgccaggcgacgcaggttccggtcaacgatccgctggctctgatcaccccaatggcgctggtgacggagcatctgggcttcggcctgaccgcctcgctgtcgtttgagcatccttaccccttcgctcgtcgtctgtcgacgctcgatcatctgaccaaagggcgggtgggctggaatattgtcacctcctatctggagagcggggcgcgcaatatcggccagcagacccagaccgaccatgacacccgctatgactatgccgatgagtatttgcaggtgatctataagttgctggagggaagctgggaggatggggcggtgctgcgcgacagagagcggaagatcttcagcgatccgcggaaaatccatcccattaaccatcagggacagttcttttccgtgccggggatccacctctgcgagccatccccgcagcgcacgccggtgctgtatcaggcgggggcgtccagccgcggcaaacagttcgccgccggccatgccgaatgcgtcttcgtcgcagcgccgtcgaaggtgctgctgaagaagacggtggcggatattcgccgccgggcagctgaggcggggcgcgatccgcacagcatcctgatcttcaacctgcagacggtaattgtcggcgacaccgaccgcgaggcacaggcgaagtggcaggaatataagcagtacgtcagctatgaaggcgcgctggcgctgctctccggctggacggggatcgatttcggccagtatcagccggatcaggtgctgaagtatctgcacaccaacgccattcagtcggcggtggaggccttttcgaccgctgatccgaaccgccagtggacggtgcaggccctggccgattgggcggggatcggcggcttcggtccgctggtggttggcagcgcgcaaaccgtggcggacgaactgcagtccctggtgcctgagctgcaaaagcgcggcgtctttaagcaagagtaccgcgaggggaccctgcgcgaaaaactgttcggcggcggcccgcgtctggccgcgcctcacccgggcgccagctaccgccgcgatgcgcgcacggcggcatcggtagaggagaaggtgacatga

SEQ ID NO: 136073 - DNA, 1023 bp, Enterobacter cloacae
atgatcgctattgatgacctgcataaaagttaccgcacggcggatggccggctcagcgcggtgctgaaagggctgtcgctgcaggtgcctgagcgctccatcaccgcggtggtggggccgagcggcgccggtaaatcaaccctggcgcgctgcatcagcctgctggagcaaccggacagcggcagcattcgtatcaatggccaggatctgtcggcgctgtccggcgaggcgctgcgccgggaacggcgggcgattggcaccgttttccagtcttcggcgctgttgagccgcaggaccgcctgggagaatgtcgccctgccgctggcgtggctgggtgtggtggagcgcgatatcaaggcgcgggttggcgagctgctggagagcgtcggcctgagccacaaagcggatgcctggccggcccagctctcaggcggccagcgccagcggatcggcattgcccgcgcgctggcgctgcgcccgtccgttctgctggcagatgaagccacctccggcctcgatcctcaggccacggcctcggtgctggctctgctcaagcggctgcgtgacgagtaccagctggcgatcgtcctgatcacccatgaaatggacgcggtgcgcacggcggcggatgcggtggcggagatccgcgacgggacgatcgtccagtacgggcggatcgaagatctgctggcgcgtcccgattctctgctcggccagcagctgttgccgctgacgccggcggcagctacccacagcgatctgctgctgcgtctgagctaccgctgggatgtgccggtggccaccgactggatcagccgcctgagccagcagtgggcgctgcagatcgatctccttggcggtcacgtcgaggtgattaatggtcggctggccggtcgcctgcaggccggagtgcgctttcagggcgaacgcctgtcgcccgcgcgactgcagggcctgctggcgcagctcggcataacggcggagatcctcgacagcgcgccgttgctcagggaggcggtatga

SEQ ID NO: 136074 - DNA, 699 bp, Enterobacter cloacae
atgaaaccgacagtcatcagtcaggataccccctggggcgaaatcccttcgctgctgctccccgcctatggcgaaacctggctgatggtggccattgtgatgctgtttgtcgtcacgctgggagggctggtgggggtggtgttgtttaatgcctcgccgcggggcttgtttccgcacgcactgctgtatcggctgctgaactgggtggtcaatatgggacgttcgctgccgtttctggtgctgatggccgccattatcccgttcacttactggctgaccggcaccacgattggcatccccgccgcggtagtgccgatgatcgccgccggcgtcccgttctttggccgtctggtggagaacgcgctgcgcgagttgccggcagaggttaccgcggtgggggtcgtctgcggcgggtcgcgctggcaaatcattgccagcgcgcagctcagtgaagccatgcccgcgctggtagcggcggtgacgctaaacctggtctcgatgatcgagtattcggctatcgccgggaccatcggcgccggcggcatcggctacctggccgtggtgtacggctatcagcgcttcgacaaccacatcatgatcgcgacgatcgttgccctgatcgccacgatccagttgattcaatttttgggtgaccgtctggtcaaccgtttacgccacacgcaggggaaccttgtatga

SEQ ID NO: 136075 - DNA, 879 bp, Enterobacter cloacae
atgacaacagagcaatttgagttacgtaaagcgcggcgctggccctggctggcggcgctggcggtgattatcctgctcgccatcgccttctggtggtggcggggacatacccaaagccagcaggtggtcttcggcagcacgttaaaaattcactacgagccggcgatggccggcgagcagcggatcattgagtatattaatcagcatattgctcccgattacggtctgaaactggaggcggtgggggtgcaggatccggtccaggctgaccgcgcggtagcggaaggtcagtatgccgggacgatctatcagcatcagtggtggcttaaacaggtggtggacgctaacggctttgcgctgtcgaccacggtgccggtgttccagtgggcgtttggcatctattccgaccgctactcgtcggtacaggcgttgcccaacggcgcgaccattgtcgtgcctgacgatggcgccaatcaggggcaggccctgtggctgctccagcgcattgggttgatctcgctcgacccggcggtggagccgcgcacggcgaagctgaaaaatattgtcggtaacccgcatcagtttgtctttaaagagctggatctgctgaccatgccgcgggcgttaaattcggtggatgccgccatcggctatgtctcgcaatttgacgccgggaaagtgccgcgtgagaaaggcatattattcccgccggcgccgcgcacctttgcttcgcaattagtgattggtacaccgtatttatcgcaggaaaatatcgtcaaattaaaacaggctttttctgacccgcggatccagacgtggttaaaaaccaccgatgacccgctggtaaaagacgtattagttccagtgtccgcggaataa

SEQ ID NO: 136076 - DNA, 1422 bp, Enterobacter cloacae
atgagtacattaccagtggataatcccggtatcgcttcggtaccggtcagtagcgtcggggatgtggcgcggctaattaattccggcaaggaacaagcgaaatatgcgcggatgattgtcttcctcgcgctggggggcgtttttctcgacgcatatgacttaaccacgctctcctacggtattgatgacgttgtacgtgaatttcagctctcaccgctgctgaccggcctggtgacttcgtccattatggtcgggactatcgtcggcaatattatcggcggctggctgaccgataaatatggtcgctattcggtttttatggccgatatgttctttttcgtgatttcggctatcgccgccgggctggcgccgaacgtctgggtgttgattggcgcccgcttcctgatgggcatcggcgttggcatcgacctgccggtagcgatgtcctatctggccgagttttcccgctttgccggcaaaggcaacaaagcggctcgcctcgcggcgtggtgcccgatgtggtacgccgcctcaaccgtctgctttctcattatcttcggcctctatttcctgctgccgcaggagcatcttgactggctatggcgcgcctccctgctgttcggcgccgtgccggcactgctgattattgccgtccgcagtcgatttatgaatgaatccccgctgtgggcggcgaaccagggcgatctgacctctgcagtgcgtattttacgcgactcctgggggatccatgcccatgaggtcccggcggcgaagcccgcgccagcgtcgaaagtgagcttccgcgtgctgttcgaaaaaacctaccgcgagcggactatcgtcgccggggtgatgaatatctgtatctccttcgagtacacggcgattgcctttttcctgccgtcaattcttgcccagttcctcggggctggcgtcttcgaaactatttcggcatcgctggggctgaacgccctgtttgcttttaccggtgggctgctcggtatgcatctggcgtggaaatatccttcgcgtcatgtggcgatagccggcttcgccctgcagtttgtggcgctgattgtgctggcgctggtggggcaaccgcacgcgacggcaggtatcgtgctggctatcgcgatgctggggctgtggctgttcgccgaagggtttggcccgggggcgcagctgatgatctacccggcgctctcctatcctactgccattcgcgccaccggggtcggtttcagccgggcactctccgggatcggcagcgcgctggcgttgtttattctgccgctgctgcaggcctccctcggcacgcagatgttctgggtggtctcgcttgccgccattattcccattttcttcctgctggcggtccgtcatgaaccgacgcgagaagatatcgacgcacttcatgaataa

SEQ ID NO: 136077 - DNA, 228 bp, Enterobacter cloacae
atgaccctgctctctactggcaccgattatgacgcgctggcggccgccttccgcccgatattcacccgtatcgcccagggcgctgcggagcgcgaacagcagcgcattctgcccgatgagccgatccgctggctgaaagaagcgggcttcggcacgctgcgtagcaagcggactctaacctgccgcaggccctgcgcgcgcactttgcctttgtggaagatcagctga

SEQ ID NO: 136078 - DNA, 945 bp, Enterobacter cloacae
gtggaagatcagctgaatcagccggattccgccgggcgcgaccgctggtttcgtcgcttcctcgacggtgagctggtgggcagcggctggacggagatcggcgcggttaagctgggagaggtgaacaccagagtgacgccgacagagggcggctggcgactcgacggcgagaagttttacagcaccggcgcgctgtacgccgactggatcgatgtgtttgcccggcgcagtgataccgccagcgatgtgatagccctggtcagcacccagcagaccggcgtggtgcgggaagatgactgggatggctttggccagcggttgaccggcagcgggaccacccgctttaccggcgctcgggtggaaaccgaacatgtctatgattttgcccagcgctttcgctatcagaccgccttctaccagcatgtgctgctggcgaccctcgcgggcattggcctggcggttgagcgggatgccgcgcagggcgtcaaacatcgctcccggatgtacagccacggcaacgccgccgtgccgcgcgatgacgcccaggttctgcaggtcgttgggcagatcagcagctgggcatgggcgacccgggccgcggtcttgcaggccgcggaatcgctgcagcaggcctatgtggcgcacgtcagcgacgacgaagcattgattgcccggcgtaaccagctggcggaagtggaagcggcgcaggcgcaggtgatcgccagcgactggatcccgcgggcggcgacggagctgtttaatgccctcggggcgtcggatacgcgaactcgccttgcgctggatcgccactggcgcaatgcgcggacggttgcctcgcataatccggtgatttataaggcacgtaatatcggtaactggctggtgaacggtgaagcgcccacctttatctggcagataggcaatggtgagaaaacggcggggtaa

SEQ ID NO: 136079 - DNA, 1191 bp, Enterobacter cloacae
atgaaaatcaaaactggcgctcgcatcctcgcgctgtcggcactgaccacgatgatgttttccgcctctgccctcgcaaaaattgaagaaggtaagctggttatctggattaacggcgacaaaggctacaacggcctcgctgaagtgggtaaaaagtttgaaaaagacaccggcattaaagtttccgtagaacacccggacaagctggaagagaaatttccgcaggttgcggcgaccggcgacggcccggacatcatcttctgggcgcatgaccgtttcggcggctacgcgcagtcgggcctgctggcggaaatcaccccggacaaagcgttccaggacaaactctatccgttcacctgggatgcggttcgctataacggcaaactgatcgcctacccgatcgcagtcgaagccctgtccctgatttacaacaaagacctggtgccgaacccgccgaagacctgggaagagatcccggcgctggataaagaactgaaagcgaaaggtaagagcgcgctaatgttcaacctgcaggaaccgtacttcacctggccgctgatcgctgccgacggcggatacgcgttcaagtttgaaaacggcaagtacgatgtgaaagacgtcggcgtggacagcgcaggcgcgaaagcgggcctgaccttcctggttgacctgatcaagaacaagcacatgaatgccgacaccgactactccatcgcggaagctgccttcaacaaaggcgaaaccgcgatgaccatcaacggtccgtgggcgtggtctaacatcgataagagcaaggttaactacggcgtgaccctgctgccaacctttaaaggcaaaccatcgaaaccgttcgttggcgtgctgagcgcggggatcaacgccgccagcccgaacaaagagctggccaaagagttcctcgaaaactacctgatgaccgatcagggtctggaagccgttaacaacgacaaaccgctgggtgccgtggcgctgaaatccttccaggaaaaactggaaaaagatccgcgcatcgctgccaccatggcgaacgcccagaaaggcgaaatcatgcctaacatcccgcagatgtctgccttctggtatgccgttcgtaccgcggttatcaacgccgccagcggtcgccagactgtcgatgctgcgctgaaagatgcacagagccgtatcactaagtaa

SEQ ID NO: 136080 - DNA, 1110 bp, Enterobacter cloacae
atggcgagcgtacagctgcgaaatgtaacgaaagcctggggtgacgtggtggtatcgaaagatatcaatctcgatatccacgaaggggaattcgtcgtgtttgtcgggccatcgggctgcggcaaatctaccctgctgcgtatgattgccgggttagaaactattaccagcggggacctgtttatcggtgacacccgcatgaacgagatcccaccggcagaacgcggcgttgggatggtattccagtcttatgcactctatccccacctttccgttgcggaaaatatgtcgtttggcctgaagctggccggcgcgaaaaaagatctgattaaccagcgggtgactcaggttgcggaagtgctgcagctggcccatctgctggagcgtaaaccgaaagccctctccggcggtcagcgccagcgcgtggcgattggtcgtacgctggtggcagagccaagcgttttcctgctggatgagccgctttccaacctcgatgccgccctgcgcgtccagatgcgtatcgaaatctcccgtctgcataagcgactgggccgcaccatgatctatgtcacccacgatcaggtggaagcgatgaccctcgccgacaagatcgtggtcctcgacgccggccgtgtggcgcaggttgggaaaccgctggagctctatcactatccggctgaccgcttcgttgccggcttcattggttcaccgaagatgaacttcctgccggtcaaagtcaccgcgacggctatcgatcaggtgcaggttgaactgccgaaccgtcagcaaatctggctaccggtggacagcgccaacgtgcaggcgggcgccaatatgtccttaggtattcgaccggagcatttactgcccagcgatatcgccgatgtaacccttgaaggcgaggtccaggtcgtcgaacagctcggtcacgaaacgcaaattcatatccagatccccgccatccgtcagaacctggtttaccgccagaacgacgtggtgttggtagaagagggagccacattcgctatcggtttgccgccagaacgttgccatttattccgtgaggatggcaccgcttgtcgtcggctgcataaagagccgggcgtgtaa

SEQ ID NO: 136081 - DNA, 1299 bp, Enterobacter cloacae
atgatgattactctgcgcaaacttcctctggcggtcgccgtcgcagcaggcgtgatgtctgctcaggcgctggctgtcgatttccatggctacgcgcgttccggcattggctggaccggcagcggcggcgaacagcagtgtttccaggctaccggcgcccaaagtaaataccgtcttggtaacgaatgtgaaacttacgccgaattgaaactgggccaggaagtctggaaagaaggcgataagagcttctactttgacaccaacgtcgcttactcggtatcgcaacagaacgactgggaatccactaaccccgctttccgtgaggtgaacgtacagggtaaaaacctgattgactggctgccgggctccacgctgtgggcaggtaagcgcttctatcagcgtcatgacgtccacatgatcgacttctactactgggatatctctggtccaggcgccggtattgaaaacattgatctgggcttcggtaaactgtctctggcagcgacccgttcttctgaatccggtggctcggcaacctatgcagaccgcgatccgctgactggtgaccgtgtttacgatcatctggtaccaaacgacgtattcgacgtgcgtttagcgcaaatggaaaccaacccaggcggtacgctggagctgggcgtggactatggccacacgaacattcctgacgactactacctgcaaccgggtgcatctaaagatggctggatgttcaccgcggaacatacccagagcatcctgaaaggctacaacaagtttgtgctgcaatacgcgaccgatgccatgacctccaacggtaaaggcgtaccgcagggcggcagcattaacaacgatggctccatgtggcgtgtgcttgaccacggcgcggtttctctggcggatgattgggacatgatgtacgtcgccatgtatcaggacgtcgatctggacaacaacaacggtactaagtggtggaccgtcggcgtgcgtcctatgtacaaatggacgccgatcatgagcaccctgcttgaagtcggttacgacaacgtcaagtcgcagaaaacgggcgacagcaacaaccagtacaaaatcaccctggcgcaacagtggcaagcgggcgatagcatctggtctcgtccagccattcgtctgttcgcaacctatgcgaagtgggatgagaagtggggttacactgacagcggcgtggccatgcgcgatacctctggtaccggcatcaacacttccagccgcggcgatagcgatgagtggaccttcggcgctcagatggaaatctggtggtaa

SEQ ID NO: 136082 - DNA, 924 bp, Enterobacter cloacae
atgaatatgaagaaaagtctcgttgccctctgcctgtccgccggcctgctggccagcgtacccgcagtcagttttgctgatgtgaattttgtgccgcagaacaccgctgccgcaccgtctattccggcctccgcgctgcagcagctcacctggacaccggtcgatcaatcgaaaacccaaacctctaaagtggcgaccgccggacaaacgctgaatgtacccggcatcaccgggccggtggtggcctatagcgtaccggcaaatattggcgagttaaccctaacgctgaccagcgaagtcgacaaacagaccagcgtctatgcgccaaacgttctgatcctcgatcagagcatgacgccgtctgccttcttcccgagcagctatttcacctatctggaaccgggcgtgatgagcgccgaccgactggaaggggtgatgcgcctgacgccggcgctgggacagcagaaaatttatgtactggtgtttaccaccccgcaggacctgcagcagaccaccaaattaatcgacccggcgaaagcctacgcgaaaggcaccggtaacgcggtaccggatattccggatcctatcgctaaacataccactgacggcacgctgagcctgaaagtgaagacctcttcgagctccagcgtactggttggcccgttgttcggctcctccggcccgggtccggtaaccgtcggcaacaccgcggcgccggtagccgcgccagccgccgccgcggcgccggccgccaaaagcgaaccgatgctcagcgataccgaaacctacttcaacaatggtattaagcaggcggtgaaacaaggtgacatcgacaaagccctgaaattgatgaacgaagctgagcgcctcggctcgaaatccgctcgttccacctttatcagcagtgtaaaaggcaaggggtaa

SEQ ID NO: 136083 - DNA, 498 bp, Enterobacter cloacae
atgtcccatcctgcgcttacgcgactgcgtgcgctgcgctattttgccgttatgccatccctgccgccgccgctaagtgactggctgctgctggaggactcaatgacccagcgctttgaacaacaaggaaagcaggtcaccgtgaccctggttaacgaagggtatatcggccgtgacgcgctgactgacgaagcggcgctgctgcccgacgagccgcgctactggctgcgggagattatactcaatgccgatggcgagccctggctggccgggcgcacggtggcgccggagtcgacgctgtgtggtccggagctggcgctacagcagctcgggcaaactccgctgggccgatacctgtttacgtcgtcgacattaacccgcgattttattgaaattggtcgcgatgcagcgctgtgggggcgtcgttcccgcctgcggctgagcggcaaacccctgctgctgaccgagctttttttgcctgcgtcgccgttgtactaa

SEQ ID NO: 136084 - DNA, 867 bp, Enterobacter cloacae
atggagtggagtctgtcgcagaataagctgttggcgtttcatcgcctgatgcgcactgacaaaccgatcggcgctttgctgctgctgtggccgacgctgtgggcgctatgggtggcctcgccgggcgtcccgccgctgtggatcctggcggtattcgtcgccggcgtctggctgatgcgcgccgccggctgcgtggtgaatgactatgccgaccgaaaatttgatggtcacgtaaagcgtaccgcccgccgtccgctgccgagcggcgatgttaccgagaaagaggcgcgaacgctgtttatcgtgctggtgctgctctctttcctgttggtgctcaccctcaacaccatgaccattctgctgtcggtggcggcgctggcgctggcgtgggtctatccgtttatgaagcgctacactcatctgccgcaggtggtgctgggcgcggcctttggctggtcgatcccgatggccttctcggccgtcagcgaatcgctaccgctgagctgctggctgatgttcctcgccaatattctgtgggcggtggcctacgatacccagtatgcgatggtggatcgcgatgacgacgttaagatcggcatcaagtcgacggcgatcctgtttggcgaaaacgatcgtctgattatcggtatcctgcaggtggccgtactggcgctgatgggcgcggtgggttggctgaatgggctgggctgggaatattactggtcgctgttcgtggcggcgggtctgtttggctggcagcagaagcttatcttcaatcgcgaccgcgataactgcttcaaagcgtttatgaacaataactacgtcgggctggtgctgttcctcggcctggcgatgagctacctgtaa

SEQ ID NO: 136085 - DNA, 2424 bp, Enterobacter cloacae
atgtccggctggcaacgaatttactataaattactgaatttaccattacaggtgctggtaaaaagcaagtctattccggcagagcctgcccaggaattaggactcgatacctcgcgtccggtcatgtacgtcctgccctataattcgaaggcggacctgctgacgctgcgcgcccaatgcctggcgcatgatttacctgacccgcttgaaccgctggaaatcgacggcgccctgctgccgcgttacgtattcatccacggtgggccgcgcgtatttacgtattacacgccaaaagaagagtccatcaagctgttccacgattacctcgatctgcaccgcaaccatccggacctcgatgtgcaaatggtgccggtttcggtcatgttcggccgttcgccgggtcgcgagaaaggagaagtcaatccgccgctgcggatgctgaacggcattcagaaatttttcgccgtctcctggctcggccgcgacagcttcgtgcgcttctcgccgtccgtttcgctgcgccgcatggcggatgagcacggtaccgataagatcatcgcccagaagctggctcgcgtcgctcgcatgcattttgcccgccagcggctggccgccgttggcccgcgtctgccggcccgccaggatctgtttaataaactgctggcctcgaaagcgattgcccgcgcggtggaagacgaagcgcgcagcaagaaaatttcgcacgagaaggcacagcagaacgctatcgcgctgatggaagagattgcggcgaacttctcatacgagatgatccgcctgaccgaccgcattctcggcttcacctggaaccgcctgtaccagggcatcaacgtgcataacgccgagcgcgtacgccagctggcgcacgacggccatgaaattgtctatgtcccctgccaccgcagccacatggactatctgctgctctcctacgtcctgtaccatcaggggctggtccctccgcatatcgcggcgggcatcaacctcaacttctggccggccgggccgatcttccgccgcctcggcgccttctttattcgccgcacctttaagggcaacaaactctattccaccgtgttccgcgaataccttggcgaactgttcagccgcggctattccgtggagtatttcgtcgaaggcggccgctcccgtaccggccgcctgctcgatccgaagaccggtacgctgtcgatgaccatccaggcgatgctgcgcggcggaacccgaccgatcaccctggtgccgatttacatcggctatgagcacgtgatggaggtaggaacctacgccaaagagctgcgcggcgccactaaagagaaagagagtctgccgcagatggtgcgcggtttaagcaagctgcgcaacctgggccagggttacgttaacttcggcgaaccgctgccgctgatgacctatcttaaccagcatgtgccggattggcgggaagcgatcgacccgatcgaagcggttcgcccctcctggctgacgccgacggtgaatagcatcgccgctgacctgatggtgcgcatcaataacgccggcgcggccaacgccatgaacctgtgctgtacggcgctactggcctcccgccagcgttcgctgacccgtgagcagctcacccagcagttagagtgctacctcgcgctgctgcgcaatgtgccctattctccggatgcgaccgccccatccgcttcggccagcgagctcatcgatcatgcactgcagatgaacaagttcgaagtggagaaggacaccattggcgacatcatcatcctgccgcgcgagcaggcggtgctgatgacctactatcgcaacaatatcgcccatatgctggtgatgccgtcgctgttagccgctctggtgactcagcatcgtcatctcagccgcgccgaagtgctgcgtcatgtggaaacactctatccgttcctcaaggccgagctgttcctgcgctgggaaaaagcggagctggccggagtggtggatgcgctgattgccgagatgctgcgtcaggagctgatcgtcgtcgatggcgatgtcatgagcctcaacccgtcgcactctcgctccctgcagctgctggccgctggcgcccgcgagacgctgcagcgctatgccatcaccttctggctgctgagcgctaacccggcgatcaaccgcagctcgctggaaaaagagagtcgcaccgtggcccagcgtctgtcggtgctacacggcatcaatgcgccggagttcttcgacaaagcggtgttcagcaccctggtgttgaccctgcgcgatgaaggctatatcagcgacaccggcgacgccgagccggaagagaccctgaaggtttatcggatgctggcggatttgattacgtcggatgtccgactgaccattgagagcgtcacgcaggacgacgcgtaa

SEQ ID NO: 136086 - DNA, 609 bp, Enterobacter cloacae
atgaaagcgttaacgaccaggcagcaagaggtgtttgatctcattagggatcatatcagccagacgggcatgccgccgacgcgtgcggaaattgctcagcgcttggggttccgttccccaaacgcggcggaagaacacctgaaagcgctggcgcgtaaaggcgcgatcgagatcgtctccggcgcttctcgcggtattcgcctgctgacggaagaagagcaaggcctgccgctgatcggccgcgtcgccgccggtgagccgctgctggcgcagcagcatattgaaggccactatcaggtcgacccgtcgatgtttaagcccaacgccgatttcctgctgcgcgtcagtgggatgtcgatgaaagacatcggtattctggatggcgatttgctggcggtccacaaaacccaggatgtgcgtaacggccaggtggttgtcgcgcgtatcgatgaagaagtgacggtgaagcgcctgaaaaagcagggcaatgtcgttgaactgttgccggaaaacagcgagttttccccgatcgtcgtcgatctgcgccagcagagttttaccattgagggtctggccgttggcgtgatccgtaatggagaatggctgtag

SEQ ID NO: 136087 - DNA, 1200 bp, Enterobacter cloacae
atgctgctcaacgctgccgataaagcgctgtggcgtcttgccctccctatgattttctccaacatcaccgtcccgctgctggggctggtggatacggcggtgatcggccacctggacagcccggtatacctcggcggcgtagcggtcggggcgacggccaccagtttcctcttcatgctgctgctgttcctgcgcatgagcaccaccgggctcaccgctcaggcctggggcgccaaagatccgcagcgcctggcgcgggcgctgagccagcgaatttcgagaaaccgtctcgcctgcttgctgattatcctgcttcgcctgccgctaattgacctcgctctgcatattgtcggcggcagcgaggcggtgcttgagcaggcgagacggtttctcgaaattcgctggctcagcgcccccgcctcgctggccaacctggtgctgctcggctggctgctgggcgtccagtacgcccgggcgccggttattctgctggtggtgggtaatctgttgaatattgtgctcgatctgtggctggtgatgggcctgcggatgaacgtccagggagcggcgctggccacggtcaccgcggagtacgccaccctcattattggcctgctgatggcgaagcgggtgctgacgctgcgcggcgtgtcgctggcgatgctgaaaagcgacatcgtggcggttaacgccgtactgatgaccatgctgacctttaccgcctacgcgctggatggctttgcctatgccgtggaggctcactccggccaggcttacggcgcgcgcgacggtagccagttgctggaggtgtggcgggcggcctgccggcagtccggcatggtggcgctggcgtttgccctgatttacagcctggcggggcagtacattatcgcgttgttaacctcactgccttccctgcagcagctggccgatcgctatctgatctggcagacgatcctgccggtggtcggcgtctggtgctatctgctggacggcatgtttatcggcgcgacgcgcggcgctgagatgaggaacagtatggcggtcgccgcggcggggtttgccgtgacgctgcttacgctaccggtgcttggcaaccatggtctgtggctggcgctggcggtgttcctcgccctgcgcggcctgtcgctggcgctgatctggcgtcgtcactggcgacgcggcacatggtttagttag

SEQ ID NO: 136088 - DNA, 210 bp, Enterobacter cloacae
atgaataaagacgaaatcggcggtaactggaaacagtttaaaggtaaagccaaggaacagtggggcaaacttaccgatgatgatatgaccgtaatcgaagggaagcgcgaccagctggtcggcaaaattcaggagcgttacggctatgagaaagatcaggctgagaaagaagtctcagactgggagcataagaacgactatcgctggtag

SEQ ID NO: 136089 - DNA, 516 bp, Enterobacter cloacae
atggataagaccccttcgcaagagatgttagcgcatgctgaaaagctttgcgcacagcgcggcgtacgcctgactccacagcgtctggaagtgttgcgcctgatgagcctgcagcaaggggcaatcagcgcctacgatctgctggacttgctacgtgagaaagagccgcaggcgaagccgccgacggtttaccgtgcgctggagtttttactcgagcagggttttgtccataaggtagagtcaaccaatagctatgtgctgtgccatctgttcgaccagccgacccatagctcggccatgtttatctgcgaccgctgcggcgtggtaaaagaagaggcggcggaaggggtggaagatatcatgcatacgctggcggcccgcatggggttcgccctgcgccacaatgtgatagaagctcacgggctttgcgcgggctgcgtggaagtcgaagcctgcagcaccccgggacactgccagcacgatcatactattcagctcaaaaagaaagcccgctga

SEQ ID NO: 136090 - DNA, 489 bp, Enterobacter cloacae
atgaaacgacctgattgcattcgccactggcgcgaactggaagggcccgacgatgctacttatcccgacagcccggagcgtttttcaatcggagcgccgctggggcgaggtttacgtctcaaccggctggggatccaccacgagcggctgccgcccgggcggcgcacctcttatccacacgcggagagcgatgaggaagagttcatctacgtgctggagggctatccggaagtgtggataaacggctatctctggaagctggagcccggcgacagcgtgggttttcccgctggtaccggcatctgccacacctttctcaataacaccgagcaggaagttcgtctgctggtggtgggcgaggccaacaagaagtacaaccgcatttattacccgctcaatcccggctatgccgcgacgcgccaggatcgttgggttgaccatccgccgcagttcttcggtccacacgacggtaagccgcggaaaaagtaa

SEQ ID NO: 136091 - DNA, 942 bp, Enterobacter cloacae
atgctcgactggaccgaccgacactgccgctacttcctgcggctgctgtcgcggcatacgctgctgtataccgaaatggtgaccaccggggcgattattcacggcaaaggggactatctggcctatagcgaagaagagcacccggttgctctgcagctcggcggcagcgatccccaggccctggcgcagtgcgcgaagctgaccgaggcgcgcggctatgatgagatcaacctcaacgtcggctgcccctccgaccgcgtgcagaacgggatgtttggcgcttgcctgatgggcaatgcgccactggtggccgactgcatcaaagcgatgcgcgatgtggtgtcgattccggtcacggtgaaaacccgtatcggcattgatgaccaggatagctatgagtttctgtgcgatttcattgagacggtctccggcaagggcgagtgtgagatgtttattattcacgcccgtaaagcctggctctccgggctgagcccgaaagagaatcgcgagatcccgccgctggattacccccgcgtctggcagctgaagcgcgatttcccccaccttacgatggcgatcaacggcggcatcaaatcgctggacgaagccagagtacagcttgagcatatggatggggtgatggtcgggcgtgaggcctatcagaacccgggcattctggcctcggtcgaccgcgaaattttcggcgtcgccggcgcggatgccgatccggtagcggtggtgcgagccatgtacccctatattgagcgcgagctcagcaagggcacctatctgggccatattacccgccatatgctggggctgtttcaggggatccccggcgctcgccagtggcgtcgctacctgagcgaaaatgcgcataaagccggcgccgatattgcggtgctggagcatgccctgaagctggtggccgataaacgttaa

SEQ ID NO: 136092 - DNA, 243 bp, Enterobacter cloacae
atgctggaactgctatttgtcattggattttttgtcatgctgctggtcaccggcgtatcgctgctggggattatcgcggcaatcgtggtggcgacggcgctgatgttcgtcggcgggttgttcgccttgatgatcaaattactgccgtggctgctgctggcggtggcggtggtgtggattattcgggcgctgaaatccccgaacggaaatgcttttcgcgacaataaccgttggcgttactaa

SEQ ID NO: 136093 - DNA, 984 bp, Enterobacter cloacae
atggcaacacgcatcgaattttcgaaacacgggggaccggaggtgcttcaggcggttgagttcacgccacgcgatcccgcagaacatgagattcaggtcgaaaacaaagccatcggcatcaactatatcgacacctatgttcgcagcggcctctatccgccgccgtcgctgccgagcggcctgggcaccgaggcggccggcatcgtcagtaaagttggccatggggtcacgcatattaaggtaggcgatcgggtggtgtacgcccagtcggcgctcggcgcctacagcacggtacacaatgtgctggccgacaaagcggcggtcctgccggacgctatctctttcgaacaggccgccgcgtcgttcctcaaaggattaacggtctggtatctgctgcgcaaaacctatgaaattaagcctgatgagatgttcctgtttcacgcggccgctggcggcgtggggctgatagcctgtcagtgggcgaaagcgctgggggcgaaacttatcggtaccgtcggcagctcgcagaaagcgcagcgcgccaaagaagcgggcgcctggcaggtgattaactatcgcgaggagtctatcgtggagcggctcaaggcgctcaccgacggtaagaaagtggccgtcgtctacgactcggtggggaaagatacctgggaggcctctctggactgtctgcagcgccgcggcctgatggtcagctttggtaactcctccggtccggtgaccggcgttaatctggggatcctgaatcaaaaaggctccctgtacgtcactcgcccatcgctgcagggctatatcaccaaccgggaagaactggaggaagcctgcagtgaattgttttcgctgatcgccagcggggtgattaaagtggacgtggctgaaagtcagatctatccgctgagcgaagcgcggcgggcgcatgaagttctggagagccgggtgacgcagggttcgagtttgctgctgccataa

SEQ ID NO: 136094 - DNA, 1416 bp, Enterobacter cloacae
atggcaggaaataaacccttcaacaaaccacagacagaaacccgcgaacgcgatccgcagctcgccgggctgaaagtcccgccgcactcgattgaagcggagcagtcggtgttgggcggtttaatgctggataacgagcgctgggacgacgtcgccgaacgcgtcgttgccgacgacttttatacccgtccgcaccgtcatatttttaccgagatggcgcgcctgcaagagtccggcagtccgattgacctgattacgctcgccgagtcgctggagcgtcaggggcagctggacagcgtgggcggcttcgcctatctggccgaactgtccaaaaatacgcccagcgcggctaacatcagcgcctatgccgacatcgtgcgcgaacgcgcggtggtgcgcgaaatgatttcggtggccaacgagatcgccgaagccggcttcgacccacaggggcgaaccagcgaagatctgctcgacctcgccgaatcccgggttttcaaaatcgccgaaagccgggccaacaaagacgaagggccgaagaacatcgccgatgtcctcgatgccaccgtcgcccgtatcgaacagctgttccagcagccccatgacggcgtcaccggggtcaacaccggctacgacgacctcaacaaaaagaccgccggcctgcagccgtcggatctgattatcgtcgccgcccgtccatcgatgggtaaaacgaccttcgcgatgaacctcgtggaaaacgcggcgatgctgcaggacaagccggtattaatctttagtctcgagatgccctcggaacagatcatgatgcgttctctggcctcgctgtcgcgcgtcgatcagacccgcattcgtaccggtcaactggacgacgaagactgggcgcggatctccggcaccatgggcatcctgctggaaaagcgcaatatctatatcgatgactcctccggcctgacgccgacggaggtgcgctcccgcgcgcgccgtatcgcccgcgagcacggcggcatcggactgattatgatcgactacctgcagctgatgcgcgtgccgtcgctctccgacaaccgtacccttgagattgccgaaatctcccgctcgctgaaggcgctggcgaaagagctgcaggtgccggtggtggcgctgtcgcagcttaaccgctcgctggaacagcgcgccgataagcgcccggtcaactccgacctgcgtgagtccggctctatcgaacaggatgccgacttaatcatgttcatttaccgtgatgaggtctatcacgagaacagcgatcttaaaggcatcgcggaaattatcattggtaaacaacgtaacggcccgatcggcaccgtgcgactgacctttaacggccagtggtcgcgtttcgataattatgccggtcctcagtatgatgatgagtaa

SEQ ID NO: 136095 - DNA, 1080 bp, Enterobacter cloacae
atgcaagcggcaactgcagttatcaaccgccgcgctctgcgacacaacctgcaacgtctgcgtgaactggcgcccgccagcaaactggttgcggtagtgaaagcgaacgcctacggacacggtcttctcgagaccgcgcgaacgctgaccgacgccgacgcctttggcgtcgcccgcctggaagaggcgctgcgcctgcgagcggggggcatcgcccagccgatcctcctgctggaaggcttttttgctgcggaagacctggcggtgatcgccgcccagcgcctgcatacggcggtgcatagccccgaacagctggcggcgctggagcaagccgatctccccgagccggtgaccgtgtggatgaagctggataccggcatgcatcgcttaggggtgcgcccggaggaagccgaggcgttttatcagcgtctgagccagtgtaaaaacgtccgccagccggtgaacgtggtgagccacttcgcgcgcgccgatgagccgacctgcggcgccaccgaacgccagctggatatcttcaccacctttaccgaaggcaagccgggcttgcgctctatcgccgcctcgggcggcattctgctgtggccgcaatcgcattacgactgggtgcgccccggaattatcctgtatggcgtgtcgccgctggacgatcgctccaccgggaaagatttcggctgccagccggtgatgaccctgacgtccagcctgattgcggtgcgcgagcataaagcaggggagcccgtcggctacggcggcacctggatcagcgaacgcgatacccgtctcggcgtggtggcgatgggctatggcgacggttatccgcgcgccgcgccgtcgggcacgccggtgctggtcaatggccgggaagtgccgattgtcggccgggtggcgatggatatgatctgcgttgacctcggaccgcaggcccaggataaagccggcgacgcggtagtgctgtggggagaggggctcccggtagagcgcatcgccgagatagcgaaagtgagtgcttacgaacttattacgcgactgacctcccgcgtcgccatgaaatacctcgactaa

SEQ ID NO: 136096 - DNA, 1194 bp, Enterobacter cloacae
gtgtttcaaaaagttgacgcctacgccggcgaccctattctttctctgatggaacgcttcaaagaagacccgcgaagcgacaaagtcaacctgagtatcgggctgtactacaacgatgacggcattatcccgcagctgcaggcggtggcggaagcggaagcacgcctgaacgccgagccgcatggcgcctcgctgtatctgccaatggaagggttgagcggctaccgtcaggcgattgcgccgctgctgtttggcgcagagcataccgcgcttaagcaaaatcgcattgcctctattcagacggtcggcggttcgggcgcgctgaaggtcggggccgacttcctcaaacgttactttcctgagtctcatgtctgggtcagcgatccgacctgggaaaaccacatcgccatttttgaaggggctggcttcgaagtaagtacttacccctggtttgataaagccaccaacggcgtgcgctttgaggacctgctggcgacgctgcaaacgctgccggcgcgcgatattgtgctgctgcacccttgctgccacaacccgaccggcgccgacctgacgccagcccagtgggaccgcgtggttgaggtattgaaagcgcgtcagctgatccccttcctcgacatcgcctaccagggctttggcggggggctggaagaggatgcctacgctattcgcgccatcgccagcgccgggatgccgatgctggtcagcaactcgttctccaaaattttctcgctgtacggggagcgcgtcggcggtctgtccgtggtctgtgaagacagcgaaaccgcgggccgcgtgctggggcagctgaaggccaccgtgcgccgcaactactccagcccgccaagctttggcgcgcaggtggtggcgacggtgctgaacgatgcagctctgaaagccacctggcaggcggaagtggacgccatgcgcgcgcacatcctgaccatgcgccaggcgctggtcgacgcgctgcagcaggttgccccgggtagcaaagtggattacctgctcaagcagcgcgggatgttcagctataccggatttagcgcggcgcaggtggatcgtctgcgcgatgagtttggcgtctacctgattgccagcggacgcatgtgcgtggcggggttaaactcacgtaatgttcagcaggtagcgaaagcttttgccgcggtaatgtaa

SEQ ID NO: 136097 - DNA, 714 bp, Enterobacter cloacae
atgcgcaaacttactctcgcccttgcggcggcttctctcctgttcacgctgaacagcgccgttgtggcgcgcgcctccacgccgcagccgctgtgggtcggcaccaacgtggcccagctggccgagcaggcgccgatccactgggtttcggtggcgcaaattgagaacagcctgctggggcggccgccgatggccgtcggctttgatatcgatgacaccgtcctcttctccagtccgggtttctggcgcgggcaaaaaaccttctctcccggcagcgaggattacctgaaaaacccgcagttctgggaaaaaatgaacaatggctgggatgaattcagcatgccgaaagaggtggcgcgccagctgattgcgatgcatgtgaagcgcggggacagcatctggttcgtcaccggccgcagccagaccaaaaccgaaaccgtttctaaaaccctgcaggatgattttctcatcccggccgccaatatgaatccggtgattttcgctggcgataagcctggccagaacaccaagacccagtggctgcaggcgaagcagataaaggttttctacggcgattcggataacgatatcaccgccgcccgcgaagcgggcgcccgtggcatccgcgtgctgcgggccgccaactcctcctataagccgttgccgatggctggcgcgctgggcgaggaagtaatcgtcaattccgaatactga

SEQ ID NO: 136098 - DNA, 417 bp, Enterobacter cloacae
atgtggtatcagcaaaccctgacgcttgggccaaaatcccgcggttttcatctggtcactgacgaaatccttggccagatccgcgggctgtccggggtgaaggttggcctgctgcacctcctgctccagcatacttccgcttccctgacgctcaacgaaaactgcgatcccaccgtccgctatgacatggagcagtattttctcaacgccgtaccggacaatgcgccgtatgaacatgactatgaaggccctgacgatatgccgtcgcacatcaaatcatcgatgcttggcgtgtcgctaatgctgccggtcgaggacggacgcgtcaggctgggaacctggcagggcatctggctgggggagcatcggatacacggcggttcgcggcgcatcgttgcgacgctcatgggggaataa

SEQ ID NO: 136099 - DNA, 357 bp, Enterobacter cloacae
atgacaatttcggagttattacagtactgcatggcgaaaccgggagcagagcagagcgtccacagcgactggaaagccacgcagattaaggtctcagacgtgctgtttgccatggtgaaggaggttgaggaccagcggccggcggtcgcgctgaaggcgagtccggagctggctgagctgctgcgtcagcagcatcgcgatgtccggcccagccagcatctcaataaagcgcactggagcaccgtctatctggatggctcgctgccggattcgcaaatctactacctggtcgatgcgtcttatcagcaggcggtgaaaatgctgccggagccggtccggcagcagcttacccgctaa

SEQ ID NO: 136100 - DNA, 2826 bp, Enterobacter cloacae
atggataagatcgaagttcggggcgcccgcacccataatctcaaaaacatcaacctcgttatcccgcgcgacaaactcattgtcgtcaccgggctttccgggtctggcaaatcttcactcgctttcgacaccctgtatgccgaaggccagcgtcgctacgtcgaatcgctctccgcctatgcgcgacagttcctgtcgctgatggagaagccggacgtcgaccatatcgaagggctgtcgccggcgatttccatcgaacagaaatcaacctctcacaacccccgctcgacggtgggtactattaccgaaattcacgactatctgcgtctgctgtacgcccgcgtcggcgaaccgcgctgtccggatcatgacgtgccgctggcggcgcaaaccgtcagtcagatggtcgataatgtcctcgcccagccggaaggcctgcgcctgatgctgctggcgcccattattaaagagcgcaaaggcgagcacactaaaaccctggaaaacctcgccagtcagggctacatccgcgcgcggatcgacggcgaggtctgcgatctgtcggatccgccgaagctggagctgcagaagaagcacaccattgaggtagtcatcgaccgcttcaaggtgcgcgacgatctggcgcagcgcctggccgagtcgttcgaaaccgcgctggagctctccggcgggaccgccattgtggctaatatggatgatgagaaagcggaagaactgctgttttccgccaacttcgcctgcccgatctgcggctacagcatgcgcgagctggagccgcgtctgttctcctttaacaacccggcgggcgcctgcccgacctgcgacggcctcggcgtgcagcaatatttcgatcccgatcgcgtggtgcaaaatcccgagctgtcgctggcgggcggcgccatccgcggctgggatcggcgtaacttctactacttccagatgctgaagtcgctggcggagcactataaattcgacgtcgaagcgccatggggcaccctcagcgccaacgtgcagaaagtggtgctgtacggttcaggtaaagaaagtattgaattcaaatacatgaacgaccgcggcgatacctcggtgcgccgccatccgttcgaaggcgtgctgcataacatggagcgccgttacaaagagacggaatccagcgcggtgcgcgaagagctggcgaagttcatcagcaaccgtccgtgcgccagctgcgacggcacgcgtctgcgtcgcgaggcgcgccacgtgtttgtggaaaacaccccgctgccgaccatctccgatatgagcatcggccatgcgatggatttcttcaacaatctgaagctctccggccagcgggcgaaaatcgccgaaaaagtgctgaaagagattggcgatcgtctgaaattcctcgtcaacgtcgacctcaactacctgacgctctcccgctcggcggaaacgctctccggcggcgaagcccagcgtatccgtctggcaagccagattggcgccgggctggttggcgtgatgtacgtgctggatgaaccctctatcggcctgcaccagcgtgataacgaacgcctgctcggcaccctgatccacctgcgtaatttaggcaacacggtgatcgtcgttgagcacgacgaagacgccattcgcgccgccgaccatgtgatcgatatcggtcccggcgctggcgttcacggcggccaggtagtagcggaagggccgctggaggccattatggcggtcccggaatccctgaccggccagttcatgagcggtaaacgcaaaattgaagtgccgaaacagcgcgtgcccgccaacccggagaaagtcctcaaactgaccggcgcgcgcggcaacaacctgaaggatgtaacgctcaccctgccagtgggcctgtttacctgcatcaccggcgtctccggctcgggtaaatccacgctgatcaacgataccctgttcccgattgcccagcgccagctcaacggcgcgaccatcgccgaaccagcgccgtatcgcgatatccaggggctggaacatttcgataaagtgatcgatatcgaccagagcccgatcggccggacgccgcgctccaacccggcaacctataccggggtgtttaccccggtgcgcgagctgttcgccggcgtaccggagtctcgctcacgcggctatacgccggggcgctttagctttaacgttcgcggtgggcgctgcgaagcctgccagggtgacggcgtcattaaggttgagatgcacttcctgccggatatctacgtgccgtgcgaccagtgcaaaggcaaacgctataaccgcgaaacgctggagattaagtacaagggtaagaccatccacgaagtgctggatatgaccattgaagaggcgcgtgaattctttgatgccgtgccggcgctggcgcgtaagctgcaaaccctgatggacgtcggcctgacctatatccgccttggccagtcggcgacgaccctgtccggcggcgaggcgcagcgcgtgaagctggcgcgcgagttgtccaagcgcggtaccggccagacgctgtatatcctcgatgagccgaccaccggtctgcacttcgccgatatccagcagttgctggaagtgctgcaccagctgcgcgatcagggcaataccatcgtggtgattgagcacaacctcgatgtgattaaaactgccgactggattgtcgatctcggcccggaaggcggcagcggcggcggcgaaatcctggtctccggtacgccggaaaccgtcgccgagtgcgaagcctcgcacaccgcgcgcttcctcaagcccatgctgaaataa

SEQ ID NO: 136101 - DNA, 1581 bp, Enterobacter cloacae
atgaacgcctactcgctatcacgtctgtttatcgcctggctcacctgcctcgcgacactgttattcgctcctctgctgccggcagtagaggcggaaaaagcgccgccggcagcagccgaagacaacacgctatcgattcatatcgacgatatgctacggccatggagaggcgatttgcctggcatgatcgaccgtcgtaccattcgggtattaaccacctacagcaagaccttcttttttattgataaaggcacccagcgcggggcgacgcacgacatttttatcgcgctggaaaacgagctgaataaacagctagcgaaggataaaaagctcaaacagcgccacctgaagctgcatatcgtttttgtgccggtcagtcgggacaatctctttatcgcgcttaatgaaggtaaaggcgatattgcggctgccaatctgactatcacgccctcgcgggaagcacaggtcgatttcgcccagccgctctacagcaacgtgaaagaattactaatctccggcccggcttcaccgaaggtcgacagcctggagcaactctctggtcaaaccgtctttgttcgccgctcctccagctattacgacagcctgcaagcgctgaacgcccgatttgccggtgagtcgcgcccaccggtgatactggaggcggcgccggaagcgctggaggatgaagatctgctggaaatgctcaacgccgggctgattccgctgatcgtcgtcgatcagcataaggcgttgttctggaaacaggtgtttccaaaaattcaagtccatgacaacgtggtgctgcgcgagggcggcgacattgcctgggcggtacgcaaagacagcccgcagctgctgacggtactgaacaacttcgtcaaaaagaatcgtcagggcaccacgctgggcaatactctcctgctgcgttacctgaaaaatgctaaatatgtcaaaaatgccgcagcgaataaggaacgacgcaaattcctcgcgatggtagatgtcttccgcaagtacggcgatcgttatgacgtcgactggctgctgatggcggcccagggataccaggagtcgcggctgaatcagtcggtacggagccacgtcggcgccatcggcgttatgcaggtgatgcccagcactggaaaagagctgaaggtgggcgatattaaacagctggatcccaatatccatgccggcgtgaaatacatgcgctggatgatggatcggtactatgccgatgagcccatgacccggctcgataaagcgctgtttacctttgcctcctataacgcgggtccggcgcgtatcgcccgcctgcgcaccatgactaaacagcgaggatttgacccgaacgtctggttcggtaacgtcgaaaatatggcggcagaaaaaattggcgccgagacggtaacctacgtcagcaatatctataagtattacatcgcctatcggctgatcgtcgatgacatggcccgcaaacagaaagcgacggccgtaccgcggcaggagccggtggcgcagccagtcaaaccgcagcccagcgtggcgacagccgccaccgctcaggtgcccatcatctga

SEQ ID NO: 136102 - DNA, 216 bp, Enterobacter cloacae
atgctggcggaccaggctctgctggttgcggttatagctgcgcaccagcataccgatctcgtcgtcatggtgcaggcgcgggagggtcagctgatggccaagacgctcctgctgggagagatcgttcagctcgcgggcgatacgccgcagagggcgaaccatcagccggttgatgcaccaggtgagcgccaccgtcagcatcagcaccagaagtaa

SEQ ID NO: 136103 - DNA, 3375 bp, Enterobacter cloacae
atgcgcaagctcacactaagtttactcacgctgtccctcggcgttgcgctgctaccgttagcgcaggcgacgacgacgcctgcccaggagcatctgctggagcaggtgcgcctcggcgaggccagcaatcgtgaagacctggtgcgccagtcgctgtaccgtctggagctgattgatcccaacaacccggagctgattgccgcgcggatgcgctatctgctgcgtcagggggatgccgccggggcgcaaaaagagctggaacgactgacgaagctggcgccggactccccggagctgaaggcgtcgcgcaatgagatgaaaagcaacaccggcgagggccgccaggcgctgcagcaggcgctggtggcgcgcctgccggcccgccatagcgaaggcgtcagccagttgaaaaaactgaacgccagcgcgccgggcaacgtcagcctgctgacttcgctggcgaagcagatgttcgccgataacaaaccgcaggaggggttcgcctatctggcggagatggcccgatcggcctcgggacgcggtatcgccgccgatatgtggttcagtgaggtgaaaagcatgccggtgagtaaggccagcgtgcaggcgttgcagcaatttcttctgcagtttcccaccggctcggtggcggcgaacgcccgcgttctgctcgaccaacagcaggcgcagctgcaggatccgactttccgcgcccgctcggaagggctggcggcggtcaagtccgggaataccacgcaggcggtcgcggatctgcagaaagccgttcaggccgacagccgcgacagcgacgcggtgggcgctctcggccaggcctattcccagcgcggcgaccgcgcgcgggcagtggcgcagctcagtaaagcgattgccatggaccctgacagcccgaaccgcggcaagtgggacagcctgctgcaaactaaccgctactggctgctgataaagcagggggataacgccctgaaagccggccagctttcgcaggcgcagaactattatgcccaggcgcagcgggtcgatcgcaccgacagctatgccgtgctggggctgggggacgtcgcggcggcgcgcaaagaggcggcggcggcggagcgctattaccagcaggcgttgcgcctggatcgcggcaataacctggcggtgcgcggcctggccaacctctatcgcgccgaatcgccggagaaagccagcgcctggatcgccggcctccctcccgctcagcggcgcagtatcgatgatattgagcgcagcctgactaacgaccggctggagaaacaggcgcaggctctggagagccagggcaactgggcgcaggcggcggaagttcagcgtcggcgcctggcgctggatccggacagcgtctggataacctaccgtctggcgcgggatctggtcagcgccggcgaacgccaggaggccgacgcgctgatgcggacgatggtcaaccgccagccgcaggacgccgaacgggtctacgcctcgggactctacctgtcggggaacgaccaggacgatctggctctggcgcaaatcgccgctctgccgcgcagcgcgtggacggataacattcgtgaactcgaagcgcgtctgcaaagcgaccgggtgctgcgccaggccaaccagctgcgcgacagcggcgacgaagcgcaggcgatcgccctcatcaaacggcagcccgcctcggtgcgctatgatctgacgctggccgactgggcgcagcagcgcggagacagccagacggcgattgccgactatcagcgggtgctgcgtcaggaggccgacaacggcgatgcgcgcctcggccttgcggaagtctacctggccgagggcgataaaccggccgcccgggcgcaggtcatgcagctgaaaggcgcagagaccgaatccatgaacatgcagcggcgggtggcgctggcgcgagctggccttggcgataccgctgacgcgcaacggatttttaatcagattgtgccgcaggcgaaggcgcagccgccctcgatggagagcgcgctggtgctgcgcgatgccgcgcgctttgccacccagagcggggcgccgcagcaggcgctgacgcactaccgggaagcgatggtggcctccggcattacccccgcgcagccgcaggataacgatacttttacgcggctgacgcgcaacgacagccatgatgactggctgaagcgtgggatccgcagcgatgccgccgacctttatcgtcagcaggatctgaacgtcaccctggaacatgacttctggggttccagcggcaccggcggctattccgacctgaaggcgcataccaccatgctgcaggtggatgctccgctggcggatggccggatgttcttccgcaccgacctggtcaatatggatgccggcagcttttccacccacagcgacgggagctactcgcccagctggggcacctgcggggagatcgcctgtaccagcggcagtaaaaatcagaccgacagcggggccagcgtggcggtcggctggaagaatgacacctggagcggggatatcggcaccacgccgatgggcttcaatgtcgtcgatgtggtgggggggctgagctacagcagcgacgtcgggccggtggggtacacggtcaacgtccaccggcggcctatctccagctcgctgctctcctttggcgggcagaaggacagcagcagccataccggcgccacctggggcggcgtccgcgccgacggcggcggcctgagcctgagctacgatcgcggggaggctcacggcatctggtcctcgctgggcgccgactcgctgaccggtaaaaacgtggcggataactggcgcgtgcgctggatgaccgggtactactacaaggtcatcaacgagaataatcgtcgcgtcaccgtcggcctcaacaatatgatctggcactacgacaaagatctcagcggctacaccctcggccagggcggctattacagcccacaggagtatctctcgttcgccgtgccggtgacctggcgtcagcgcaccgagaactggtcctgggagctcggcgggtcggtgtcatggtcccattcgcgcacccagacgcaagcccgctatccgctgctgaacctgatcccgtccgactaccggcagcgcgccagcgagctgacggaggaggggagcagcagccatggattcggttacaccgccagagcgctggtggagcggcgggtgaccagtaactggttcgtcggcgccgcggtcgatattcagcaggcgaaggattacaccccgagccatgcgctgctttacgtccgctactcggcggccggctggcagggggatctggatatgccgccccagccgctggtgccctacgccgactggtag

SEQ ID NO: 136104 - DNA, 1083 bp, Enterobacter cloacae
  misc_feature (15)..(24): n is a, c, g, or t
atgatgcgcagcatnnnnnnnnnnggccaggtgggcgccgcctgccagtggcccgcctgggagcagtttaaacaagcgtacgtcagccccgagggacgggtgattgaccccagcgatgcgcgcaaaatctccacctcggaaggacagagctatggcctgtttttcgccctggcggccaacgatcgcgcagggttcgacaaactgctgacctggacgcagaacaacctggcggaaggcgatctgaaacaacatttgccgggctggctgtggggcaaaaaggacgatgagcagtggaccctgctggacagcaactcggcgtccgactcggatctgtggatagcctgggcgctgctggaggcggggcgcctgtggcaacagccgcagtataccgagaccggtaaagccctgctggcgcggattgtcgctgaagagacggtggcggtgccgggcctcggcacgatcctgctgccgggaaaagtcggttttgccgatgacagcggctggcggtttaaccccagctatcttccgccgcagctggccacctactttgtgcgttttggcgcgccgtggcccgctctgcgcgacagtaacctgcgcctgctgctggagaccgcgccgaaaggctttaccccggactgggtgcgctatgagaaagggaaaggctggcagctgaaaaccgaaaagccgccgatcggcagctatgacgcgattcgcgtctacctgtgggtgggcatgctccatgatggcgataagcagaaagcgcgtctgctgcaacgcttcgcgccgatggcggcgcagaccacggagcaggggatacccccggagaaagtgaatatcgccaccggcaaaaccagcggccaggggccagtgggcttctccgcggcaatgctgccgtttttacaggacgacgaggcccggtcggtgcaacgccagcgcgtcgccgataactatcccggcgcggatgcctactacagcgcagttctgacgctgttcggccagggttgggatcaacaccgttttcgtttcacggcgaatggtgaattacaacctgactggaaccaggaatgcgcaagctcacactaa

SEQ ID NO: 136105 - DNA, 2325 bp, Enterobacter cloacae
atgtgtgcagtagcggtgggcatgtgcagctggtatccactggcctcttacgcggcgccggccgcggtggcgaatgttgcccctggcgttcagccgcaggccgcgaccccggctgcgccgatcgtggtgggcgagccgacggcgaccctcgccgaaccgaccgctccggcggcggtggccgagaacgtgccgcagcgggaggtgaagctgagctttgccaccatcgcgccgccgcccggcagcatcgtgctgcgcggctcacggcctgacgcgtcggtcgaattcggcatgcgcagcgatgagctggtcgccaacgcgctgctcaatctggaatacaccccatcgccctcgctgctgcccgtgcagtcgcagttgaaggtctatcttaacgatgagctgatgggcgtcctgcccgtcactaaagagcagctggggaaaaagatccgcgcgcagctgccgattgacccgctgtacatcaccgacttcaaccgcgtacggctggagtttgtcggccactaccgcgacgtctgcgaaaacccggccagcagcacgctgtggctggacgtcggacgcgaaagctatctggatctcacctaccagtcgctgaaggtaaataacgatctgtcacacttcccggtgccgttctacgatccgcgcgataaccgtccgctgaagctgccgatgattttcccgggctcgccagcggtcacccagcagcaggcggcggcgatagtcgcctcctggttcggcagcaaggccggctggcgcggccagcagttcccggtctatttcaatgaactgccggatcgtaacgccattgtcttcgccaccaacgacaagcgtccggacttcctgcgcgatcatccgccggtcaaggcaccgaccatcgaaatgatcgacaacccgaacgatccctacgtcaagctgctggtgattttcggccgcgatgataacgacctgctgctggcggcgaaggggattgctcagggcaatattctgttccgcggcagcagcgtcaccgtggacggcatcaaaaccctgcagccgcgtcagccttacgacgcgccgaactgggtgcgcaccgaccgttcggtcacctttgctgagctgaaaacctatgagcaacagctgcagtccagcgggctggtgccggatgccatcaccgtggcgcttaacctgccgccggatctctatctgctgcgggccaacggcatcgatatggatctgaaataccgctacaccatgccgccggtgaaggacagctcgcggatggatatcagcctcaacgaccagttcctgcagtcgttcagccttaacagctcccaggacgtgaacaaactgatcctgcgcctgccggtgctgcaggggctgctggacggcaaatcggaggtcaccatccccgcgctgcgtcttggggcggtcaaccagctgcgctttgacttccagtatatgaacccgatgcccggcggctccatcgacaactgtattaccttccagccggtgcagaaccacgtggtgatcggcgacgattcgaccatcgacttctcgaagtattatcactttatcgccttgccggacctgcgcgtcttcgccaatgcgggcttcccttacagccgtatggcggacctttccgacacgctggtggtggtgccgaaggcgccgacccagggccaggtggcgacgctgctgcaggcgctggggggcatcggttcgcagaccggtctggcggcgattaatctgcaaatgaccgacgatggcaaccagatcaagaataaagacgcggatctgctgctgatcggcgcgatcccgtcgtcgctcaaggacgacaccaaaatcaacctgctggtcgaggcgaccaaaagctgggtgaaaatgccgatgcgccactatgacctggcgagcatttatcccgacgatgaggcccgcacgcccaatacccgcaccgacattacctcttccgggccgatggcggcggtgattggcttccagtcgccgtataacgatcagcgcagcgtggtggccctgctggccgacagcccgcgcggtaatgaactgctgaccaacgccctcaacgacagcggtaagcgggcggcgatgtttggctcggtggcggtgatccgcgaatccggcgtcaacagcctgcgggtgggggatatttactacgtgggtcatctgccctggttcgagcgcatctggttcgcgctctctaaccacccgatactgctggcgatcttcgccgccatcagcattgtgctgctggcatgggtgctgtggcgcatgctgcgcatcatcagccgccgccgtcttagcctggatgatgagtaa

SEQ ID NO: 136106 - DNA, 2619 bp, Enterobacter cloacae
atgatccgcctcagtacgctgctgctggccccgccggtgggggagcggctgcgtgcgcgctatgatgactatcggcagcacggcgcttcgtggctgtcggcgtcgcttggctgtctgtgggcgtcgctggtctgggcgctgatgccgctggagacgccgcgctggcaggcgattctggcccgccatgaaacctattttccccacataaatccgcatcgcccgcgtccgctggatccgctgcgctacctgctgcaatccctgtggttactgacgacgcgcgtgccggagccggagaaaaaggtcaactggcgttcgctggcggcgctggaaggggtgcacggtcgctatacgcagtggctggaaaaattgcctgagcagatgaacgcccgcaccggccatctggataaacagaaagagctggcacacctcaatcctaaactgcgccgggcgatccttgggggggtgaccttctgctcgctggtgctggcgctgatgtgtattacgcagccctttaacccgctgtcgcagtttatcttcctgatgctgctgtggggcgtggcgctgctggtgcggcgcatcccgggccgtttctcggcgctgatgctgatcgtgctgtcgctgacggtgtcgtgccgctatatctggtggcgctatacctcgacgctgaactggaacgacccggtaagtctggtgtgcgggatcattctgctgttcgcagagacctacgcctgggtggtgctggtgctgggctacttccaggtggtctggccgctgaatcgccagccggtgccgctgccggaggacatggatttgtggccaactgtggacatcttcgtccccacctataacgaagatctcaacgtggtgaaaaacaccatttacgcctcgcagggtatcgactggccgaaggacaagctgaacatctggatcctcgacgacggcggacgggaagcgtttcgccagtttgccaaagatgttggggtgcactatatcgcccgcaccagccacgaacacgccaaggccggcaacatcaataatgcgctgaaatatgccaaaggggagttcgtctcgatctttgactgcgaccatgtgccgacgcgctcgtttctgcagatgaccatgggctggttcctgaaagagaaagagctggcgatgatgcagaccccgcaccacttcttctcgcccgatccctttgagcgcaaccttggtcgttttcgcaaaacgccgaacgaagggacgctattctacggcctggtgcaggacgggaacgacatgtgggacgccaccttcttctgcggctcctgcgccgttatccgccgcggcccgctggatgaaattggcgggatagccgtcgaaacggtgaccgaagatgcccacacctcgctgcgtctgcaccggcggggatatacctccgcctatatgcgtattccgcaggcggcggggctggcgacggagagtttatccgcgcatatcggccagcgcatccgctgggcgcgcgggatggtgcagatattccgcctcgataatccgctgtttggcaaaggcctgaagctggtgcagcgcgtctgctacgccaacgccatgcttcactttctctccggtattccgcgcctcatcttcctcacggcgccgctggcctttttgctgctccatgcctatatcatttatgcgccagcgctgatgatcgcgctattcgtgttgccgcacatgatccacgccagcctgaccaactcgaagattcagggcaaatatcgccattcgttctggagtgaaatttacgagacggtgctggcctggtatatcgcgccgcccacttttgtggcgctgatcaacccgcataaaggcaagttcaacgtcaccgcgaagggcgggctggtggaagaggagtatgtcgactgggtgatctcccggccctatatctacctggtgctgctcaatctggtcggcgtcgcggtggggatctggcgcttcatgtacggcccggaaaatgaaatcctcaccgtctgggtgagtattgtctgggtattctacaacctgattattcttggcggcgcggtggcggtctcggttgaaagcaagcaggttcgccgttcgcaccgtgtcgaaatgagcatgccggcggctatcgcccgcgaagatggccacctgttctcctgcaccgtccacgactattccgacggcggactggggatcaaaattaacggcgacgcgcaggtgctggaaggccagaacgccaggctgctgctcaaacggggacagcaggagtatgccttcccggtcagggtcgcgcgggtcaacggcagcgaagtggggctccagctgctgccgttaaccaaccagcagcatatcgattttgtgcagtgtacgtttgcccgcgctgatacgtgggcgctttggcaggatagcttcccggaagataagccgatggaaagcctgctggacatcctcaagctgggctttcgtggctatcgtcacctggcggagttttcgccgccgtcggtgaaggtggttttccgcgcgctcacttcgctggtgtcctggatagcgtcgtttgtaccccgacgccctgaacgcgccgcgccgacgctctccgcagacccggcaatggctcaacaatga

SEQ ID NO: 136107 - DNA, 732 bp, Enterobacter cloacae
atggctattctgggattacagggcgtgcgcgggggaactggcgtcacgtccattacggctgcactcgcctgggccctgcaattgctcggtgaaagcgtgctggcgatcgacgccagcccggataatatgctgcgctttttctttaataccgatatccatcatcaggacggctgggcgcgggcgctgctcgacggccgggactggcgtgacgcgggcttgcgctatacgcagcatatcgatctgctgccgtttggccagctcagcgccggtgaaagagaaaatgtcgaccagctgcagcccaccctgggggcgatagcggaggcagtacagcagctacagggccagtaccgctggctgctgctggatctgccggcgggttattcgccgttgacccgcgagctgctgacgctttgcgatcgctcgctggtggtggttcatcccgacgccaatagccatatccgtctacaccagcagcccctcccggccaacggcgatattctgattaacgatctgcgggtcggcagccaactgcaggaagatctctaccagctgtggctggagagccagccgcgcatcctgccggtgacgattcaccgcgacgaggcgatggccgagtgcctggcggcgaaacaacctctcggggagtatcgtcaggattcgctggcggcggaagaggtgctgaccctggcgaactggtgcctgatccactattccgccgggagagcggcatga

SEQ ID NO: 136108 - DNA, 189 bp, Enterobacter cloacae
atgccagcaaaagatcctgcggtacccacggacgccacgctggggtacacctttcaaaatgattttctggcgcttagccgggcattttccctgccggatattgattatcatgatatttccaggcgcgaacagctgaacgcggcgctgaagcgctggccgctgctggcagagtttgcagagaaaaaataa

SEQ ID NO: 136109 - DNA, 1536 bp, Enterobacter cloacae
gtggataatgtatttactttgggtatttcatcattatgggatgaagtgtgccatatgccggtcggcggagtatggtggctcaacgtcgaccgttatgccgatgccgtcagcctgtttaatcagacgctggccgcgcaggcgaaaaacagccacgttgccgcgctggttatgggaaacaaacccaaggatatcatttccttagatcatactcacggtccggataatatcgcgctgttcaccctgccgaatcgcccgcaggcgctggaggaaatacaccgcgatttagtctgctccctcgaacctggcaattatttgtttattctgctatgcgctgaaaatgcctggcaaaatataaataatgaaaagttatgcgcctgggtagaaaagaccagccgctgggcgcaatatcaccgttgcgcgttcttagcgatcaattccgcgcaggatatcgatcggcagctgactcccttattacgtgagtaccgctccctttccggactggcaagtattcgttaccagggcgaccggcatatctttgatattgcctggtggggaagcgataagggtatcagcgcccaacagcagctgatggtgcaacatgatgacgccggctggcgattagcgcaggacgctgaaaccagcgtgcagccgcgcagcgatgaaaaagcgatcctcagccatgtgcgcgtgctggaaggcgccccgccgctgtcggaatactggacgctgtttgacaccaacgacgaggtcttcaacgccgggcgcaccgcgcaagcggcgacgatcctcttctccattacccaaaatacgcaaattgaacagctgggccgctatattcataccctgcgtcgccagcgcggtacggcgctgaaaatcatcgttcgtgaacaaaccccgagcctgcgcgcgaccgatgagcggctactgctcagcagcggcgccagcctggtgatccccagcagcgcatcgctctcccgctgcctgacgcaccaaaagttctcccgccatatcccggaagattttgccaccctgctgacctggagccagccgttaaagctgcgcggataccagaagtgggatgccttctgcgaagcggtgcacaacgtgatgaccaataccctgcttccacccgacagcaaaggcgtgatggtggccctgcgcccggcgccggggctgcgcgttgagcaggcgctgacgttatgcaaacctaaccggatgggcgacatcatgaccatcggcaataaccggctggtgctgtttttgtcgttttgccggatcaatgacctcgataccgcgctaaaccacattttcccgctgccgaccggcgatattttttctaaccgtatggtgtggtttgaggacaagcaaatcctctcggaaatcgtaatcatgcgcggcgtcgagccggcgcgctggaacacgccgctgcctctctcggtcggtaaaaacgagaccattaacgccacccacgatggacgccactggcgacgctaccccgaaccacaccggttaaccacccgcgaggagcaagcctga

SEQ ID NO: 136110 - DNA, 198 bp, Enterobacter cloacae
atgatgtctctcgccgatattctgcaactggtggtgctctgcgccctgctgttttttccgctgggctacctgacgcgccactatcagcgccggatccgcacgacgttaagactgatgttctttaaaccccgttacgtgaaaccggcaggggtattacgccggggaacaacggttaagcaaggcaaagcgaacaaatga

SEQ ID NO: 136111 - DNA, 1680 bp, Enterobacter cloacae
atgacaaataaaaaaacgaccgcggcaccgcttccgctctggcagtactggcgcggccttggcggctggaacttctactttctggtcaagtttgccctgctgtgggccgggtatctcaatttccatccgatgctgaacctggtatttctcgcctttctgctggtgccgatcccgcgcgaaaagctacaccgtatccgccactggatcgctattccgctgggattcgcgctgttctggcacgatacctggctgcccgggccagagtcgatttttagccaggggtcgcaaatcgccggcttcagcgccagctatatctgggatctgattgtccgctttatcaactggagcatggttggcgccttctttgttttgctggtgctatggttgtttatcagccagtggctgcgcgtcaccgtgtttgtctcggcaatggtcgtctggctggcggtcagcccgctgctgccggcctttaccctatggccctccggtcagcccaccacggccgccgccacgaccgcgcaggccaataccggggccaacgccgccgctggcgccgcgtccagccccgccaacagcgatattccgccgcagaccgagccgccgacctcagccaacctgaccaactggctgaacgctttctatgccgccgagcagaagcgcaggacgccgttcccggaccagctgccggcggatgcgcagccgtttgacctgctggtgatcaacatctgctccctctcctggtcggatattgaagccgccggtctgatggatcatccgctatggaagcactttgatattgtcttcaaaaactttaactccgcgacctcctacagcggcccggcggcggtgcgcctgctgcgcgccagctgcggccagctgtcgcatactaacctgtatcagccgtccggcgccgactgctacctgtttgaaaacctggcgaagctcggcttcaaccagcagctgatgctcggccataacggtctgttcggcgacttcctgaaagagctgcgttcgctgggcggcatgcagagtccgctgatggaccagaccggcctgccggtcagcctgcaggcgtttgacggctccccggtgtatgaggatctggcggtcctcaaccgctggctgaagaccgaagaggccagcagcaatccgcggaacgccaccttctataacaccctgccgctgcatgacggcaaccacttcccgggacaaagcaaaaccgcagactacaaagtgcgggcgcagaagctgtttgatgacctggataacttcttcaccgagctggagaaatcggggcggaaagtgatggtggtggtagtgccggaacacggcggcgcgctgaagggcgataagatgcaggtatctggcctgcgcgatattccaagcccgtcgatcactaacgtcccgacggcggtgaaattcttcggtatgaaggcgccgcatgaaggggcgccgattatcatcgatcagcccagcagttatctggcggtgtcggagctggtggtgcgcgccctcgacggcaaaatgttcagcgaggacagcgtcaactggcagcagtatgtcgccaacctgccgcagagcgcggcggtgtccgagaacgccaacgccatcgtcatccagtatcagggcaagccttatgtccagctgaatggcggtagctgggtgccttatccgcaataa

SEQ ID NO: 136112 - DNA, 1002 bp, Enterobacter cloacae
atgcccctgcgtgctttagtggcggtgatagtgacaacggtagtgatgctggtgcccagggcgtgggcggatacggcctgggagcgctataaggcccgttttatgatgccggatggtcgtatcattgataccgccaatggcaatgtgtcgcatacggaaggtcagggcttcgccatgctcctggcggtggcgaataacgatcgtccggcgttcgacaagctgtggcagtggacggacaacaccctgcgcaacaagtctaacgggctgttttactggcgctataacccggtggcgccggaccctatcgccgataaaaacaacgcctccgatggcgataccctgatcgcctgggcgctgctgcgcgcgcaaaaacagtggcaggataagcgctatgcgattgcctctgacgccatcaccgccgccctgctgaagtctacggtggtgactttcgccggtcgccaggtgatgctcccgggcgtgaaagggttcaacctcaatgatcacctgaaccttaacccttcctatttcatcttcccggcctggcgcgccttcgcggagcggacgcatctcaccgcctggcggacattgcagagcgacggacaggcgctgctggggcagatgggctgggggaaatctcatctacccagcgactgggtggcgctgcgggcggatggcaagatgctgccagccaaagagtggccgccgcggatgagtttcgatgcgatccgtatcccgctgtatctctcgtgggccgatccgcacagcgccttgctcgcgccctggaaggcctggatgcagagttacccgcgcctgcaaaccccggcgtggatcaacgtcagcaccaacgaggtggctccctggtatatggccggcggcctgctggcggtgcgcgatctgacgctgggtgaaccgcaggaggcgccgcagattgacgacaaggatgattattactctgccagcctcaagctgttggtctggctggcgaaacaggatcagcgctaa

SEQ ID NO: 136113 - DNA, 477 bp, Enterobacter cloacae
atgatgacggagaacaataacccggtggtgatgacctggtttcagcagcagcagacgcctgccggatggttcgatctgttgattattatgatcgaaggtatgctaaataatgccggcgagctggaaagccagcccttcctgcgtcagatgggcgcctcgctggcggagacccatccgctgccggcgtcggagacggtgggggatctggaggccaatatcaaccggctgctgactcattttcactggggcgtggtgaccatcgatgtcggtgaggacggcctgcgcctgcgccatcaggcgttgccggtcagccgcgacgaagcggggcgcgtgcgctggtgcaacgcgttctgtgccatactcgaggggttatattctcgctggctgcagagtcagggaggcagtgcccacgtgatactgcagcgtgagcgggtgttctccgtctctgacgttcagtttctctactaccatccataa

SEQ ID NO: 136114 - DNA, 4053 bp, Enterobacter cloacae
atgaaaagaaagataataataacgatgaaaaacacccgtcggctcaccacgttctgcctcaccggcgcgttgactctcgctgcctcgggcggcgcgctggcggcggggaacgacgcggcgctacaggcgctgttcgctcaggccaactactggcatgagaaatctcatgacgagctggcgatggagtccctgcagaaggtgctctcggtggatgccaacaacacccaggcgctgtatctgatggcgctctggtcgcagcagggcggcgatatgcaggcggcggcgcagtggcgcgcgcggctggcgaaagcggcccctgacagcccgggactacaggatctggacaacgccaaaaagatgtcgcaggtgccgcagggccagctcagcctggcccgccagcaggcgcgcggaggcaatatccccggggcgctggcgacctggcgcagtatgttcaatggcaatacgccgcctgccgggctggcggcggaatattacctgaccatggccagcgacaaatcgctctatccgcaggctatcagcgagctgcgccagtacgtggcgcagcatccgcaggagaacgccccgcgggtggcgttgggcaaagcgttaacctggcgggaagagactcgccgggaagggatcgccctgctcgagccgatggccagcggcaataaagaggcggacagcggcttgcgccaggcgctgctctggctgggcccgcaggccggggatgagcagtattacgacacctggatgcagcggcatccccaggacagcgaagttcagaattactttcgcgaacggcgcagcggtcaggcgcgcggccagggctacgccaatctcaacagcggcaataccgccgccgcgaagcagcagtttgaagaggtattgcagaccaacccccaggatgccgatgcgctggcgggcatgggctatatcgcgcagcgcagcggcgactaccaggccgcgtcgcagtatttgagccgggccgcggacctcggcggcgacgcctcggcgacccgtcgtcagcaggcggccgatgcgctgttctacggccagctggcgcaggcccagcaggcctataagcagggcaatatcagccaggcgctggcgctctccgcgccgttggcgcagcagagcggggcgcagggcgcctcggcgaagctgttccgcgccgatgtgctgcggcacaacaaagatttgccccaggcggagcaaacgctgcgctcactgttaaatgacgatccgcagaacgcggcggcgcgggaaaacctctattacgtgctgcgcgagcagaataaatccgccgaggcgcaggcgatgctgcagacgctcccgcagagcctgcggcaaaaactgcagccgcgggtggtggccggtatgccgggcgatgccctgcgccgtcaggcccaggcgcaggtcagcggcggtaacccagccggcgccattgccactctgcgcgaaggcgtcgcccgctatccggacgatccctggctgcgcctcgacctggcccggctgctgcaaaaatcgggtaacggcagcgaggcctcttcgctgatgtcggcggcctatcgccccggcgccagcaacagtgcgctgtatgccgccgccctgtttgccagcgaaaacggcgcctggcagcaggcgcagacgctgctggcgcgcattcccggcggcagccagaccagcgacatgcgcgatttgcgccagcgggtgaactacaacctgcagttggtgacggccgaaaactacctggcgcagggcaataccatcgccgccagcaataccctgcgggcgatggcctccacgccgccaaaagccccggcggacgccggcaagctggcgcgtctgctggccgagagcggcgacctgaccaccgcggtctcgctggtgcgcaacaatatcagcagcggcgtatccggcaatgccggggattacgccgatcagatcgccgtcctgaatcaggccgggctgaccggcgaggcgcagaacctgatcagcaatccgcagctgcaggccagcagtacgccgacgcagctggcgagcattcgcaatggctatgtgatcaacgaagccgaccgcctgcgcgagcagggcaattacgctgcggcgtatgacaagctgatccgcgctatgcaaagcgatccgcaaaataccgatctgatgttcgccatggcgcggctgtaccagagcggcaaaatgaacaaagaggccggggtggtctatgactacctgatgacgcgcgatacgccgaaccaggatgcgcgcgccggggccattgacgtggcgctgtcggcggggaacaacgatcgcgctgaacagctggccggcggtttgcgccaggataactccccggatcgcctgctgctgctggcgagagtggcggaggcccagggacatcatcagcaggcgatgacctatctgcgcagcgcccgcggcaaactgctgggcatgcaaagcaccaacagtagcgaaacgccgaccgtcggcggggtgctggcggcggataacccctttatcggcgtgtcgcaaacgtcggcgccgacgcggacggcctccgcctacgggcagtacatgccgtggcaggttgcccagtcggccgccgcgcctggttccacgctgccggggatccagcgcaccgatctgccggtggacaccgcccagacgcggatgctgcgtcaggtggacaccatgatggagtcgctgcaggagaaaaccggcagctggctgcagggggtaatggacgtgcgtggacgcgacggcgaatcgggcaccagcaagctgacggagctccggacgccgctgacctggtcatcctcgccgtttggcgactcgcgctttgactttaccgtcaccccggtgtcgttgaacgccgggaccgccagcggcgacgcctggcgtcgctacggcgccaacccgctggctaacgcggtctccaacatggtgagtaccgccaccagcgagcaggcggcgatcgcctcgatgaccgaggcggagcggacggcctatttcgccagcaatccaggggccgaggcgttaagcggcctcggcaccctgaacgcggcagatttcaatccgaccaccagcagcgggatggaaaacctggcgaagctcgggagctatgatgcggggcaggtggccagctatctctcttcgtccagccgcaagccgaacgttgaccagaccagcggctcgaccgattcgcagaaggccaacggcgtcgaactggcgctggcgttaagtggtgacgattaccgggtcgatatcggcagcacgccgttgggccaggatcttaataccgtagtcggcggggtgaaatggtcgcccaagctgaccaactatctgtcgctgatcctcaccggcgaacgtcgctcgctaaccgacagcctgctttcctacgtgggtctgaaagacgcctattccgggaaaacctgggggcaggtgacgaaaaacggcggcaccctgcagctgagctatgacgacggcgacgcgggcttctatgtcggcggcggtggatacagctatctggggcagaacgtcgccagcaacaccagtatcaacgccaatgccggggtctatcttcgtccctaccatgacgaataccgccagctgcaggccgggttgagcatgagctatatggattattccaaaaacctcagctacttcacctatggtcaggggggctactttagtccgcaaaactacgtcagcgtatcgctgccggtcagtctaacggagaaatatgataactggaccatgaagctcggcggctcggtgggctatcagtcttacagtcaggataagagcgcctatttcccgaccaattcggagtggcagcagaccctggagacggcggtgagcaatgggtttgccaaggaagcctactactccgcgacctcgaagagcggcatagggtataccctgcgcgccggggcggattacaaggtcaacaaacaaatgaccctggggggccagattggctatgacaccttcggggattataacgaaagcaccgccgggctctatattcgctatatgttaggagatcattga

SEQ ID NO: 136115 - DNA, 2436 bp, Enterobacter cloacae
atgaagcgattaaccacgctggcgctgctggcagggatgctttctgcgcctgcgctacacagtgaagaaccgggctccggctccgctgccccgctgagcttcccgcagctcaacgacgcggcggacagcgagccaggcgacgaacctccggctgcctcgccggaggagggcgcctctccggcagcccccgccaccgccggcgatgcggcggcgacggcccctgcgccggttatgccggacttacccccgccggtgagcggcacggcagcgccggaggtcattcctgtcgctccggtctggggaggcgatctgaatctggcgcagatggggatgccggacgggattatcctcagcggcggccagcgacagggtggggtcagctttaccctgcctgccgatcaggtggtgatccattcgcagctcagccttgccgttcgcgtatcgccggagatggcgagccgcaacgccaccctgcagctgatgctcaacggtcaaccgctcggcacgctgccgctgggcgccgatggcgaggatgtctcccattatcagctggatattccgcccgcgctgatggtctccagcaataacctgagcgtgaagatcaacgatggcgataccctgcagtgccagcgtgacattcatgatacgtcgcgggtgacggtgctgcccacgtcgcatttcagctgggaaagccagcagctgaacatcagcgacgacctgagccacttcccgcggcccttctttgacagcatgcagatgaccccggcggacattgcggtcgcctatggggccaagccgtcggcggacgtcttcagcgccgcggcgctgatctcctcctggctgggtatccaggcggactatcgcggcattgccttcagcgctctgcgcgaccgtctgccggaacgccacggcatcgtgattggccatccgggggagcaggtgggcggcatgatgctgccggaaaccgataagccgctgctgcgcatcatcgccaaccccgccaatccggcctataaactgctgctgattgtcggtaaaaacgatacggcgctgcgcatggccgcctggcggttaacccgcggcaactttgcgccgcaaaccgcgacgctggatgtcgaaccgcagaccatcccggttggcaaagcatatgatgccccgcgctggatcaccaccgatcgtccggtcaagctcagcgagctgctgcgtaaggaccaaagcccgaccgtcagcggcgtctggcacgaacctttacgtatcgccttccgcgccgcgcccgatctctatctgtgggatggggagaccattccgctacaggttggctaccgcttcccgtcggaaagctggattaatgaggacaagtccttgctgagcgtcacgctcaacggcaccttcctcaacaacctgccgatgaataagcaggggccgctggagaaagtctggcgctacctcgggggcgatgcgcgccaggagcgctttaccatcccgctggcgccctacctgatttacggcgataaccagctgtcgatgtacttcaatgtggtgccaaaggacgatgttccgtgttcggtgctgctgaataacaatatcaagagccggatcactgacgactcctggatcgatttgagcaagacgcgtcacttctcgctgttgcccaatctctcctactttgtcggcgcctcgttccccttctcgcggctggcggactattcgcagacgacccttctgctgccggcggacccgtctgaaacccaggtggcgaccctgctgaatctggcggcacgctccgggaacgcgaccggcaccgcgctggcgaataaccgcgtcgtgctcgggatgcccaccggcgggggggatttgcagtcgctgcgtgaacgtgacgtgctggcggtcaccgctctcgatcagcaggcctttaaccagagcctgctggccgactcaccctaccgcccggtagataatgtgctgagcgtccgcgagccagacctgtggcaaaaagtccagcgccggctcaccggcgactggacttccgccagcctcgacgccgatcgctacttttcgtcgagcagcgcctggcgcgggttcatcagctatcgctcgccgtggaattccacccgcctggtggtggtggcgctggccagcaatgatgaccagctggcgcgactgaagaccgatctggaatcgccgcgcattaacgccgggatccgcggcgataccgcggtgatcaccagcgataacggggtgcgcagcttccaggtgagtacgccgttccccagcggtcagatgccgtggtacatgatggcggtctggtatgccagccagcactcaggtttcctggcggtgctggggctgattgccacctcgataatgggactggcgctgaccgcgatgtttaaacgtcacgcccgtaagcgtctgggttcgggggataaccaatga

SEQ ID NO: 136116 - DNA, 2112 bp, Enterobacter cloacae
atgaaaaaatctcttttttggttgctggcgctggtgctgtcacccgtcgccgtgctggtggtgatcacgccgatggacagccaaaagcagtatatttttggtctgttaagtatcggtattctctttctgatgggcttcagcaagcgccgcagcgtatcggtcattatggtcgtcacgtcgctgctgatgtccacccgttacatgtattttcgcctcacgcagaccctgcacttcaactcgtccattgaagctattctcggcatgggactctttctggcggaagtctatatctgggtgatgctactgcttaactatctgcagacggtctggccgctgaagcgcggcattgttccgctgccggatgatatgagtaagtggccgacggtcgatatctatattccgagctataacgaaccgctggaggtggtgcgcgataccgtcctggcggcacaatgcattgattatccaaaagataaaatgaaaatctatcttctggatgacggtaagcgcagcgagtttgccgtgttcgccgccgacgttggggtgggctatatcacccgcaatgacaacaagcacgccaaagcggggaaccttaaccatgcgctgaccctgactcagggggagcttatctgcgttttcgactgcgaccacgtcgccacgcgcgtcttcctgcaggccaccgtcggcggcttcctgaaagacccgatgctggctctggtgcagacgccgcactacttctattccccggatccatttgaacgtaacctctccgtcggacgcaacattcccaacgaagggatgttgttctatggcccgattcagcaggggaacgacaactggaacgccacctttttctgcggctcctgcgcggtgatccgtcgcgaggcgctggcgcagatcggcggtttcgccgtcgaaacggtgaccgaagatgctcatacggcgctgaagtttcagcgtctggggtggaagtcggcctttctcgatatcccactggccgcaggcctcgctactgaacgcctggtggtgcacgtcatccagcgtacccgctgggcgcgcgggatgacgcagattttccgcgtcgataatccgctgtttggccgcgggctgacttttcagcagcgcttgtgctatctcagcgccatgctctactaccagttcgcgctcccgagggtggtgtttgtcaccgccccgctggcttacctgctgtttaacctcaatattatttactcttcagcgagcctgattgtctcctatgccctgccgcacctgttcctcgctatttacgttggttcgcgaatgaacggccgctatcgctacagcttctggggggagatctacgatattgtgctggccttccacctggtgctgccgactctggtgacgatgattttccccaaacgcggcaagttcaacgtcaccgataagggggggctgcttgacgtcggctacttcgatttcaccgtggtgcgcccgcacctggtggtggcctgcctgctggccctgggggtggtggtcggcatcgtccgggcgattggccatgactactttggctcggatcccaacgttatcgccctcaacgtcgggtgggggatctacagtctgatcttcctgctggcggcgattgccgtggcgcgcgaaacgcggcaggtgcgaaaaaccattcgtatcgatgtcgatattccggtggtgatccattacgccagcggcatcgtctcgcgcagccataccgcggacctgtcgatgggcggctgccgcgtggtcgcgcctgataatcgccatctggaggatgacatcgaagagattgagctgatcctgcagtccggggctatctcgattccggcccagctggtcacctctgacgagcgcttcctgcgcctcaagtttgatgaagatattccgctttcgcgccgccgtgaactggtgcgcgtggtgctggcccgcgcggatgcgtggattaatccgccgcgcccgcaggataacccgttccgctccttcttcaccattttacgctgcgtgttcgaactgttctggctgacgtggaaaacccgtcgcagccagcgcaatcggacaacagtggcgaaaacggcgcaggaggatgggacgttatga

SEQ ID NO: 136117 - DNA, 804 bp, Enterobacter cloacae
atgccgttgatttgcgtctgttcaccgaaaggcggcgcagggaaaacgaccctggcggccaatttagcctattcgctggcgcggacgggcagcaaagttctggcgctggattttgatgtccagaacgcgctgcgtttgcattttggcgtaccgctgaacgatgagcggggctatgtggcgaaggcgctggagctgcacgactggagccagtgcgtgttgagcgccggcagtaatattttcgtcctgccatatggcgaagtgagcgaggcgcagcgtcaggcgtttgatgagcaactgacccataatgaccatttcctccagcgtggtctgtccgcgctgcttaattatcccgggcttatcaccatcgccgatatgccccctggaccttcgcccgcgctaaaggcgctgacggggctggcggacctgcatcttatcccgctgctggcggataccgcctcgatgtcgaccctggcgcacgtagaaaagcagcgcctgaccggcgcggcgctgaattataagcacgggcactatttcgtcattaaccaaagcgatagccgtcgccaggtcagccgggacgtcaccagcctgatggaagagaaactgggcgagcgactgcttggcgtgatccatcgtgatgaaagcgtggtggaggccaatgcctcgcagaagtcgatcctggactttaacgcttcctcggcagcggccttcgatattgaaatcatggctaaaaaaatatcttcgctgttgggtattcatattggcgatggcacggtgcacagccagccacgcatgtcagggcgttaa

SEQ ID NO: 136118 - DNA, 756 bp, Enterobacter cloacae
atggccacagtgaataagcaggcggtggccgcggcgtttggccgggcggccagcggctatacgcaacatgatgaactgcagcggcgctgcgccgatctactgctgcgccagctggcgcgccgcgattttgcgcaggtgctggatgccggctgcggccccggcagtatgagtcgctattggcgtgaggcgggcagcgtggtgaccgcgctggatctctccgccgggatgctcgcccaggcgcagcgtaacgacgccgcgcagcattatctgctgggggatattgaggcgctgccgctgccggacgcctgcgtcgatctggcgtggagcaatctggcggtgcagtggtgcgacgatctacgggcggcaattggcgagctgtaccgggtggcgcgtcccggcggcagagtggcgtttagcacgctgctcgccgactcgctgccggagctcaatcaggcgtggcaggccatcgacgaccggccgcatgccaaccgtttccttagcgaagcggcggtgcgcgcggcgcttagcggcctgcgcgcgaccggcgaggttcatcagattagcctgccgttcgccgatgcgctgagcgctatgcgctccctgaagggcatcggcgccacccatttgcaccaggggcggaccgccgccccgcttggccgcggcaaactgcgcgagctgcagctggcctggccgcagcggcagggcatctgcccgctgacgtattctctttttacaggagtcattgagcgtgactaa

SEQ ID NO: 136119 - DNA, 1071 bp, Enterobacter cloacae
atgagctggcagcagcgaatcgatcgggcgctggacgagcagcgggcggcggaagcttttcgccgccgcctgccggtgacgcacggcgccgggcgctggctggagcgggaaggggagcgctggcttaacttctccagcaatgactatctgggcctgagtcagcatccggcgattatcgccgcctggcaacagggggccacgcgctatggcgtcggtgccggcggctcgggccacgtgagcggctatagcgaagcccaccgcgcgctggaagaggcgctcgccgactggctgggctatccgcgcgcattgctgtttatctccggctttgccgcgaatcaggcgctgatcgccgccctggtggagaaagacgatcggattgtcgccgaccgtctgagccacgcctctctgctggaggcggcgagcctcagcccggcgcagctgcggcgcagcatggacggcgacagcgcgccgctggcggccattcacgccgcgacgcaggccgcaggggcagtgttgctggtggatgacgcccacggtgttggcgtggtcggcgacgaaggacgcgggagctgcgccgcgcaggcggtgcgccctgagctgctggtggttaccttcggcaaggccttcggcgtcagcggcgcggcggtgctgtgcgacgaagcaatggccgattatctgctgcagtttgcccgtcatctgatctacagcaccgcgatgccgcccgcccaggcggtggcgttgagcgctgccctggggatcattcgcagcgatgaagggcagcagcgtcgcgacatcctggccgcccgcatccgtcagttccgtgaggggatgggcgaggtgtcgctggggttgaccgactccgtcagcgcgatccagccgctgatcgtcggcgacaacgcccgggcgctgaacctggcctgccgtctacgcgacgcgggctgctgggcaacggcgatccgtccaccgacggtgccggtcggcagcgcgcgtttgcgcctgaccctgacagccgcccatcatactgaagacattaaccgtttactggaggtgctgcatggccacagtgaataa

SEQ ID NO: 136120 - DNA, 1041 bp, Enterobacter cloacae
atggctcaccaacctcgctggacaatgtcgcaagtaacggaattatttaataaaccgctgatcgatctgctattcgaagcgcagcaaatccatcgtcaacactttgatccgcgccaggtgcaggtcagcaccctgctgtcgatcaaaaccggcgcctgcccggaagattgtaaatattgcccgcagagcgcacgctacaaaaccggcctcgaagccgagcgcctgatggaggttgagcaggtgctggaatcagcgcgccaggcgaaaaacgccggctccacccgcttctgcatgggcgcggcgtggaaaaaccccaatgaccgcgatatgccttatctggagcagatggtgaaaggggtgaaggcgctggggctggagtcctgtatgacgctcggcaccctgaccgacagtcaggcgcagcgcctggccgaagcgggcctcgattactacaaccacaaccttgatacctcgccggaattttacggcaacatcatcaccacccgcacctaccaggagcgcctggatacgctggacaaagtgcgtgatgctgggatcaaagtctgctccggcggtatcgtcgggctgggagagagcgtaaaagatcgcgccggactgctgctgcaactggctaatctgccgacgccgccggagagcgtaccgatcaacatgttggtgaaggtcaagggcacgccgctggcggataacgacgacgtcgacgctttcgatttcatccgcactatcgccatcgcgcgcatcatgatgcccacctcctacgtgcgtctctccgccggccgcgagcagatgaacgagcagacccaggcgatgtgctttatggccggggcgaactcgattttctatggctgcaagctgctgaccacgccgaacccggaagaggacaaagacctgcagctgttccgcaagctggggatcaacccgcagcagacggcggtgctggaaggcgacaatgagcagcagcagcgtctggagcaggccttactcaccccggacactgaggaatattacaacgcggcggcgctatga

SEQ ID NO: 136121 - DNA, 1308 bp, Enterobacter cloacae
atggtttacaagtcgcttatgacactggacgatctcgctttcgatcggcgccacatctggcacccctacacctctatgacttcccccctgccggtctacccggtggtgtccgcccacggttgcgagctgtccctcgccggcggcgaacagttggttgacggtatgtcttcctggtgggcggcgatccacggctacaatcacccacgcctcaatgcggcgctgaagggacaaattgaccaaatgtcgcacgtgatgttcggcgggatcacccatccgccggcagttgcgctatgccgtcagctggtggcgatgaccccggcctcgctggagtgcgttttcctcgccgactccggttcagtggcggtagaggtggcgatgaaaatggcgctgcagtactggcaggctaaaggcgaaccacgtcgtcgttttctgaccttccgcaacggctatcacggggataccttcggagcgatgtcggtctgcgatccgcagaactcgatgcacagcctgtggcagggctacctgccggataacctgttcgcccccgcgccgcaaagccgctttgacggcgagtgggacgagatggatatggtaccgtttgcccgcctgatggccgcgcatcgtcacgaaatcgccgcggtgatcctcgaacctatcgtccagggggcgggcggcatgcggatgtaccatccggagtggctgaagcgggtgcgtaaaatgtgcgaccgggaagggatactgctgatcgccgatgagattgccaccggctttggccgcaccggcaagctgttcgcttgtgaacacgccgggattaccgccgacattctgtgtctgggcaaagcgctgaccggcggcaccatgaccctttccgccgccatcactacccgaacggttgctgaaaccattagcaatggcgaagccggttgctttatgcacggccccacctttatgggcaatccgctggcctgcgcggtggccagcgaaagcctgcgcctgctggagagcggcgaatggcagccgcaggtggcggcgattgaagcccagctgcaggccgagctggccccggcgcggggatctgcgctggtcgcggacgtccgcgtgctgggcgctattggcgtggttgaaacccgtcgcccggtcaacatggccaccctgcagcgctttttcgtcgagcagggagtctggatccgtccgtttggccggctgatttatctgatgccgccgtacatcatcacgcccgagcagctgacccgcctgacccgtgcggtcaaccaggcagtgcaggacgaaacattttttagcgaataa

SEQ ID NO: 136122 - DNA, 477 bp, Enterobacter cloacae
atgaaactgatcagtcacgatctccaggacggcggtaagctgcctaatcgtcacgtcttcaacggcatgggctacgatggcgacaatatttcgccgcatctgatgtgggatgatgtgcccgcaggaaccaaaagctttgtggtgacctgctacgatccggatgcgccgaccggctccggctggtggcactgggtggtcgctaacctgccggccgatacccgcgtcctgccgcaaggggccggttccggtcaggcggagctgccggaagaggccgttcagacccgcaccgattttggtaaggcaggctacggcggcgcggcgccgccgaagggcgaaacccaccgctatatcttcaccgtccacgccctggacgtcgagaaaattgaggtggatgctgaggccagcggcgcgatggtcggctttaacgtccatttccattccctcgccagcgcctccatcaccgccctgttcagttaa

SEQ ID NO: 136123 - DNA, 1383 bp, Enterobacter cloacae
atgcaacaacaacacaagccacatctgctgcgcgggctcaatgcccgacacattcggtttattgcgctcggctccgctatcggcaccgggctgttctatggctcggcctcagccatcaaagcggcgggcccggcggtgctgctggcctatctgattggcggcgcggcggtgtttatcgtcatgcgcgcgctgggcgagatggcggtgcgcaacccggtttccggctccttcggcagctatgcccgccagtatctcgggccgctggccgggtttattaccggctggacctacacctttgaaatggtgatcgtcgccctggccgacgtcaccgccttcggtatctatatggggttgtggtaccccgatgtgccgcgctggatctggatcctcagcatcatcttctttatcggcgcgatgaacctgtgcaacgtgcgggtatttggcgagatggagttctggctgtctctggtgaaggtggtggcgattatcgccatgatgctggcgggggcggggatcatcttctttggctttggccacagcttcccggccaccgggctggaaaacctctggagccacggcggctttgcccctaacggctggcagggcgttatcgcctcgcttggcatcgtgatgttcgccttcggcggggtggagattatcggcgtcaccgccgcggaagcgaaggatcctaagaaggtgatcccgcaggccatcaataccattccgctgcgcattatcctgttctacgtctgcaccctggcggtactgatggcgatcttcccgtggaacagctttggcgaacaggggagtccgtttgtgcttattttcgacggtctggggatcccggcggcggcgaccatccttaacatcatcgtgatcagcgccagcatctcggcgattaacagcgatatttttggcgccggacgcatgatgtacggcatgtcgaaagaggggctggcgccgaaaagcttccagcgcatcgccagcaacggtgtgccctggatgacggtggtggtcatgggcggcgcgctgctggcggcggtggtattgaactatctgatccccgagcaggtatttgtgctaattgcttcgctggcggcattcgccacggtatgggtgtggctgatgattctgctatcccattttgccatgcgccgcggtttgtctgccgaagagcgcagccagatcgcctttcccattccgttctggccggttgcgccgctgttgacgctactgtttatggggctggtcatcgccgtactagggatgtttgccgaaacgcggatggcgctgatcgccggcctggtctggctcgggctgctgacggtggtgtggtatgcgcgggtgcgtaaaacggcgctgcaggtagtcactgaacagtaa

SEQ ID NO: 136124 - DNA, 1527 bp, Enterobacter cloacae
atgaaatctttaacgctaattccggggcaactgagcctgtcgcagctccgcgacgtttacagccacccgctgaacattacccttgatagcagcgcgtttgcggcaattgatgagagcgtggcctgtgttaacgccatcctcgccgaagggcggaccgcctacggcatcaacaccggttttggcctgctggcgcagacccgtatctcgacggaagatctggagaacctgcagcgttcgctggtgctatcccacgcggcgggcgttggcgagccgctggacgatgatctggcgcggctgattatggtgctgaagattaacagcctgtcccgcggtttctccgggatccgcctgagcgtgatccaggcgctgattggcctggtgaatgccggtgtgacgccgtggatcccggccaaaggctccgtcggcgcctccggcgacctcgcgccgctggcgcatatgtcgctaaccctgctcggagaaggtaaagcgcgggtacgcggcggcgactggctgccggccaccgaagcgctgcgtcaggtggggctggagccgattaccctggcggcgaaagaggggctggcgctactcaacggcacccaggcctcgaccgcttttgccctgcgcggtctgttcgaagccgaggatctgttcgcctccgcggtcgtctgcggggcgttaaccaccgaagcggcgctgggctcacgtcgtccgtttgatgcgcgcatccatgaagtgcgcggccagcgcgggcagattgatgcggcggcgttgtatcgccacctgctgaccgaagatagcgcgatctcgcagtcgcaccataactgcagcaaggtgcaggacccgtactccctgcgctgccagccgcaggtgatgggcgcctgcctgacgcagatccgccaggcggctgaggtgctgctggctgaagccaacgcggtctccgataacccgctggtctttgccgccgaaaatgacgtcatctccggcggtaacttccatgccgaaccggtggcgatggccgcggataatatcgcgctggcgatcgccgaaatcggctcgctctccgagcgccgcatcgcgctgatgatggacagccatatgtcgcagctgccgccgttcctcgtcaaaaatggcggcgtcaactccgggtttatgattgcccaggtcacggcggcggccttagccagtgaaaacaaagcgctgtcgcacccgcatagcgttgacagcctgcccacctctgccaaccaggaagaccacgtctcgatggcgccggcggccggtcgccgcctgtgggcgatggccgagaacacccgcggggtgctggccgttgagtggctggcggcggcgcaggggctggatatgcgcgaaggactgaccaccagtccgctgctggaagaggcgcgtcacttgctgcgcgaacgcgtgccgcactatacgcaggatcgctacttcgccccggatatcgataacgccattgcgcttctggcggcccgtcacctgacgcgtctgctgcctgccgtactgcattaa

SEQ ID NO: 136125 - DNA, 1689 bp, Enterobacter cloacae
atgtcccaaagcaaatatcgccagctggacgtccgtgcgccaagaggcacgacgctgaccgcgaagagctggctgaccgaagccccgctgcgtatgttaatgaataaccttgatcccgatgtcgccgaaaacccgcacgagctggtggtctatggcggtattggtcgcgcagcgcgcaactgggaatgctatgacgctatcgtgaaggcgctgaagaacctggagagcgatgaaaccctgctggtgcagtccgggaagccggtgggcgtattcaaaacccatgaaaactcaccgcgtgtgctgatcgccaactccaacctggtcccgcactgggccacctgggaacactttaacgagctggatgccaaagggctggcgatgtacggccagatgaccgccggcagctggatctacatcggcagccagggcatcgtgcagggtacctacgaaaccttcgtcgaagccggtcgccagcactaccagggcagcctgaaaggccgctgggtattaaccgccggtctgggcggcatgggcggcgcgcagccgctggccgcgacgctggccggcgcctgctcgctgaacatcgaatgtcagcagagccgcatcgatttccgtctgcgtacccgctacgtggatgagcaagccacctcgctggatgacgccctggcgcgcatcaaaaaatacaccgccgaagggcaggccatctctatcgcgctgtgcggcaacgccgcggagatcgtaccggagctggtgaagcgcggcgtgcgcccggatatggtcaccgaccagaccagcgcccacgacccgctgcatggctatctgccgaaaggctggagctgggaagagtatcagcagaaagccgaatccgacccgcagggcactattctggcggcgaaacgctcgatggccgatcacgtgcaggcgatgctggccttccatgagatgggggtcccaaccttcgactacggcaacaacatccgccagatggcgcaggaagtgggcgtcagcaacgccttcgatttcccgggcttcgtgccggcctatatccgcccgctgttctgccgcggtatcggcccgttccgctgggtagcgctgtccggcgatccgcaggatatctacaaaaccgacgcgaaagtgaaagagatcattaaagatgatcagcatctgcaccactggctggatatggcgcgcgagcgcatcagcttccagggactgccggcgcgtatctgctgggtcggtctggagtggcggcaaaagctcggtctggcgtttaacgaaatggtgcgcagcggcgaagtctccgcgccgatcgtcattggccgggatcaccttgactccggctccgtcgccagcccgaaccgcgaaaccgaagcgatgcgcgatggttctgatgcggtctccgactggccgctgctcaacgccctgctcaataccgccagcggcgcgacctgggtgtcgctgcaccacggcggcggggtaggcatgggcttctcgcaacactccgggatggttatcgtctgcgatggtaccgatgaagcggcggcgcgtatcgcccgcgtcctgcacaacgacccggccaccggcgtgatgcgtcatgccgacgcgggttacgatatcgccattgaatgcgcggcggaacagggtctgaatcttccgatggttgcggcaacgcaggggaacgctaaatga

SEQ ID NO: 136126 - DNA, 726 bp, Enterobacter cloacae
atgtttgcacaacaacctcgttccgcgcccgcgcctttctatgaaaaggtgaagcaggcgatcagcgaaaagatccacagcggcgtctggcgaccgcatgaccgtatcccgtcggaagctgagctggtggcccagttcggcttcagccgaatgaccatcaatcgcgcgctgcgcgagctgacggacgaaggcctgctggtcaggttacaaggggtgggaacctttgtcgccgagccgaaagggcagtcggcgctgttcgaggtgcgcagtattgccgcagaaattgtcgcccgtcaccatcagcaccgctgtgaggtactcctgcttgaggagacccgggcggatcatattcaggcgacggcgctcagcgtcccggaaggcacccgcatctttcactcgctgatggtgcattacgaaaacgaggtgccggtgcaaatcgaagatcgctgcgtcaatgccgcagtggtaccggactatctgcatcaggactacaccgccaccacgccccatgattacctgtcgctgatcgcgccgttaaccgaaggtgaacatattgttgaagcggtgcaggccacggcggaagagtgcgcgctgctgcatattcacgcccacgatccgtgcctgctgatccgtcgtcgcacctggtcgacaacccacatcgtctcccacgcgcgcctgctgttccccggtagccgatatcgtctgcaggggcgctttggctcctga

SEQ ID NO: 136127 - DNA, 957 bp, Enterobacter cloacae
atgatgctgtggcaagctacgccagccagtctctggcagggacgcgacgacagcgcggaagcgcccaatgcgctgcgcctgttccagaccatcgcccgcgcggaacgcttcgcgccgcaggagatgcccggcgatatcgcgctgctcggcttcgcctgtgacgaaggggttcggcgtaacaaggggcgtaccggggcagcggacggcccggcgaccctgcgccgggcgttggccaatatggccagccatcagggtcatgaccgctgcgtggatatgggcaccatcagcgtcgacggcgagcagttagaagccgcgcatcaggcgctgcgcgaggcggtggccgactgtcagcgggcgggtaaacgcacgctggtcctgggcggcggccacgagacggccttcggccacggcgctggggtactggacgccttcccgggcgaaaaagtgggcattattaatctcgatgcgcatctggatctgcgctttgccgactgcgccagctccgggacgccgttccgccagttggcgctggagtgtgacgcgcagcagcgcggttttcactatacctgcatcggggttagccgggcggcgaacacccaggcgctatgggatgaagcggcgcgccgccaggtggctatcgttgaagatctggaggtgctgacagccttcgaaactcgcgtgttgccggagcttgagcgcaatatcgcgcaattcgaccgtctgtatctgactatcgatctcgacgtgctgccggcgcgagaaatgccggcggtgtcggccccggcggcgctgggcgtgccgctggccacgctgctgcgcatcgttgagccgctgtgccgcagcggtaagctgcaggcggtggatctggtggagtttaacccgctgtttgacattgacggtcagggcgctcgcgtggcggcccgtgtggcatggcaaatcgcccattggtggcgctag

SEQ ID NO: 136128 - DNA, 1320 bp, Enterobacter cloacae
atggtctttagtcacaaaaaaataacatttccctgcgctattgttgactttaccggcgttatgaaaataaatgtctatacaacccatgacaagttaagcgctatgactgaagccacttccgaactcgttatctggcgaaacgggcgtctcgccaccctgaaccccgatcacgctcaaccttacggcctgctggagcgccatgcgctgctggtgcgcgacggccgcatcgcggcgattgtcgccgaagatgacgtccccagcgggcgcagtatcgatcttgaaggccggttggtaacgccgggattaatcgactgccacacccatctcgtcttcggcggcagccgggcccaggagtgggaggagcggctgaacggcgtgtcgtatcaaaccatcagcgccagcggcggcggcattaactccaccgtgcgcgccacgcgcgacagcagcgaagctgaactactggcgctggcccagccgcgtctggaacgcctgctgcgtgaaggggtgaccaccctggagatcaaatccggctacggcctcgacctgccaaacgaacgcaaaatgctgcgggtcgcccgacaactggccgatcataatggcgtggaactgtcggcgacgctgctctccgcccacgccacgccgccggaatatcaaggcgatgctgacggctatattacgctggtctgcgagaccattttgccgacgctgtggcaggagggactgtttgaaagcgttgacgtcttctgcgaaaacgtcggcttcagcccgcagcaaactgagcgcgtctttcaggcggcgcaggcgctgggcattccggtaaaaggccacgttgagcagctctcatcgctgggcggtgcgcagctggtgagccgctatcatgggctttccgccgaccatatcgagtatctgacggaagagggcgtggcggcgatgcgcgaaagcggcaccgtggcagccctgctccccggcgcgttctacttccttaatgaaacccgtaaaccgccggtcgagctgctgcgcaagtaccaggtgccgatggcggtggcgaccgatttcaaccccggcaccagccccttcgccagcctgcatctggcgatgaacatggcctgcgtcaagtttggcctgacgccggaggaggcgtgggccggcgtgacgcgccatgccgcgcgggcgctggggcgccaggccagccacggccagctggcgccgggctttgtcgctaacttcgccatctgggatgctgagcatcccgtcgagatggtgtatgagccggggcgcagtccgctctggcatcgcgttgttcaaggagaattgcaatga

SEQ ID NO: 136129 - DNA, 1230 bp, Enterobacter cloacae
ttgcccgcctgtagctcgacgcctgccgatcaacagccctcaacgcagactgcaccgggcactaccgcgcgtcccatactcaacgccgaagaagcgaaaaacttcacgccggcggcctatttccagtcgctggctcccaacgccgccgcctggacgccgtctgctatcagcctgccggcgcagcctgactttatcgtcggccctgcgggaacccagggcgtaacccataccaccattcaggcggcggtggatgccgcaattgcccgtcactctaaccgtcgtctgtatatcgcgattatgccgggcgagtacccgggaaccgtctacgttccggcggcgccgggcgccctgaccctgtatggtactggcgataagccaatcgacgtgaaaatcagcgaagccattgattccgagatggatcgcaacacctggcgtcgtctggtcaatccaggcggtaaatatatgccgggtaaaccggcgtggtatatgttcgacagttgccaaagcaaatccgcggcgaccgtcggcgtaatgtgttccgcagtcttctggtcacagaataatggtctgcagctgcagaacctgaccatcgccaacaacctcggcgacagcgttgacgccggtacccaccaggcggtggcattgcgcagcgatggcgaccaggtgcagatcaataaggtcaatattcttggccgtcagaacaccttcttcgtgaccaacagcggcgtgcaaaaccgtctgcaggacaaccgtcagacccgcaccctggtgaccaacagctacattgaaggcgatgtggatatcgtttccggccgcggcgcggtggtgtttgataacaccgatttccgcgtggtgaactcccgtacccagaaagaggcctacgtcttcgcgccggctactctgaagagcgtgacctacggcttcctggcgaccaacagccgcttcaccgcctccggggataacgtcgcgcagctcggccgcgcgctggatgtcgatggcaacagcaacggccaggtggtgatccgcgacagcgctatcaatgaaggctttaatattgcccagccgtgggcggcggcggtaggctccggccgcccgttcagcggcaacaccggcagcgccgatgacaaaggcaatctgcagcgcaacctcaacgacaacggcttcaaccgcatgtgggagtacaataaccgcggcgtgggaagcaccgtggtcgccgagccgaaacagtaa

SEQ ID NO: 136130 - DNA, 1431 bp, Enterobacter cloacae
gtgctggcggcgaaggtcactctgccgccgctgaccagcgaactgcgcagtaaaattccttttgattcgcaatataaatacatgtcgaccctctaccggctgggtgaagaggaggtagtgctggtcactggcgcgccggatgtcctgttccgcctgtgccagtatcagcagagcgacagcggattgcagccgctggatctcccgtactgggaaggcaaaattgaagagtacgcccgggaagggctacggatggtggccgcagcctggaagccggctgccgcaggccagaccgaactgacccatcaggatctgcagcaaggggtgattttgctaggggtcgccgggatgatggatccgccgcgtccggaggccatcacggcgattgccgactgcctgcaggccgggatccgcgtgaagatgatcaccggcgaccacccgcaaacggcgatgagcatcggcaagatgctggggattggcaatgcgggaaatgccattaccggacgcgagctggaggtgatggacgacgcgcagctgagcgtagccgcgcagcagtttgatatcttcgcccgcaccagcccggaagataagttccgcctggtgcaggctctgcagagtaagaaagaaattgtcggaatgaccggcgatggggtgaacgatgccccggcgttgaagcaggctgacgtcggcgtggcgatggggatcaaggggaccgaggtgaccaaggaggccgccgatatggtgctgaccgatgataacttcgccaccatcgccagcgcagtccgcgaggggcgccgggtgtatgacaacctgaagaaaaccattctcttcgtcatgccgaccaaccttgcccaggggttactgatcgtgatcgcgctgctggcgggcaacgtactgccgctcacgccggtgttgatcctgtggatgaacatggccacctccgccacgctgtcgtttggcctggcgtttgaagccggtgagaaaaatattatgcggcggccgccgcgcgatccgaaaattcacgtgatggacggctttgccatctggcgcgtagcgtttgtggggtcaatgattgcggtcagcgcctttattctcgaagcctggctgcagccgcgcggctattcgccggagtttattcgtaccgtgctgttgcagactctggtcaccgcccagtggttctatatgctgaactgccgcgtatcggatggattctcgttaaccaaaggtctgctggccaacaaagggatctggatcgtcagcggcgtactgctggtgctacagctgctgattatctacgcgccttttatgcagatgctgttcggcaccaccgggctgccgttccgctactgggtgatcacctttatcatcggcttcgccatgttcctgatcgtggaactggaaaaaccgctgacccgcaaatggcgttccgcctga

SEQ ID NO: 136131 - DNA, 1239 bp, Enterobacter cloacae
atgaatacagataaaccgggggcgccctattatcagcgctccgtcgaggagactctcgccagcgtgcagagttcgccggaagggattagcggaacagaggcggctacgcgcctgcagcagtatggcgaaaacgccctgccgcagaagccgggtaaacccgcctggctgcgttttattgcgcattttaacgatgtgctgatctacgtcctgctggcggcagcgttgctcaaggcggtgatgggccattggatcgacatggcggtgatcctcgccgtggcggtggtcaatgcgctgatcggcttcattcaggagagtaatgcggaaaaatcgctgcagagtatccgcaatatgctgtccagcgaggcggtggcgatccgtcagggcaaccatgaaaccatccccaccacctcgctggtacctggcgatatcgtggtgatccgcgccggcgaccgtatccccgccgatctacgggtgattgaggcgcacaacctgcgggtggaagaggcgatcctcaccggcgagtcgacggtggtggaaaaaaccaccgagccgctaagcggcgatttaccgctcggcgatcgcagcaacctgttgttttccgggaccaccgttagctcaggggcgggaaaagggatcgtggtggccaccggcggcaataccgagctgggccatatcaaccaaatgatggcgggcattgagaaacaccgcacgccgctgctggtgcaaatggacaagctgggcaaagccatctttatccttattctggtgatgatggcggcgctgttcgtctttagcctgctgttccgcgatatgccggtctccgaactgatgctgtcgttgattagcctcgcggtggcatcggtcccggaagggttgccggcgattatctcgattattctgtcgctcggcgtacaggcgatggcccgtcagaaagcgattatccgcaagctgccgacggtggaaaccctcggcgcgatgacggttatctgctcggataaaaccgggaccctgactatgaacgaaatgacggtgaaggcggtgatcactgccgacagcgtctatcgggtggaaggggatagctatgagccgccattgacgatccgacgccggtcacgatcgcgcccggctcgctgttcgagcgctatctgcgcaccatcgatctgtgtaacgacagccagcttatcaaagaggagagcgggctgtggaaaatcaccggcggcccgaccgagggggcgctga

SEQ ID NO: 136132 - DNA, 432 bp, Enterobacter cloacae
atgtataaaaatatcgttgttcccgttgacgtgtttgatgcgggcctggccgacaaagcgctctctcatgcgaaattcctcgcccaacattctgccgggcaaattcatcttatccatgttattccggccttttctcctgtattaacccgcggatttatctctgatgcccgaaagatggaagaccatttgcttaataccgctaaggaaaagctgagcgagctggtgaagaaaaatgggcttgcggaagacgccagccatctttatgtgcgcagtggcaatgttcgcgatcaagtgattgccctggccgatgagctgaaagcggatgtggtgattgtcggttcgcgcaatccggggatccagactcatttgctgggctcggaagcggccaatatcgtgcgctatgcccatgtaccagtgttcgttgtgcgctga

SEQ ID NO: 136133 - DNA, 1086 bp, Enterobacter cloacae
gtgaaccgttatttttctctcatcccggttgttattatatttacaaccgcttgcgatcagaaagcacccaccgtcgagtccgccccgcgcatggttaaagtggcgcaggtgaccgccgtgggcaatacccagcagcgaacgtttccggcacgcattgagtctggcgattccaccgaactgtcgtttaagcggggtggccaggtggagtcgctagatattcgtcagggggcaagcgtcgcccaggggcaaacgctggcgcgcctgaatgcccgcgaggcccagcaacgggtcaatgagcggcaaacggcggccactctcgcccagcgtcagttcgaccgcttccagactctggccgggcgccaggcgatttcccaggcggagatggacgtgcagcgcgccaatcgcgatgccgccaatgcggccttaaaaatcgctcgcgaagagctggcgcaaatgagcctcatcgcgccctttagcgggattgccgccggcgtgcatatccgcaaccatcaggtggtcgccgccggccaaccggtgatcaccctgacgcggaccgacctgctggatgtggtcttcagcattcccgaaaatctgttcacctccctggatatccgcaataccgcctaccgtcccgtcgtcaggatcaataccctgccgggccgcgagtttaccgcggaatacaaagagcataccggcagcagcgacaatagcaccctcacctggcagatcgtgttaaccatgccgcggccagatgattttcccgccgtcggcggggtcagcggcaccgtgacggtcaatctcggcaatttaccggccagcgccggacgggaaaccctcattgtgccagcggaggcggtgtttaaccccgataaccggccaaagaacgagccggtagtctgggtggtgaaaggcgataacgcgcatcgatatcttgaggagcgtaaggtcaccgtcggcgaggtgacttcgcagggagtggcgatcaccgacggtctccgcgcgggtgaacaggtggttgcggcgggcgtgagcgagctgcatgccgggcagccggtgcgggtctggacgcgtgaacgaggattataa

SEQ ID NO: 136134 - DNA, 3066 bp, Enterobacter cloacae
atggatatttcccgtcagtttattaacaacccgacccgcgtctggttagccattttgctgttaggggtgggtggcctgttcgccctgctcaatatcggccgcctggaagatcccgccttcaccatcaaaacggcagtgatcgtcacccactaccctggcgcgtccgctcagcaggtggaagaggaggttaccctgccgctggaaaacgcgattcagcagcttccctcgctggataacgtcagctccatctcctcgaatggcttatcgcaaattacggtgaatattgcttcgcagtaccattccagcgagctgccgcaaatctgggatgagctacgtcgccgggtcggtgacgccagccgccttttcccccctggcgtagtcccccctttcgtcaacgatgactttggcgatgtgtttggctttttcttcgctatctcgggcgacagttttaccaacccggagctggtgcgctatgccgaacagttgcgccgggagctggtgctggtgccgggggtcggtaaagtcgctatcggcggcgtcattccgcagcagatcaatgtggatatctcgctggcgaagatggcggcgcgcgggatcaccctcaaccagctcgccgcaatcctggcccgactcaacgtggtgtccagcgccggggagatccgcgttggcagcgaatcgatccgcctccaccccaccggtgagtttcagagcatcgatgagctgggagatctactggtcagccctcacggcgccagcgccaccacccgactgcgggatattgctacgctgtcgcgcgggctaaccgactcgccggccagtatctatcatgccaacgggcgccaggcggtgaccatgggagtttcttttatcccaggcgtcaacgttattgacgtcggccacgctctcgaggcccgcctccagcagatggccgccgacaaaccggcgggcatcgacatcgctattttttacgatcaggcagctgaggtcgcccactcggtcaatggctttattaccaattttctgatggccctggcgattgtcgtcggcgtgctgctggtatttatgggggtgcgcagcgggattattattgctctgtcgctggcgctcaacgttctcggcaccctgcttatcatgtatatctgggggatcgaactacaacggatctccctcggagcgctaatcatcgccctgagtatgttggtggacaatgccattgtgattgtcgaaggggtgctcatcgcccgtcagcaaggctctccgttactgggcgcgattaactatgtgctccgtcgctctgcgctgccgctgcttggcgcgacgatcatcgccatcctcgccttcgcgccgattggcctctcccaggactctaccggggagtattgcaaatcgctgttccaggtgctgctgatctccctgatgctgagctggttttccgctctgaccatcaccccggtgcttattaagtggtggctgtttaaaaacgccccgtcggccgccgccgcggaggaaaaggccgatccttaccgcggcagcttttaccgtggctatcagcaggcgctgcgaatactgctgcagcaaaagaccctgaccctggtgctgatgggtgcgctgttagccggagcgatctggggctttacctttgttcggcagaatttttttccgtcatcgaatacgcctatattctttgtcgacctgtggctaccctacggtaccgatataaacgccacggagaagatgacccgggatatcgagcggtcgatagccggtcagccgggggtggtcaccaccgtctccaccatcggccagggcagtatgcgtttcattctcacctacagcgggcagcgccagtacagcaactacgcgcagattatggtgcggatggatgatcaacgcggcatcgcccctgtcacccgccacgtggaggactggattgccagaaactacccgcaggttaacgccagcaccaaacgcattatgttcggcccctccggagatagcgcgattgaggtgcgcattaagggcccagacccggatacgctgcgcgcgctggcgagtcaggtaggcgatatcctcgccgcggacccggcgaccgacagcgtgcgtaatgactggcagaaccgcagcaaagtgatccgcccgcagtattccccggcgctgggacgcgagctgggggtggataaacaggatattgataacgcgctggagatgaatttctccgggagtcgcgccgggttatatcgtgaaggggccgatctgctgccagtgatcgtccggccgccggaagcagaacgtcaggatgccaaccatctgaataatgtgctggtctggagccagagtcgccagcaatatatcccgctgagtaacgtcatcaatggtttcgccctggagtgggaagatccgttgatcctccgccgggatcgtacccgggtgctgacggtccagaccgaccccagcccgctaagcggccaaacctcgggtgatattctcgcgcgggtgaaaccgcgcattgacgcactgccgctgccccacggctaccgtatcgaatggggcggcgatgccgagaactccagtgaggcgcagcaggggctgtttacaaccctgccgcttggctatctggtgatgtttatcataacggtgctgatgttcagttcgctgaaaaacgccgtcgccatctggctgaccgttccgctggcgctgatcggggtcacacccggctttctgcttaccggcatccccttcggctttatggccttaatcggcttgctcagcctgagcggtatgctgatccgtaacggcattgtgctggtagaagagatagagcaacaaaaacaggagaaagatcaacgacaagctattattgatgcggcaacctctcgtctgcggccgatcctgctgaccgccttcaccaccgtacttggtctggccccactgctgcgcgatgtctttttccagagtatggcggtggtgatcatgttcggcctcgcctttgccaccgtgctgacgctgctggttctgccggtgatttacgcctgctttcaccataaggatatgacgcctcaacgatga

SEQ ID NO: 136135 - DNA, 966 bp, Enterobacter cloacae
atgaacagtaccggtctgagcattatcaagacattaggctgtatgacagcggtgacctttttcaccatctataacacctgggatcgctttgattatgactatcactggatcctcgggctgctgacctttatctcgaccatcgcgacgccgctgttttttgtcgtggccggctatcttgatgcgcagacgcgccacgatgccaactggcaaattggtaaaattaaaagcgtggtcatcgtctttctgttttgggtgacggtctattatgtctgggagccttaccagcgcggctacctgatccagccctggtttattttcgccctgattgtcatctatacctttcatcctttgatcgcctggctcagccagcggcgcgggctctttttcgccgtgctcctgacgctgctgtgctgctcctacggttacgacctgctctcggtgatctacccggacagacatcttttcagtttgccgccgcagtatcgcctgtggacatggctactgttttatttaaccgggcagttgtttaacgatccaaaggtcgcggagtggatacgcaacccacaggtgattaaagggtcgattatcgccctgccctttgtctatttatttacctggttttatgaacgccatttcttcttcgccctgtttaaagcagatcgtaatgcgttcattctcacgggatcgcaaatttatatcctgatcgtcctgctggtgatcgccgctaacgccgtgcagtttaaaaagaaccgcgagtggaaagaggccgtgctggcgacggtcagtaaagcgatgaccggagtttatatcctccactattccgtgtttcacctgctggtgatgctcatccctgtgcattcgctagccaccaagttgggggtaatagcgctgacctttgtcctgtcggtgctcatttcccttgccgcgctctccagtacgctgctcaggaaggtgattaccttgtaa

SEQ ID NO: 136136 - DNA, 507 bp, Enterobacter cloacae
atgcgcggcaaaagcgtgatgctcctggccgggttagcctctctcgcgcaggcgaacgaacttaacctctattcggtgaataccggttcctatgtttaccatctgaccaataatcacggacaatatacagagaatttcgaaaatcattttttctcagtggagcggaaattctctgcagactccaaatacagccttctgcttggcactatgaataacagcttcaacgatcgctgcctggcgctgggggtgagaagagactggtaccacagcggcagcgggtggaccttcaaaggcgtttacggctataccggcgaattcttcttcgacgcctttgagcattgcggcgatcatggctcctataaagactttaaggacgccacggggatcggcttttcaccctatatctaccacgctatccagtataacttcaccgattatttcgccgttgaaagcggcattattattcccagcgtgtttgtgatcagtatccagtggagcttccgctaa

SEQ ID NO: 136137 - DNA, 213 bp, Enterobacter cloacae
atgcatattaaaaataccattccagcagagtttgtcttcaattcggccctgatgaagaatattgagaatacgctcattaagcagcacagaacggtaaataatgagcggatgattacggaaatccagcatcgtctgcaaacggaaagtaacgaaatactttccgatctctatctgcaggcgctggatatgctgtacagcaaacctcatcattaa

SEQ ID NO: 136138 - DNA, 555 bp, Enterobacter cloacae
atgtcacaccataatacttgctatcgttctgagcattacgatctgtggtttgataatggttttcttctctatgggatgtcgctgatcctgaatagcctgccggcatcttacttccgcaaaaaacatgttttcttcaccagcgacaattatttcgcggtactgcagcacaactataatcggcgggatacattatttattctgttaaccgaaggcaacgatcttaattttcttagtgaactgcctatgctgcgcttaccggccaactcgacgccggaagagttaaagatatttctgcatcaacccacccgctattacaaaacccatccggcgccaggcgcctcggtgcagtttaccgagcgggaaaagaaagttattcaacttatcagcaatggcgaagcggtcgccagcattggccggtcgctaaacctgcatataaaaaccatttatcagatccggctgaatctgattaaaaagctcggctgcagcggtagaaccgatttttttaatatcagccgcagcgaaacgttcaaatcctggagccagattcacctgtaa

SEQ ID NO: 136139 - DNA, 282 bp, Enterobacter cloacae
ttgtttctcgccgaagcgcgtaaaaaaaatggcaaagagacgctgctggtgggctggagcaatgaggacaggacgcgtctgtggctggaggcatggcgtctttcccaacgcggctggcatgtcaacgttctcgccgaaccgctggagtcgccgcggcctgagctatttcccgggcagcatattttcgtctggaccggacgtgccgccacgcctctgcaggaggagctgctcagccactggcaggagcagggcttcagcatccattttcacggccaaaattaa

SEQ ID NO: 136140 - DNA, 732 bp, Enterobacter cloacae
atggacacctggtggcagaccgaaaccggcggctttatgatcactccgctgccgggcgcgattgagctgaaggccggctccgcgacgcgtccgttcttcggcgtccagccggtgctggtggataacgaaggcctgccgctggatggcgccaccgaaggcaacctcgccatcgccgactcctggcccggccaggcgcgtaccctgttcggcgaccatgagcgctttgagcaaacctacttctccactttcaaaaatatgtactttagcggcgacggcgcgcgtcgtgatgaagatggctattactggatcaccggccgggtggatgacgtcctgaacgtctccggacaccgtctggggaccgccgagatcgaatcggcgctggtgtcgcacccaaaaatcgccgaagcggcggtggtggggatcccgcataacatcaaaggccaggccatctatgcctacgtgacgctcaatcacggcgaagaaccgacgccggagttgtatgccgaagtgcgtaactgggtacgcaaagagatcggtccgctggcgacgccggatgtgctgcactggaccgattcgctgccgaaaacccgctcgggcaaaatcatgcgccgcattctgcgtaagattgccgcaggcgacaccagcaacctcggcgatacctcgaccctcgccgatcctggcgtcgtggaaaaactgctcgaagagaagcaggccattaccatgccatcgtaa

SEQ ID NO: 136141 - DNA, 312 bp, Enterobacter cloacae
atgaatgaacaactttgtcagcggatagaaaatagtgcgcatttcagggagttagttgcatcacggcaacggtttgccgccattctgtcagtgattatgttagtgatctacgtgggctttattttgcttatcgcctttgcacccggctggctcggcaccccgctgcacgccggaaccagcgtcacccgcgggatcccgctcggcattggcgtgatcgtcatttcgtttatcctgaccggtatttatgtctggcgagctaacggtgaattcgaccgtttgaccaaaagcgttctcaacgaggtaaaagcatga

SEQ ID NO: 136142 - DNA, 1656 bp, Enterobacter cloacae
atgatcaagagagtcctgacggcgctcgccgccacgctgctgcccctcggcgcccacgccgcagacgctattaccggcgcggtacagcgccagccgaccaactggcaggcgattgtcatgttcctgattttcgtcgccctgacgctgtacatcacctactgggcctcaaaacgggtgcgttcgcgcagcgattactacaccgccggcggcaatattaccggcttccagaacgggctggcgattgccggcgactttatgtcagcggcgtcgttcctcggtatctccgcgctggtgtatacctccggctacgatgggctgatctactcgctgggctttctcgtcggctggccgattatcctgtttctaattgctgaacgtctgcgcaatcttggccgctatacttttgccgatgtcgcctcttaccgcctgaagcaggggccgatccgcaccctctccgcctgcggttcgctggtggtggtggccctgtatctgattgcccagatggtgggcgccggcaagctaatccagctgctgttcggccttaattaccatgtcgccgtagtgctggttggcgtgctgatggtgctctatgtcctgttcggcggcatgctggcgactacctgggtgcagattattaaagcggttctgctgctgtgcggcgccagctttatggcctttatggtcatgaagcacgtcggcttcagcttcaataacctgtttaccgaggcgatggcggtccacccgaaaggggcggcgattatgagtcccggcggactggtgaaagatccgatatccgcgctctctctgggtctgggtctgatgttcggtaccgctggcctgccgcatattctgatgcgcttctttaccgtgagcgacgccaaagaagcgcgtaaaagcgtcttctacgccaccggttttatgggctatttctatatcctgacctttatcatcggcttcggcgccatcatgctggtcggcgcgaacccggcgtttaaagacgcggccggacagcttatcggcggcaataacatggcggcggtgcacctggcggatgcggttggcggcaacctgttcctcggctttatctctgcggtagccttcgccactatcctggcggtggtggcgggcctgaccctcgccggcgcgtcagcggtgtcgcacgacctgtacgccaacgtcttccgcaagggcgcgaccgagcgtcaggagctgaaggtctccaagatcaccgtgctgatccttggggtggtggccattctgctgggtattctgtttgaaaatcagaatattgctttcatggtcggcctggccttctccatcgccgccagctgtaacttcccgattattctgctgtcgatgtactggtcgaagctgaccacccgcggcgcgatggtcggcggctggctgggcctgctgactgcggtcattctgatgatcctcggccccaccatttgggtgcagatcctcggccatgagaaagcgctgttcccgtatgaatatccggcgctgttctccattgccatcgcgttcattggcatctgggtcttctccgccaccgataactcaccggaagggatgcgcgagcgcgagcagttccgcgcccagtttatccgttcacaaaccgggatcggtatcgaacgcggccaggcgcattaa

SEQ ID NO: 136143 - DNA, 1098 bp, Enterobacter cloacae
atgaaaaaactgatcttattgctcatattggcactgtgtcccgtctatagctgggcggcctgcacgggaaccaactatggcgatgtctcgatgaccaacctgccggaaaagatcctggtcaatgccgggagctataccgcagggacggtactgtatgactcggggaagattacgcgctcgcaaacggaattgcttaactgtgaggggagcacctacgcggtttttgcctggtcctcgaacaatgccggggcactgataggggataatatctatgccacctcggtgcaggggatcggtatccgcgtcaaggtgtggctcaatatcagcggtgaatatggcgatgacaccgatgatttcagccccgactcgcaggtgcattatattggtgatgtgaattattacctcggaaagccgacaggtcttttcgactctttcgcgtcgactcattataccccggcgtatcagctgcagctggtggccaccggcggcgccatcgccagcaagagtcaattatcgttcagcgacccggtggccacggtatcggccaaggataaaaaggggaccatcgctatttcacaactgcacatcagcggcaccaccagcatccagctaatcccgatggggtgtattgtcggtagcaataatctcagtttttccatgggcagcatcaatgccagtgagtttaataccgcgacgaaggtgggtagcgcgcggcagtctctgagcctctcctgcgagccgggaactaacgtttcgatgcgtgtggcggctgcttctgcaagcggggataaccctgacaatacggtgatggccctcacggcggaacagaatgccgccactggcgtgggagtgcagttaaatttgaatggcaaagcactgccgttaaataccgatatcagcctctatacttcgagccgcgcgacggtgaccaacagcggcgcggatgccagctacagctatttcaccaaccccgacagccccggaggcgcagcggccatgcagacgctcgccttatccactaactattacaggacggggagcgcggtgaccgcggggacagccaacgccaccggggtgatcacctttacttataactga

SEQ ID NO: 136144 - DNA, 552 bp, Enterobacter cloacae
atgaatatgcgagacggcagcacaaggggcctcctggcggccagccttttgctgctctcccttccggcgctggcttatgagggcagcagcacggtcaattttaacgtcacgggcaccatcgaagcgccttcctgtgaggtggccgtggagccgtcgaacagtatcgatttaggcaccgtctcctcgcagacgttctccggacatgccggggcgagcggcgccagcgtgccggttaagctggtcttttccagctgttccgccgatgcgtcggcggtgatcatcgcgtttagcggcaccagcttcgatagcacccacgcttcaatctataaaaacttccagactggcagcaacggtgccagcggcgtcggtttgcagctgcagagcatggccgaccagcagccccttggccccggcgaccagtatctctatacctttggggacgatgcggatatccatacctttaatatggtggcacgtatgttttcgccttatggccaggtaaggtccgggatggtcgggtttaccgccacgttcgatgtggcctacaaataa

SEQ ID NO: 136145 - DNA, 2226 bp, Enterobacter cloacae
ttgattaataccaccgcctatccgcagttgttcgaggcaggggaaacctgcgcccggctgtcggcgatccccgggatgacgttctcggtatctcttgcccagcagcggattgattttaccgtgccgcaggccgccatgctgaatcgccccagagactatattcccgagagccagtggcaacaggggatcaatgccggtcttctcaactatagcgtcaccgggcagcgtaatgcgccgcggcataacggcgccactatcgacagtcagttcgtcagcctgcagcctgggctgaatctgggaccatggcgcctgcgtaactacagcacctatagccacagcgataacaacagccgctgggagtcggtttactcctatcttgcccgcgatattcacaccctacgcagccagctggtggtcggtaatacgtatacctcttccggcattttcgacagtttgagttttaccggtctgcagctcagttcggacaaagagatgctgccggatagcctgcatggctttgcgccgacgattcgagggatcgcgcgcaccaccgcggaggtctcggtttatcagaatggttacagcatttataaaaccaccgtcgctcccggcgcctttgaaattaacgatctgtacgccaccggcagcgccggcgacctgtacgtcaacattaaagagtctgacggcagcgagcaaaactttgtggtgcctttcgcgtcgctggcgatcctgcaacgtgagggccagctggactatgcgctgagcagcggcaggacgcgatcgggcagctccgacgataaagaatataactttattcagtcttccctggcctatggcgccaccagcaacatcactctttatactggtttccagcaggcggaagataaatataccaacctgttgttaggcgctggctttaacctcggtactatcggtgcgctgtcgtttgatggctctcagtcgtgggccgacgtgaaaaccagcgatacggcctcgtcaaccagtaaagagcaagggcaatcgtatcgcgtccgcttcagtaaaagctttctgcagacgggcaccagcttttccgtggccggttatcgctactccacctcgggatattattcgtttcaggactttgtcgataactcttccacacagcgcgactgctgtacgcagagcggcagaacgaaaggccggtttgacgcatcgttgtcgcagacgctgtttggctatggttcgctctcgctttcgttggtcaatgagacctactgggacagttcgcgtatggaatcggtgggcgtgggctatagcgggtcgattggcaaggcctcctactttattaactattcctataaccgcaatgtgcaaagcaccgatgacagcagcaataaccggccggccagcgatacggtcgtctccctgacgttaagtattccgcttggcgagacgctctcggcaaattacaccatgaaccatggtcggcataacgataccacgcacagcgtggggctcaacggctcggcgttcgaggatcgttccctgaactggagcgtactggaagggtacaacacgcaggataaaagcacctccggcaacctcagcgtcaactaccagggctcgaaaggggatgtggctggcggctatggctacgaccgctacagcaatcactacaactattcgctgcgcgggggtatggtcgcccatgcgggcggactcacgctatcacgctttcttggcgagagttctgcgctggtcgaaacgcctggcgtcagcgatgtgacagtgcgcggtcagacaaacgtgacgacggatgccgccggatatgcggtggtgccttatgtccgtccgtaccatcgtaacagcctggcgctggatgaacaggaaatacctggcgctgaagtggataacgtcgccagaacggtggttccgacgcgcaatgcgatcgtcaaagtgaagtacgacacgcgaattggctataaggcgatgctcaccctgcgtacccgcaatggcgtggtgcctttcggcgcgctggtgaccctcgataatgatcacggtagcgcgtcgcgcagcaatatcgttggcgatgaggggcaggtgtatctgacggggctgcagaaaaaaggccagctgttagcgcgctggggggagaaaagcagtgagcagtgcaccgttcattatgacttctccggcatggcccttggcgacgatattctgttctatcaggccgaatgtcggtaa

SEQ ID NO: 136146 - DNA, 309 bp, Enterobacter cloacae
  misc_feature (285)..(294): n is a, c, g, or t
atgattatggtatgtcagggaagaaatataccgctatcattcagtagcgttgagctgctattttcaactaaaagtatctgcgtcgctattattctgtgcctaagtactctaccctctcgcgcggaggccggcgaatatttcaacccaaatttactcgaagtcgctgagagtcctgcggcttcggttgatctatcctatttttcgcaagatggcataccgccgggcacctatcacctggatgtttacatcaacgataagtacgtcagttcagactcgctgactttnnnnnnnnnnttttcaggaaattag

SEQ ID NO: 136147 - DNA, 690 bp, Enterobacter cloacae
atgagatatcctttttttgcgatcggtttattgctgtcttcttccttcgcgcaggccagcgtggtcgttggcggtacgcgtctggtttttgatggtacgaaaaataacgctgtaataacggttgagaataaagatcagaacagcaatatcgttcagtcctggctctcggtggttgatgcagcctcacccgccaaagacgcatttattattacgccgccgctgtttcgtctcaaagccggggagaaaggatttgtccgcgtagttcgatcaggaaagaaattacccgacgatcgcgagtcgatgttttggctcaatattaaagggatcccggcaacagaatatgtacctgataaaaatgtcgtacagtttgcgattaattcgaaaataaaattgatttatcgacccgctgcgttaaaaggtaatacaccggaagcgtacgctgaaaaattacagtgggggaaagaggggacgtcggtgacggtaaaaaataactcaccgctgtatatgaatttctcacaggttagccttaacggtaaaaatatttctggcgcatggtttgctgccccgttttccaccttaaaaatacccgtgcagagtagcctgtcggcgacaggaaaaaaagagatcacatggagcgtgattaatgattatggtatgtcagggaagaaatataccgctatcattcagtag

SEQ ID NO: 136148 - DNA, 540 bp, Enterobacter cloacae
atgaagatgagtaaaaaatttctggcgggtgccctgattttctctgcctgcagcgcgctgtctaccgttgcgcaggctgataacaccattacctttaatggtattgtttccgataccacctgtacggcgaccattgatggcggtgtaacggctattgatatgggcaccacctcagtggcggatctgaaagcgtataccttcggcgctgccaagaacttctcctttagcttagctgattgcccgaccgcggaagaaggtggcaacagtgtcgcccgcgtcacttttggcggtgtttccgataccgcgaacagcgattattttaaaaaccaggcaactgatgagccggcaaccggcgtcgctgtggcccttttcgacgaagcgggcaatgtgatgaagaataacgaagagggttctgatgttgatatctcttcgggtgcagcaaccattccgttcaccgttaaaatggtgaaatcgggtgatgccgatccgacgaaaggtaccgttcagacaaccgtgacttataacgtgacctatcattaa

SEQ ID NO: 136149 - DNA, 690 bp, Enterobacter cloacae
atgagcgatgccgtgctgagtatcctgtgcctggtggcgacgctggtcctctattacgccaacaaaaaactgtatcgacgttttcataaactccctctgatgccgctggtgttcacgccgatcctgctggtgctgattctggtggtaggccatatctcttatcagagctatatgggagagacccactggctgctgtggctgctgggcccggcgaccatcgcctttgccgttccggtgtatgaaaatgtcgcggtgattaaacgccactggatgtcgctcagcgccggggtggtgacggcggtagtggtggctgtcaccagttccgtatggctggcgcgcgggtttatgttgtctgatgaaattcagcgtagcctggcggtgcgctcggtgaccacgccctttgcgctggcggcggcgaaaccgctcggcggtcaacccgatctggtggcgctatttgtggtgatcaccggcgtgtttggcatggcggtgggagatatgctgtttttacgtcttgctatccgggaagggatggcgaaaggagccgggttcggcgcggcttcccatggtgcgggaacggcgcgctcgtatgagctgggccagcaggagggcgtggtggccagcctggtgatgatgctgtcaggcgtagtggtggtgctggctgcgccggtcgtgcgctggctgctgttttaa

SEQ ID NO: 136150 - DNA, 408 bp, Enterobacter cloacae
atggccttcgcgccagctcgcgttgcccccgccgtggcgcaacgacttcagatcccggtacaggtacttctctacgtcgggttattcatcttcgcacaatatctggtgaacaggtggcaggtaccgctgccggctaacctggtcggcatggtgatgctcctgctgctgatcgtctgccgggtgataccggtaagctgggtgcgcgccggcgcccgctggctgctggcggagatgctgctgtttttcgtcccggcggtggtcgcggtggtgaactacgcccagctgttgatggtcgatggttggcggatatttctggtgattgccttaagcacgctgatggtgctcggcgccaccgcctgggtcgttgacaaggtctatcgttacgaagtgggcaggttaaaaaaatga

SEQ ID NO: 136151 - DNA, 882 bp, Enterobacter cloacae
atggatatccgaacgctgcgctatttcgttgaagtggttcgtcagcagagttttactcgcgcggcggaaaagctgtttgtcacacagcccaccatcagcaagatgctcaagaatctcgaagatgagctgaactgcacgctgttgatccgcgacggccgcaaactactgctcaccgataccgggcgcgtcgtttttgaacgcggccaggcgatcttgggcgagttcagccagctggagtcagagctgagcgatatcaaccacctgcataaaggggtgctgcggcttggcattccgccgatggtcgggatgctgatggccgagccgatcagtcgcttccgccagcgctatccgggcgtcgagctgaagatcgccgagtttggcggcctgacggtccagcaggcggtcagcaatggcgaacttgatatggcgatgaccgccctgcctgtcgaggaggatagcagcctcaccattctgccgttgttcaatcacccgctgtgcgtcctgacgccaaggaccgcggagtgggaaggtaaaacctcgctctcgccggccgagctggcgtcgcatccgctggttatctacaacgaggaatttgcccttagccagaagctgatgcggctgtttgccgagcatgacgtgaagccacgtatcgcggtgcgcagcggccagtgggattttctcgccgccatggtgcaggcgggcattggcgtagcgatcctgccggaaccgatttgccagcgtctcgaccggcagaatttttgctggatcccgttgcaaagcgagctgcgctgggagctggggatgatttggcgggaaggcgtatatatgtcgcgcagcgctgaggcctggctggcgtgcagcaaagcgttctggctggaataa

SEQ ID NO: 136152 - DNA, 1647 bp, Enterobacter cloacae
atggaaatattctttaccatcctcatcatgacccttgtggtctcactctccggggtagtgacgcgcgtactgccctttcaggttccacttccactgatgcaaatcgccattggcgcgcttctggcgtggccgacctttggtttgcacgttgaatttgatccagagctgtttctggtactgtttatcccgccgctgctattcgccgacggctggaaaacgccaacccgcgaatttattgaacacgggcgcgagatcctcggcctggcgctagcgctggtggtcgtgacggtagtcggcatcggctttctgatctactggattgtgccgggcattccgctgatcccggcgttcgcgctggcggccgtgctgtcgccgaccgacgccgtggcgctttcgggcatcgttggggaagggcggataccgaagaaaatcatgggcattctgcagggggaggcgctaatgaacgacgcctccggcctggtctcgctcaagtttgccgtcgcggtggcgatgggcaccatggtctttaccgttggcggcgccaccgtagaatttctgaaggtggcgattggcggcgtgctggccgggtttgtggtgagctggtcgtatggccgctcgatgcgcttcctcagccgctggggcggggatgaacccgccacgcagattgtcctgctgttcctgctgccgtttgcctcctatctgattgccgaacatatcggtgtctccggcatcctggcggcggtagcggcggggatgaccatcacccgttccggcgtgatgcgcaccgcgcccttggccatgcgcctgcgcgccaacagcacctgggcaatgttggagtttgtcttcaacggcatggtcttcctgttgttgggcctgcagctgccggatatcctctccagttcgctggtggcggcggaggccgaccccaacgttgagacctggatgctgtttaccgacattatcctgatctatgccgcgctgatgctggtgcgttttggctggctgtggtcgatgcgtaagctcagtcagcgcttcctgaagaagaagccgatggagtttggctcctggaccacgcgcgagctgctgatctcctccgttgccggggtgcgcggggcgattaccctcgccggtgtgctctccattcctctgctgctgccggacgggaatgtttttccggcgcgctatgagctgattttcctcgccgccggggtgatcctgttctcgctgttcgtcggggtgattgcgctgccgatcctgctacgtcacattgaatcgagcgataatgtgcagcagcggaaagaggagcgtctggcgcgcgcggcaacggctgacgtggcgattgtggcgatccagaagatggaagagcgtctggcggcggataccaaagagaatatcgatacccagctgctgaccgaagtcagttcgcgggtgatcggtaacctgcgccggcgcgccgatgggcgtaacgacgtggaaacctctatgctcgaagagagtctggaacgccgcttccgcctggcggcgctgcgctctgagcgcggcgagctgtatcatctgcgcgccacccggcagatcagtaacgagacgctacagaagctgctccacgatctcgacctgctggaagcgctgttaatcgaagatcaataa

SEQ ID NO: 136153 - DNA, 1350 bp, Enterobacter cloacae
atgtctacgccttcagcgcgtaccggcggttcattggacgcctggtttaaaatttcggcgcgcggcagcaccgtgcgtcaggagattgttgcaggtcttactacctttctggcgatggtgtactccgtcatcgtggtgccgggcatgctcggtaaagcgggcttcccgccggccgcggtgtttgtctcgacctgtctggtagcgggcgttggctcgctggcgatgggattatgggcgaatctgccgatggcgatcggttgcgctatctcgttgaccgccttcaccgccttcagcctggtgctggggcagcagatcagtattccggtagccctcggcgcagtattcctgatgggggtcctgtttacggtgatctcggcaaccggcatccgcagctggatcttgcgtaacctgccgcagggcgtggcgcacggtaccgggatcggcattggcctgttcctgctgctgatcgccgccaacggcgttggtctggtgatcaaaaacccgctggacggtttgccggtggcgttgggcaactttgacagtttcccggtggtgatgtcgctgattggcctcgcggtgatcattggtctggaaaaaatgaaggtgccgggcggcattctgctgaccattatcggcgtgtcgattgtcggcctgattttcgatcccaacgtccatttctccggcattttcgctatgccatccctgagcgatggccagggtaattccctgatcggcagcctggatatcgtcggcgcgctcaacccggtcgtgctgccaagcgtgctggcgctggtgatgacggcggtctttgacgccaccggtaccatccgcgcagtggctggccaggcgaacctgctggataaggacggacagatcatcaacggcggtaaagcgctgaccaccgactccctgagcagcgtcttctccggtttagtcggggcggcgccggcggcggtttatatcgaatcggcggcgggtaccgcggccggtggtaaaaccggtctgaccgcggtgacggtcggtgtcctgttcctgctgatcctgttcctctccccgctctcttatctggtgccggcctacgcgaccgcgccggcgctgatgtacgttggcctgctgatgctgagcaacgtggcgaaaatcgatttcaatgactttgttgacgcgatggctggcctgatcaccgcggtgtttatcgtgctgacctgtaacatcgtgacgggcatcatgatcggtttcgcgaccctggttattggccgtctggtctccggagagtggcgcaaactgaacctcggcacggtgattatcgctgtggcgctggtggtgttctacgccggcggctgggcgatttaa

SEQ ID NO: 136154 - DNA, 669 bp, Enterobacter cloacae
atgctgacggtacatcatcttaatcaatcacgatcgcaacgcgtactgtgggcactggaagagctgcagctgccttatcagatagtccgctatcagcgggagaaaacgatgctggcgccggcggcgctgaaaaaaatccatccgttgggaaaatcaccggtactggaagacaacggctatgtgctggcggagtccggggcgatcctcgagtatttgcaggaaacctgggacagcggcgggttgttgaagccgcagggaattgacgacaaactgcagtaccgcttctggctgcactatgccgaaggctcgctgatgccgctgctgttaatgaagctggtgttcgctagccttggcaaaccccctgtgccctttggcgttcgctcgctgggttcgctgctgggcaaggggatacagaaaacgtggctcgatccgcagctggccacccatgcgcggttcattgacgaccatcttgccgcgcggccatggttcgctggcgagcggctgagcatggccgatatccagatgagcttcccggtgatggcattgttggcgcgcggcggcatgcatgaccttgtccatatcgaggcctggcgtcagcgagtggaacagcgaccggcctggcaacgcgccatcgagcgcggcggccccttcaccttacccggcgcctga

SEQ ID NO: 136155 - DNA, 459 bp, Enterobacter cloacae
atggaaaagaaatcaccccgcatcaaaatgctgttgacgcctggagaagtggcaaaacgaaccggcgtggcggtctcggccctccatttttatgagagtaaaggattgatccacagtcagcggaatgccggcaatcagcggcgctaccggcgtgacgttctgcgcgcggtggcgattatcaaaattgcgcaacgtattggcatcccgctggccactatcggcgacgcgtttggcgtgctgccggaagggcacaatctcagcgcaaaagagtggaagatgctgtcatcgcagtggcgtgaggagctggatcggcgcattcataccctgacggcgctacgcgaccagctcgacggctgtatcggctgcggctgtttatcgcgacgcgactgcccactgcgcaacccgggcgataaactgggggaagagggaaccggcgcccggctgctggaagacgagtga

SEQ ID NO: 136156 - DNA, 330 bp, Enterobacter cloacae
atgtcccatcaggatattattcaaactttgattgaatggattgatgaacatatcgatcaaccacttaacattgatatagtcgccagaaagtcaggatactcgaagtggtacctgcagcggatgttccgtaccgtgatgcatcagacgctgggggactatattcgccagcgccgcctgctgctggcggcggaagcgttgcgaaccacccagcggccgatctttgatatcgccatggatctgggctacgtctcgcagcaaaccttctcccgggtgttccgccgcgagtttgaccgcactcccagcgactatcgccatcagatctccgcgtga

SEQ ID NO: 136157 - DNA, 1605 bp, Enterobacter cloacae
atgggtgacagtgcgccgcataaggcgctaagactcatcggaacaggtttggttattttattgccagtggtgctggcattgtggtttgcccagctgcgggctaaagccgaaaccattgatcaattacactcattttcgcagctggcgctgcaaaaaacggaaatggtcatccgggaagcggatcaggctcgggctaaagccagccagtatcgcggtgagttgtgttcagcggatcaccagcgttatttactgcatattgtgcgcggcctgctgtatgtggaagatctgatctacgctaacggccagcgctttatctgttcaacgtccgttcatcagcaaaccggctggcggatgccggcggctaattacaccaaaaagccggatgtcgcgatttactattaccgggacacgccgttttatccgggctttgccatgaattatatgcagaaggggccctatgttgtggtggttaatcccttctcgtacagctcggtgatcgccagcgaccgcgatttagcctatggcgttttcgataccaaaaccaacctctttttctcggtaagtaacaatgtcgagcccgcggaactccatgcgttaattcgcgaaggcgataccttttttaatcagaatggccgggtgtatacgatcgcccgctccgctattcgccccatcgccgtcattatgtccacctcgcgggccagctactatcacaacttttgtgaccaggccagtctgacgctgccgctggggataatttgcagtattttactggtgctggtgtggtcgcgcacccgccgacagtatcactcgccgcgcaatatgctgcagcgggctctgagctgccgccagctgcgcctgcactaccagccgattatcgatattaaaaataaccgctgcgttggggcggaagcgctgctgcgctggcctgggtttgacggtccggtgatgaacccggcggagtttattccgctggcggaaaatgaaggcatgattgcccaggtcacggactacgtggtggatgaactgttttatgaaatgggtgagtttctggccagccatccacagttgtatatagccatcaatctctctgcgtcggatttccattcggcgcggctgatttcacagatcagtgagaaagcgcacagctacgcggtctgtatcggacaaatcaaaatcgaagtgaccgagcgcgggtttatcgacgtaccgaagaccacgccggtgatccaggcgttccgcgaagcaggctatgaaattgccatcgacgatttcggcaccggctactcgaatctgcataatctgcacgcgctgaacgtcgatatcctcaaaatcgataaaaccttcgtcgatacgctcaccaccaacaacaccagccacctgattgctgaacatatcatcgagatggcgcgcgggttgcggttaaagacgattgcagaaggcgtggagacgccggagcaggtaagctggctctacaagcgcggcgtacagtattgccagggctggctgtttgcgaaagcgatgccggcgcgggagtttatgcagtggttagccaatgctcccgcgcccgcgaacgtgcctcagccgccgcgtcacgcggagatctga

SEQ ID NO: 136158 - DNA, 282 bp, Enterobacter cloacae
atggcttccattactaccagtgtcgtattattgcgctggcccctggtgagcgcggtactgatgtttctcgccagttcactgaatattcagcttcgcaaaagcgattacgccggtctggcggtgatctgcagctgcctcggcctggccgccgcctgctggttcgccaccggtttgctcggtatcaccctgcttgatatagccaaaatctggggcaatatcaaagatgtgatgattgaagtcatgagtcagacgccgccagagtggccaatgatgatgacctga

SEQ ID NO: 136159 - DNA, 858 bp, Enterobacter cloacae
atgaaagcgctggccctcgtatcaaccccggcatggtgggtgaaagggcgccgtaaagtgcgcgccagtccggtgctgcagaccctgctgctgttgtttatgctgctggcgatgtttggtccgctgctgaacctgttgatctggaccgtagcggaaagctggtattttccccattcgctgcccagtcggtgggggctgaagtactggtatcaggttttcaatccatacagcgatgtctccagctcgctgttaaccagcgtgctgatcgctctgttatcggtgggggtctgtttgctgatttccgtacccgccggctatgcgctttcccggcggaaaatgccattacggatgctgttcatgctgctatttcttatcccgcaggcctttcctaacctgacggtatacatgaatgttgccagattgttttatcagtggggattgaacggcagtatcgcaggggtggtgctggtgcatagcgtccacggtctgatgtactcggtgtggatctgtgtggccgcgttttcagccatcgacccgctgctggcgcgggcatcgcgtaacctgggcgccgggccggtgtataccttctggcacattgtgctgccgcaggcggcgccggggatcgttgccgccagcatctttgtttttctggagtcgctggatgagtttaccggcactttcttcgtcggggcgccggatatcaccacgctgccgctgctgctctataacgccagcatgtcgggtaactatcaggtctcgtcgattaccgcgctgattttgctggtcccatcgctgctctttatggtggtgatccataaatttatgcgtccggagatgatggccaaattagggaaataa

SEQ ID NO: 136160 - DNA, 834 bp, Enterobacter cloacae
atgtccagttcattaaaatatctgctgctggttgccccagcggcgctgatgatcgcgatcctgtttttgtatccgctggggttttcgctggtctcggcgtttaccgcgccgggacagccgttcaccctcgatcacttccgcaaggtctatgcgctctacgccagcgatgtgctcttttcgctgcttattgtgctgatctcggtggcgctgttagcgctgctcgccattaccctgtcggcagtgattgcgctgtcaccctgccgacccgttgtgcgtctgctgggttttttgtatcgcctgccgctgtttattccttttatcgttgttgcccagatgatgcgcacttttctcgccaaaaatggcctgatgaacaatgcgctggtggcggccgacctggtcacgccgctggagacgctctcctggctgggatggaaagggatagtgatcacctttgtctggaagcaactggcctttgccacgctgctgatctgcggggcgatggcggcgctggagtcgtcgcagatccttgctgcacgtaatcttggcgcctcccggccgcggatcctgttcgatatcatgctgccgcaggtcctgccgactatcggcgtggcgctggtgctgtcgacggtgaccatgatgtcggtgctgtcggtaccgttgatgatcggcgtggggaccccgacgatgctaaccgtggatatggcgtttcgcgtcaattcctatggtgattacgcggtggcgaatgcgcttggcgtggtgtcgctggcgatctgcggcgcgctgtcgtggttttacctgcgccacagcctgcagcaaaaaggcggtgaatcatga

SEQ ID NO: 136161 - DNA, 1182 bp, Enterobacter cloacae
  misc_feature (774)..(783): n is a, c, g, or t
atgttgactaagacgaaagcagcgatcgtaacgaccctcttcctgagccttggcgcacaggccgacaccattctcaacgtcgctaccgcgggcgatcagaatatggtggattatgtaaaaacctggctggggccaaaatttgaagccgctcatcccggcgtcaaggtgcgggtgatcggtaccggccccggcgacgccgggtcgaataaaattagcgagaagctaacggcccagcaggagagcggcgcgcagcagtgggatatcgacgtcgcggtagtgcaccagaaggcgggcggtgagcaggtggcaaagggattgctgcaaaaataccgtcaggatattcagaccggcggcatggtgagttcgccgagcgccacccaggcgctgggcgttaacgttgacggatacgtgatgccgatgttcttaagccagaccgctatcgcctggaacagcgatctggtcactaccccgccggcgtcgtatgacgagctggtggcctggacgcagaaacacccgcaggcttttggctataacggcatcaagaacggcatgtccggcgtcagctttgtggtgggctggatctacgcctacgggaccgacgcccagcgtctctccgccgggccctatgataaaagcgtcgaaaaaggctggcagcaggcctatgagaagctaaaggcgttcaataaaaacgtaactttcaccccgggcaacgccgggacgctcgatatgctgagccggggggaaatcgccatgggcccggtgtgggtcgatatnnnnnnnnnngaaatcgccatgagcccggtgtgggtcgatatgttctatagctggaaagatcagggcaagctgccgccgtcgatcaagcttgctttactggcgccgggcatgccgggccagccgatgtattacgtcatcccggcgaaggcggcgaatccgcagctggcgcgcgactttatcgcgctggccaccagcccggaagtgcaggcgcaggggatcgtcaagcagttcaactggtatccgggcatcgacgccgggcaggtgaagccgaagctggatgcggcgacctggcaaaagctgtttgccgaaatctcgccggaagcgctggcgaagtatggcaaaagcttcccgatcgccccctactttgacgatatcaaagagggttacgaaagccaggtggctaattaa

SEQ ID NO: 136162 - DNA, 1062 bp, Enterobacter cloacae
atgccgcagcagcgctttcaggtagcgaatatgagttatttacagatctccggccttaaaattagttatggcgataaggtggttttacataatatcgatctggcggtagagcagggagagatgattgctctactgggcccgtcgggatgcggaaaaaccacgctgctgaacgccctctgcggctttattccggtgcaaagcggcgaggtggctattgccagccgaacgatcactcatcttgcgccggagcagcgcaatatcaccatggtatttcaaagctacgccctgtggccgcacctgacggtagcgcgcaatatcggctatggcctgaagctgcgcaaatggcgcggggcggatatcgcgcggcgggtggcggagctgctgcgaatagtcaatctcgaagggcttggcgaggtgaaagtgaccgaactgtcgggcggccagcggcagcgggtggcgctggcgagagccctggccatagagccccaggtgctggtgttggatgagccgttatctaatctggatgccaaagtgcgcctgaatgtgcgccatgaaattaaatctctgcaaaagagactggggttcacgtcattaattgtcacccacgatcagcaggaagccttagtgatggcggaccgcattgcggtattaaatcaggggcgtattgaacaaaccggcacgccggaagaaatatatcaacgccccgcgacgcccttcgtcgctgattttatgggggccgataataaaataatttccggtgaattatccgctgccgcaatatccggtttatctgccgctcagcagggtgacaacgttatttattttcgcagcgccgatgccgcgctcgctgaattaacgcagcctgcgccgcaggaggggctggctctggaaggcgtggtggagcaaagcgcgtttctgggcaatctgtatcgtcacagcgtgcgctgccatgaccgcctgctgctggcggatgccgcgcagtgctggccgacaaaaagccgcgttcggctccatgtgccaacgccggccctgcatatttttcctttaccactatcacagtga

SEQ ID NO: 136163 - DNA, 771 bp, Enterobacter cloacae
atgaaaatagatgtgcttggctgcgggagcgccttttcctgcacgcaaaatacctccgcgctgcgggtgatcgatgcggacaacaaacagtggttaatcgactgcggccccaccgttccccgcgcgctctggcagcgcggcggcgaggtcaacgatatcgacgcgatctacttcacccacgttcacccggaccactgcaccggcctgacggcgctactgaaccactggaaaagttattcccgtcagaagccagtcattatctactgccagccggcgcagcagccggtgctcatgcagctggccgcgctggcgaactggccgcaggcggaccttggtttcaccatcgactggcaggaatgccgcgaagcctggacgtggcaggactggcagatccgcactgcccccacccagcatgagctgagtaatcgcgccatccgcatcaccattgccgggcagacgctgttttacagcggcgatggccgaccgaccgccgactcgatagccctgatggccggcgccgggctggcgtttcaggagtgcgcctcggtagcagccctggacgatgacgcctcgcatggcgatttcccctcctgcctgatgctgttcagaacgctgcagctcccggcgctggggctctatcactgcgaggatgcttccctgtcggcgctaaagcaggcctgtcagccgtggccgggcttattcgtttcccgggatggactcaccttaacgctgccgcgtcccacgcccactgacgagacgtacctcctatga

SEQ ID NO: 136164 - DNA, 1014 bp, Enterobacter cloacae
atgaacccacgcaaacccagcgtcaccgcccaggatgttgcccggcgagcgggcgtctcccgggcagtggtgtcccgggcgttgagcaacaacggcagcatctctcccgacgcccgggcgcgggtactgcgcgccgccgaagagctggggtaccaggttaactttcttgcccaggggctcaatcgccagcgcagccacttaatcggcgtgatcgtctcgcgcatcagcgatccttttcgcagtaccctgcttgatgcgctgcttaacgagatccagcgccaaggctttcaggcgctggtgagcgagatccacagcgagcaggatctggcgcagaccttgcgccgtttcgctcagtttcgcgtctccggcgttatcgtcacctccggccagccgccggaggcgctggtgaacgagtgcgtccagcagcacattccggtcgtgggcattaatcgacagccgacgatccccggcgtggattacgtttgttctgacaacgccgccggcgccgaactggccgccgaccaactgctgcgcagcggctgtcagcgctttggctggctcaaccaccatccttccacctgggccggccgcatgcgcggggaagcgttcggccgggcgctgcaaacgcgcggagtggacctcgaacgccacctcgcgatcctcgcctgtcagcaagaaggttacgcgggcgggttacaggctgcggcgctcgccgacgaggcgctggaggggatcttttgcgccaacgcccagcttgcctgtggctttctcgatggaatgcgccagcgcggcagagaggctccggcggattttcagctgattggttttgataacacgccgacgaccgcgcaatatagctatcagctcaccacgctacatcaggatgtggcggcgatcgcccgccaggcgctcgcccggcttctggagcgcgccgccgacccttcgcaaccttcacgcaccacctgggtggaggtaaccttaattcaccggcgcacgtcgccctttgttatctga

SEQ ID NO: 136165 - DNA, 762 bp, Enterobacter cloacae
atgacggaagcacaacgagagtcactatgcgccttgattcgccaggcaggcgcccacgcccaggcgctgcgcgatgcgggattacaggtcgataaaaaagcgcgccaggactttgtgtcgcaggcggatctcgcggtagaacaagagattaaaggctggctgcaggcccactttcccgaggagggtttcctcggcgaggagagcggttttgaaggcgacgaccagaccgtctgggtgctggatcctgtcgatggcaccaccaactttattctcggcatggattactggtgcatctcactggcgcgagtgtgccagggcgagctgtcgctcggcatcatttacgcccccgatcgcgatgaatttttcttcgccgcccgcggcgaaggcgcgtatctcaacggtcggcgcctgacgctacgcgagccggagcccgatgcggtggtgatcggcatggggcgctccagccgggccccggccagcgactacgcccgggccatcgacacgctgctcgacgccggcctggagtatcgccgttttggcgcgggcgccctgatgctggcgcatgtcgccgccggtcagctccacgcctattatgaagcgcatatgaacagctgggatgcgctggcaggcatgctattgattgaggaggcgggcggaacgtgcaatgcgtttctcgccaatgcgggcctgcggcgaggcaacctcgtgctggccggctgcgcaagcgtccagcctcgactggccgccctgctggcgaaatga

SEQ ID NO: 136166 - DNA, 354 bp, Enterobacter cloacae
atgaaatggactattcttaataccctgatctgcccgcaatctggtatcgccttctcggctatatccagtctgcgtttcttgaaatttatcatgtggtacgaggctgatgtaatcctgttgcccggtgagtcgataagactctattcctcgagagttttaattaatgaccagtatcattcattaaaaatctataatattacggtgtacgacgaggcgcagtgggaaaaattacgtgagcgaccatcgtgcccttaccatgccggtggcgagcggtctgactcctgtttttaccagtccttttgcacgattaagcgttgcccgaataatattccccgcagtgaaccctggcgttag

SEQ ID NO: 136167 - DNA, 585 bp, Enterobacter cloacae
atgctgagcgccgccagctgtttgcagtggttctgccgcctgaccggcaccacggaggtggcgctgctggcggagattgccgagctaagcgaggaggataaagccaacgcgccgttcttcctgccctatctctccggggaacgaaccccgcataacgatcctgacgcccgcggcatcttctggggcatgacccatgccagcctgcgcgcgcagctcggctacgcggtgctggagggggtgagctttgggatcaacgacggcctgcaggcattgaaagagagcgggacgccgatcgcgcagtgctcgctggtgggcgggggcgcccgcagtccgttctgggcccagctgctggccgatattctcgctatgccggtggtgacccacaaaggcggagagaccggcggcgcgctgggcgcggcgcggctggcctgcctggctgcgggcaaaccggttgccgcggtgtgtgaaaaaccggaagtctggcagacctggcgtgcggatcccattcgccaccacatcctgatgcaacgctacgcgcagtttaaagccctgtatttaaacgatctgcactatcgacagcactga

SEQ ID NO: 136168 - DNA, 1278 bp, Enterobacter cloacae
atgtctatcaataataaacagtggctcggtttacccctgaacctgctctggggatacatcgccattgccgtatttatgaccggcgacggttttgaattagcctttctgtcgcactatatcaaagcgctcggcttctctccggcggaggcctcctttgcctttaccctctacggcctggccgccgcgctgtcggcgtggatttccggggtggtggcggaaattatcaccccgctgaaaacgatgatgattggcttcgtgctgtggtgcgtattccacgtgctgttcctcgttttcggcctcggtcacgccaactatgcgctgatcctgcttttctacggcatccgcggcttcgcctatccgctgttcctctactcgtttatcgtggcgattgtccataacgtcaaaagcgacaacgccagctcggccatcggctggttctgggcggtgtattccatcggcatcggggtcttcggcagctatattccgagctttaccattccgcacattggcgaaatgggcaccctgtggctggcgctggccttctgccttaccgggggcgtgattgccctggtttccctgcgccatattcaaacgccgcagcatatgcagaatctcaccacccgtgagaagttttccgagctgggacgcgccgcgacgctgctctataccaaccgcaatattctgctgtcgagcatggtgaggattatcaataccctctcgctgttcggttttgcggtgattatgccgatgatgtttgtcgatgagctgggcttcagcacttcagaatggctccaggtatgggcagtcttcttcttcaccaccattttctataacgtgctgtgggggatcctcggggaaaaacttggctggatgaaggtggtgcgctggttcggctgcatcgggatggcgctctccagcctggcgttttactacattcctcagcactttggccatagctttgcgatggcgctgatccccgccatcgccctcgggatctttgtcgccgccttcgtgccgctggcggccgtgttcccggcgctggagccgaagcataaaggtgcggccatttcggtctataacctgtcggcggggatgtcgaactttctcgcgccggcgattgccgtggtgctgctgccgttcttcagcaccatcggggtggtgatcgcctataccggattgtacgtggtggcctttttcctctgcgcctttatccgcgtggagcagccggggttctcccacaaggaagcaaccgcccgcgagcaggttgaattctcatag

SEQ ID NO: 136169 - DNA, 663 bp, Enterobacter cloacae
atgagtatgcaggcggttatttttgacatggatggcgtgattattgattccgaggcgctgtggcgtcaggcgcagattgacgccctcgcgcagtggggggcaacggcgagcgttgctgaatgtgaaaccctgaccaagggcaagcgcctcgacgacattgccggcacctggtgccgctattttcagcttgatctcgctccgcagcggcttgaagacgccatcctgcagcgcatcacccgcctgattgccgcgaaaggcgaaccgatgcgcggggtgcaggaggcgttacgctattttcgcgaagcgggttataagattgcgctcgccacgtcatcatctcgtcaggttattgccgctgtgctgaacaagctttcgctctggcacttttttgacgcgatctccagcgcggatgatgaaccacgcggcaaaccgcacccggcggtgtacctcacgacgctgcggaagctcaatctcaacgccagccagtgtctggtgattgaggatagctttaccggcttttgcgcggcccagtcggcggggattgccacgatagtgattgcagaagatagccagcacgcgcgttttcaggccgccgctggccgctatcaaaccttacctgaactgctggaagcgcttagcgcggagccagcggcggcggtttaa

SEQ ID NO: 136170 - DNA, 1155 bp, Enterobacter cloacae
atgaaaattgaatctgtgaatgtcaccgttttccaatatcccactcgtcgggtttccgacagcgccgggcactcccatccgggggttgaaagcatggccaaaatggcgatgctgaccatcaccgctgatgatggagcgcagggcttttcgtttgcgcctccggaagtcgtgcgcccgttcgtggtgaatactttttttcgcaaagtgctggtgggacaggacccgtttaaccgtgagcgtatctggcaggatcttaaccactggcagcgcggcagcgcacatcagctaacggagcgcgcgctgtcgtttgttgaacaggcgctgtgggacctgatcggccgcagccttaagatgccggtttataagctgctcggcggctatcgcgacactgtcccggcttacggtagcaccatgtgcggcgacgatctgccgggcggcctgtcgaccccggaagagtatgccgcttttgctgagaagctggtcgcccgcggctacaaggccatcaaactgcacacctggatgccgccaatctcttttgcgcccaatcccaaaatggacattaaagcctgcgcggcggtgcgcgaagccgtagggccggatattgacctgatgattgatggctatcactggtacagccgcgccgaggcgctgtggatcggcaaagagctggaaaaactcaatttcgcctggtttgaagagccgatggaggaggattcgatgtcttcctatgcgtggctggcggaaaacctgtcgattcccatcgtcgggccggagagcttcggcggcaagcaccacatgcgcgccgaatgggtgaaagccggggcctgcgacattctgcgcgccggcgctaacggcgtgggggggattacaccgaccatgaaggtggcggcgctggcggaatctttcggcatggattgcgaagtccacggcaacggagcggcaagcctggcggtggtgggcgcgatccgcaactgccgctggtacgagcgcggcctgctgcatccgttcctcgactacgatgaaccggcggcctatctcaacagcattgtcgacccgatggatgaccagggatttgtgcatttgtcacaacgtccgggtctcggtgaagacattaattttgcgtatatcgaagccaataccgttagccacgactga

SEQ ID NO: 136171 - DNA, 1623 bp, Enterobacter cloacae
atgaaaaaaacctccttactgggagcgtgtattctcgcgctcgccatgtcgatggggagcggggaggcggtggcgaaaacgccgcccgaccagctgatcatcggcatgaatatgaataacctgctcacccttgacccggcggcgatgaccggtaacgaagtggtggggatcgtggtcaacctctacgactcgctggtggagcttgaccctgagcagctcaccaccgtcaggcccgcgctggcgaaatcctgggatatcagccccgacggcaaaaccctgacctttcatctgcgcgatgacgttaagtttcactccggcaacccgctgaccgccgccgacgtcgtgtggtcaatgcggcgcatcctgcacctcaacctggcccaggcctcagtatggaaatcctatggcttcagtaagaaaaatatcgacagccaggtcagcgcgccggaccgcttcacggtgcaaatcgtattacccaaagataacgatccgcagctggtgatttactcgctggcggcgctgggcaacctcggagtgctggacagtaaaacggtgcaaagccaccagcaggataacgactggggtaaccgctggctaaccacccatgaagccggttccgggccgtttatcctcgaaacctggcaggcgaaagatgtgctgcgcatgaagcgcaaccctgactactggcgcggcgaggcgaaaatgagccgcgtggtactgcgtcatttccaggagtcgcaaactctgcgcctgatgatcgaaaaaggcgaccttgatattgccaacaatatggcggtttccgatatcaacgccctgcgcagcgacccgcagctgaccgtcgatgcggtgcagcgcggcaccatgtactacgtggcgatgagcatgaaagaggcgcacttcgccaatccgaaagtgcgcgaggcggtgcgctatctgattgattaccagggtatcaataaagcgctgatgccgggctacggcgtgctgcaccagcggcctatcaaagcgggaatgccgtccacgctacccgatcccggctacaggctggatgtggcgcgggcgaaaaagctgctggcggaagcgggatatcccaacggctttgataccacgctgcgggtactctccgatcagccatttcttaacatcgctatcgccgtgcagtcgacgctgatgcaggcggggattaacgccaaaatcatcaccggcactggtaaccagatctacggcgcaatgcgcgagcgtaaatttgacctgctggtaggtcgcggcggcagcgggatggagccgcatccgcactccagcctgcgcgcgctggtctataacccggataacagcgataaggcgcgcctgaccaacttccagggctggcgtaccggtttttacgacccgcaactgaatacgatgattgaccaggccctgctggaacgcgatccgcaaaaacaggtggctgactaccaggccatccagacacgctacgaccagctggttccggctttaattccgctttcgcagatggttgattcggtcgtcgtgcgcaacgaggtacgggagtatcagccgcacccctccgccaccacttttctgcgtgacgtctataaagtccgcgaaggagagaaaggatga

SEQ ID NO: 136172 - DNA, 1038 bp, Enterobacter cloacae
atgagtaccgcaatccttgcgcccggctcacgcggccggcgcttatcaaaacggctactgcaggtggtgattacactgttcggcctgctgctgctgacctttaccattggccgcgtcatgcccatcgacccggtgctggcgattgtcggcccggatgctgaccagagtacctatcagcaggtttaccagcagctggggtttgataaatcgctgaccacccagtttggcatctatttcgtcaacctgttgcacggcgatctgggcaacgcgctgctgaccgggaaaccggtggtggacgatattatccgcgtcttcccggccaccatggagctggcaacgatggcgattattgtcggcgcgggtcttggtattccgctgggcgtgttggcggcggcgcggcgcaatagcgtctccgattatgtggtacgcattatcagcctggcgggctactcgacgccgatcttttgggtcgggatgatggggctgctggtgttctatgcctggcttggctgggtaggcggcgccgggagggtagatctcgggctggatggtgtggtgtcgcgccgcaccgggctgatgaccgttgatgcgctgctggccggcaacggccaggtgttctggaacgccattaatcatctgattcttcccgcctcgctgctgggttttcactcgctggcttatatcagccgtatgacccgcagctttatgctggcccagctgtcgcaggagttcattattaccgcccgggtgaaagggctgaccgagcgccaggttatctggaaccatgcgtttcgtaacatcctcgtgcaactgctgacggtggtggcgctggcctacggcgcgctgctggaaggcgcggtgctgattgaaaccgtcttctcatggccggggtttggctcctaccttaccggaagcttgctgctgggcgatatgaatgcggtgatgggctgcgtgctgctggtgggggtgatcttcgtgatgctcaacctgctctccgacatgctgtatcaattctttgacccgaggacaaaatcatga

SEQ ID NO: 136173 - DNA, 864 bp, Enterobacter cloacae
gtgacatcctcgatccccgtagtgaataatgcaccgctgctcgacgtgcgcgatttgtgcgtcgactttgttaacggtagcgcggtgacccacgccgtgcgcggcgtttccttccagctggggcatgagaagctggccattgtcggcgagtccggttcgggtaagtccaccgttgggcgcgcgctgctgcagctgcatccgaaaaaggcccgcgtcagcgccagccggatgcagtttgccgacctcgatctgcagcatcttagcgaagcgcagatgcgcggcgtacgcggcaaacgtatctcgatgattatgcaggatccgaaatattcgctgaatccggtggtctgcgtgggtaagcaaatcgccgaggcctggcttactcatcatcccgggcgcaaagatgaggcgaaagccagggcgctggagatgctggaggtggtgcgtattcgccagccggagcgcgtttatcagctttatccgcatgaaatatccggcggacagggacagcgcatcatgatcgccatgatgctgattaccgacccggagctgatcattgccgatgagcccacctccgcgctggacgtgtcggtgcgcctgcaggtgctgggcctgctggatgacctggttcagtcgcgcgggctggggctgatttttatcagccacgatatcaacctcgtgcgcagcttctgcgaccgggtgctggtgatgtacgccggacgggtagtggagtccatcgccgctaaagatctcgataacgcccgtcacccctacactcagggattgattaactcgctgccggatatgcagcatcgtcgcccgatactgccggtgctgcagcgtcaggccagctggttaacggattaa

SEQ ID NO: 136174 - DNA, 774 bp, Enterobacter cloacae
atgattgaagttcaacatctcaacctcgcgtttggcgagggggagaagcgtaaccaggtgctgtatgacgtcagtttccacgttaagcccggcgagatctacggtctggtaggagagtccggttccggtaaaacgacggtgctcaagtgcctggcggggctgtttacccactggcagggggaactgaccatcgatgctcagcccttagggcatgaaattagccgcgagcgctgccgtcaggtgcagatggtatttcaggacccctacggatcgctgcatccccgtcacaccattggcgatatcctcgaagagccgctgcagatccatcgtatcaacgaccgcgaccggcggatcaatgtgctgctggataaagtaggcctcaaccgcgcctttcgcgagcgctatccgcatcagctctccggcgggcagcggcagcgcgtggcgatagccagagcgctgattcttgagcctcaggtgctgctgctggatgagccgacgtcggcgctggatgtgtcggtgcaggctgagatccttaacctgctggcagaattgcagcgggaggctaagctcacttacctgatggtcacccacgatcttggggttattgcccacttatgccagaaagtggcggtgatgcagtacgggaagatcctcgaaaccctgacggtcgatgcgctggtcagcggccaggcgcagatggcctatacgcagatgctggttaacgccagtcggcaatatacgcgcgaaatggcgcgcgaggtggcggaatactaa

SEQ ID NO: 136175 - DNA, 897 bp, Enterobacter cloacae
atgatgtctacgtttcctgccagcttactgatccttaacggcaaaggtgccaatgaaccgcagctacgcgaagcggttaacctgttacgcgatgaagggattgatattcacgtccgcgtgacctgggaaaagggcgatgccgctcggtttatcgatgaagccctgcagctgaacgttgaaacggtgatcgccggcggtggcgatggcaccattaatgaagtggcgaccgcgctggtggagcgcggcggcaagatggcgctggggattttaccgctgggcacggctaacgactttgccaccagcgtcggtattccgcaggacctggccagcgccctcaagctggcgatcgtcggccgcgatgtgccgatagatatcgcccgggtgaatgataaaaccggctttattaatatggcgaccggcgggttcggcacccggatcaccaccgaaacgccggaaaaactcaaggccgcgctcggcggtgtctcttatttaatccacggtctgatgcgcatggataccctgaagccggaccgctgcgagatccgcggggagaactttcactggcagggcgatgcgctggtcatcggcatcggcaacggccgccaggccggcggcggtcagcagctgtgtccggaggcgttgattaacgatggtctgctgcatctgcgcattttcaccggcgaagagctgatccctgccctgttcagcaccctggcgaatccggaaaactcgccgaatattgttgacggtgtctcctcgtggtttgagatcaccgccccccatgagatgacctttaatctcgacggcgagccgctcagcggcaaaaccttccgtatggagctgttaccggcggccctgcgctgccggctgccgcccgactgcccgctgctacgctga

SEQ ID NO: 136176 - DNA, 723 bp, Enterobacter cloacae
atgactgaattgcctgtagatgaaaacaccccacgcatccttatcgtggaagatgaaccgaagctcggccagctgctgattgattatctgcaggccgccggctatgcgcctgcgttgattaaccacggcgacaaggtcctgccctacgtccgccagacgccgccgcacctgatcctgctggatctgatgctgcccggtaccgacggtctgacgctgtgccgggaaattcgccgcttctccgatgttccggtggtgatggtgacggcgaaaatcgaagagatcgaccgtttgctggggctggaaataggcgccgacgactatatctgcaagccctacagcccgcgggaagtggtcgcccgggtaaaaaccatcctccgccgctgcaagccgcagcgcgatctgcaggcgctggacgcccagagcccgctgattgtcgacgaaggtcgttttcaggcctcctggcgcgacaagctgctggacctcactcccgccgagttccggctgctgaaaaccctctcccaggagccgggcaaagtgttctcccgcgaacagctactcaaccatctgtatgacgattatcgggtagtcaccgatcgcaccatcgacagccacatcaagaacctgcggcgcaagctggaggcgctggacgccgagcagtcgtttatccgcgcggtgtatggcgttggctaccgctgggaagcggacgcctgccggctggcgtag

SEQ ID NO: 136177 - DNA, 1479 bp, Enterobacter cloacae
gtgaaattttggcgcccgggtattaccggcaagctgttcctcgctatattcgccacctgcatcgtgctgctgatcagcatgcactgggcggtgcgcattagttttgaacgcgggtttatcgactatatcaagcgcggcaatgagcaacgcttaaccatgctcagcgacgcgctgagcgagcagtatgcccagcatggcagctgggcgtttctgcgcaataatgaccgctttatcttccagctgctgcgcaccttcgaacgggataacgacgaccgctcgccgccggggcacgccatgaagccggacgccgccccggacgggccgccgccggatggcccccctgacggcccgcgcccgaggccggaaatgccgccccacggctggcgcaccatgttctgggtggtggatcagtcggggcgcgtgctggtggggccgcgtgagcgcgtcccggaggacggcacccagcgcagcatcgtggtcaacggcgcggaggtgggcaaagttatcgcctcgccggtagagcggctgacgcgcaataccgacattaacttcgaccggcagcaaaagcgcaccagctggctgatcgtcgcccttgccaccctgcttgccgcgctggccactttcccgttggcccgcggtctgctggcgccggtgaagcggctggtggaaggcacccataagctggcggcaggcgacttttccacccgcgtgacggtgaccggcggcgatgagctcggccgcctggcgcaggattttaaccagctcgccagcaccctggagcggaaccagcagatgcgtcgcgatctgatggccgatatctcccatgagctgcgtaccccgctggcggtgctgcgcggcgagctggaggcgattcaggacggggtccggcgctttacccccgagtcgattccttctctgcaggctgaggtggctaccctcaccaagctggtggacgacctccatcagctgtcgatgtccgacgagggggcgctggcctaccagaaaacctcactggatatcatcaccctgctggaagtggcggcgggcgcttttcgcgagcgcttcgccagccggcagctaagcattcaggtgtcgctcccggagcaggcgatgatcttcggcgaccgcgaccgcctgatgcagctcttcaacaatctgctggagaacagcctgcgctataccgacagcggcggcagcctgcacattaccgcccgccgcagcggccggatgctggtgattgacttcgccgacagcgcccccggcgtcagcgatgagcagctggcccgcctgtgcgaacgcttttaccgggcggaaggatcgcgcaaccgcgccagcggcggctccggcctcggactggcgatttgcctcaatatcgtagcggcccacggcggcaccctgcgtgccgaccattcgccttttggcggggttagcattaaagttgagttacctctggaacatgatttaccgagagacgtatga

SEQ ID NO: 136178 - DNA, 1416 bp, Enterobacter cloacae
atgacagacctcccggccagcgtgcgctggcagctatggatagtggcgttcggcttctttatgcagtcgctggacaccaccatcgttaacaccgccctcccctcgatggccaaaagcctcggggagagtccgctgcatatgcatatgattatcgtctcctatgtgttaacggtggcggtgatgctgccggccagcggctggctggccgaccgggtcggggtgcgcaatatcttcttcaccgccatcgtgctgtttaccgccggatcgctgttttgcgcccaggccagcaccctcgaccagctggtgatggcgcgggtgctgcagggggtcggcggcgcgatgatggtgccggtcggccgcctgacggtgatgaagatcgtcccgcgcgatcagtatatggcggcgatgaccttcgtcaccctgccgggccaggtcggcccgctgctcggcccggcgctgggcggcgtgctggtggagtacgcctcctggcattggatcttcctcatcaatatcccggtggggatcgtcggcgcgatcgccaccctctgtctgatgcccaactacaccatgcagacccggcgcttcgatctctccggctttctgctgctggccgccgggatggcgaccctgaccctggcgctcgacggccagaaagggctcggcatttcccctgcctggctggcggggctggtggccgtcggcctctgcgccctgctgctctacctgtggcacgcccgcggcaacgcccgggcgctgtttagccttaacctgtttcgcaaccgcaccttctctctcggcctcggcggcagcttcgcgggacgcatcggcagcggcatgctgccgtttatgaccccggtgtttctgcagatcggcctcggcttctccccctttcacgccgggctgatgatgatcccgatggtgctcggcagcatgggcatgaagcggatcgtggtccaggtggtcaaccgctttggctaccgtcgggtgctggtcgccagcaccctgggcctggcggcggtcagcctgctgtttatgtttagcgccctggccgggtggtattacgcgctgccgctggtcctgtttctgcaggggatgatcaacgccagccgcttctcctcaatgaataccctgacgctgaaagatctcccggacgatctggccagcagcggcaacagcctgctgtcgatggtgatgcagctgtcgatgagtatcggcgtgaccatcgccgggctgctgctggggctgtatggccagcagcatatgagtctcgacgccgccagcacccatcaggtctttctctacacctatctgagcatggcggcgatcatcgccctcccggcgctcatcttttcccgggtaccggatgacgtcggcagcaataccgtcctccgtcgacgcaacaggagtggatcgtga

SEQ ID NO: 136179 - DNA, 2697 bp, Enterobacter cloacae
  misc_feature (2661)..(2670): n is a, c, g, or t
atgcaggtgttacctccaggccgcaccggcggcccgtcccggctgtttattatgcgtccggtggccaccactctgctgatggtggctatcctgctggccgggatcatcggctaccgctttctgccggtctccgccctgccggaggtcgattacccgaccattcaggtagtcaccctctatccgggcgccagcccggacgtggtgacctccgccatcaccgccccgctggagcgccagttcggccagatgtccggccttaagcagatgtcgtcgcaaagctccggcggcgcctcggtagtcacgctgcagttccagctgaccctgccgctggacgtcgccgagcaggaagtgcaggcggccattaacgccgccaccaatctgctgccgagcgatctgccgaatccgccggtctacagcaaggtgaacccggcggatccgccgatcatgaccctcgccgtcacctcctccgccatcccgatgacccaggttgaggacatggtggagacccgggtggcgcagaagatctcccaggtttccggcgtcggtctggtgaccctcgccggcggccagcgcccggcggtgcgggtgaagcttaacgcccaggccatcgccgccctcggcctgaccagcgaaaccgtgcgcaccgctatcaccagcgccaacgttaactccgcgaaaggcagcctcgacggtccggcccgcgcggtgacgctttccgctaacgatcagatgcagtccgctgaggattatcgccggctgattatcgcttatcagaacggggcaccgatccggctcggcgatgtcgccagcgtcgaacaaggggccgaaaacagctggctcggggcgtgggccaaccagcagcgggccatcgtgatgaacgtccagcgccagccgggggccaacatcatcgacaccgccgacagcattcgccagatgctgccgcagctcaccgagagcctgccgaaatcggtgaaggtgcaggtcctctccgaccggaccaccaacatccgcgcctcggtgcgcgacacccagtttgagctgatgctggccatcgccctggtggtgatgatcatctacctgtttctgcgcaacgtgccggcgaccattattcccggcgtcgcggtgccgctgtcgctggtgggcactttcgcggtgatggtgttcctcgacttttcgatcaataacctgacgctgatggccctgaccatcgccaccggcttcgtggtggatgacgccatcgtggtgattgagaacatctcgcgctatatcgaaaaaggcgagaagccgctggccgccgcgctgaagggcgcgggggagatcggcttcaccatcatctccctcaccttctcgctgatcgcggtgctgatcccgctgctgtttatgggcgatatcgtcggccgcctgttccgcgaattcgccgtcacccttgccgtcgctattcttatctcggcggtggtctccctgaccctgacgccgatgatgtgcgcccgcatgttaagccacgaatcgctgcgcaagcagaaccgattctcgcgggccagcgagcgtttcttcgaacgggtgatcgccgtctatggccgctggctgagccgggtgctgaaccatccgtggctgacgctcggcgtcgccctgagcaccctggcgctgtcgattatcctgtgggtctttatcccgaaaggcttttttccgatccaggataacggcattatccagggcaccctccaggcgccgcagtcggtctccttcgccagcatggccgagcgccagcgtcaggtggccagcattatccttaaggatccggcagttgagagtctgacctccttcgtcggcgtcgacggcaccaacccggcgctgaacagcgcccgcctgcagatcaacctcaagccgctggacgaacgcgacgaccgcgtccagacggtgattagccgtctgcagcaggcggtggacggcgtcccgggcgtggcgctctacctgcagccgacccaggatctcaccatcgacactacggtgagccgcacccagtaccagttcaccctgcaggcaaactccctcgaggcgctgagcacctgggtaccgccgctgctcagccgtctgcaggcccagccgcagctggccgacgtcagcagcgactggcaggacaaaggcctggccgcctatatcaaggtggatcgcgacagcgccagccgcctcggcatctcaatggccgatgtcgataatgcgctgtacaacgccttcggccagcggctgatctccactatttacactcaggcgaatcagtatcgcgtggtgctcgagcaggataccgaggcgacgccgggcctggcggcgctggagaatatccgcctcaccagcagcgacggcggcatcgtgccgttgaccgccatcgccacggtggagcagcgctttaccccactgtcggtgaaccacctcgatcagttcccggtgaccaccatctcgtttaacgtcccggacaactactcgctgggcgaagcggtggaggcgatcctcgccgccgaacagtcgctggattttccgaccgatattcgcacccagttccagggcagctcgctggccttccagtcggcgctcggcagcaccgtctggctggtggtcgccgcggtggtggcgatgtatatcgtgctgggggtgctgtatgagagnnnnnnnnnngtatatcgtgctgggggtgctgtatga

SEQ ID NO: 136180 - DNA, 1128 bp, Enterobacter cloacae
atgaaaggcagtaacatacgtcgttggggcgccgcgctggcggtagtgattatcgccggggccgcctactggttctggcacgatagcgggacgagcggcagcggggctcatctcaccgggctgggtacggtgacggcggccaacaccgtcaccgtccgcagccgggtcgacggccagctgctgagccttcacttccaggagggacagcaggtcaaagccggcgacctgctggcgcagatcgaccccagccagtttaaagtcgctctcgcccaggcgcagggtcagctggcgaaagatcaggccaccctcgccaacgcccgccgcgatctcgctcgttaccagcagctggtgaagaccaacctcgtctcccgccaggagctcgacactcagcagtcgctggtggtggaatccgccggcacggtgaaagctgatgaagcggccgtcgccagcgcccagctgcagctcgactggacccgcattaccgcgccaattgacggccgcgtcggcttaaagcaggtcgatatcggcaaccagatctccagcggggataccaccgggatcgtggtccttacccagactcacccgatcgacgtggtctttaccctgccggaaagcagcatcgccacggtggtgcaggcgcagaaagcgggcaaaacgctcagcgtcgaagcctgggatcgcaccaataagcagaaaatcagcgtcggcgagctgctgagcctcgataaccagatcgatgccaccaccgggaccatcaagctgaaggcgcgctttagcaatctggacgacgcgctgttccccaatcagttcgttaacgcccgcctgctggtggacacccagcagaacgcggtggtgatccctgccgccgcgctgcagatgggcaacgaagggcatttcgtatgggtgctgaacgatgagaataaggtcagcaaacacagcgtgacgcccggcatccaggacagccagaaagtagtcatcagcgccgggctttccgccggagatcgcgtggtcaccgacgggattgaccgcctgaccgagggggcgaaggtggaagttgtcaccgccagcagcggcgagcaggcgcagcccgccccgcgccagagcggtaaacacggagcgcgttcctga

SEQ ID NO: 136181 - DNA, 1275 bp, Enterobacter cloacae
gtggcaaacgcaaacaaactcacgctcttcatcgtcgtttttatgctgatggggatcctctccggcgcggctatccatgcctacgcgacgccaaccaccgtctccgcctgggcggacaatattacgctgcttaccgatctgtttctgcggttgatcaaaatggtcatcgcgccgttggtgttcagcaccctgacggtcggcattatgcgcctcggcgagacggcgaccatcggccgggtaggcggcaaggcgatggtctggttcatcacctcctcggtattatccattctcgtcgggctggtgatcgtcaccttccagcacccgggcgccgggttaaacctggcggtgccgaaagaggcggtggataccggcctggcggtcagcggcatgagcctgaaagggttcctgtcgcacactatccccaccagcatcaccgaggcgatggccaacaacgagatcctgcagatcgtggtgttctcgatgttcttcggcatcgccggcgcgtcgttgggggagaagtttaatgctccgctggtggcggcccttaacgtggtgtcgcacattatgctgaaggtgacgggctatgtgatgtacgttgcgccgctggccatcttcgccgccatctcgtcggtgattgcctcccaggggctggggatcctgctcaactatgcttcattcatcggcggctactacctggcggtgctgttgaccagcgcggtgctgattgccgtcggctatatggtgctgaaaaaagaggttttccgcctgctgaacatgctgaaagatccggtgctggtggcctttaccaccagcagctcggaagcggcctatccgaagacccttgagcgactggtgaagtttggctgctcgcgcaatatcgtctcgttcgtcctgccgattggctactcgttcaacctcgttggctcgatggtctactgctccttcgccgcgatgtttatcgcccaggcctataacgtgccgctgagctttagcgagattacggtcatgatgctgaccctgatgctggcctcgaaaggtatcgccggggtgccgcgttcggcgctggtggtgctggcggcgacgatccccagcttcaatataccggtcgccgggatcctgctgctgatgggtatcgaccatttcctcgacatggggcgctccgccatcaacgtgctgggtaatggcatcgccaccgcgatgctgtcgaaaaatgaagggttgctgaccgacgaggaagcgcagccggactgggaagtggagaaagcggaagcctga

SEQ ID NO: 136182 - DNA, 612 bp, Enterobacter cloacae
atgagaaacattaatgtcaccatcaacacccgcaacgcctttgtccgtgaatcgctggtggccatggtcaatgacctcacccggggcgatctgcgggcgcgtttttcctggcgtaacaccgatctgtcagctgaagatatcattatctgcgaagtgatccccggggaaatatacctgtgtaataccctgattaagaacagaaaaagaggaagctcgctgattattctccatagctatgaccagctgccggaagatgagttcatgattaattgcctgaaaggggtcatttttgtttcgctaaaaacggccagtattccgcaattgctgacgatcattaaaagcgagctccagcattgtatgacccccacggctaccgacgccgcaggccgggaactcagctgcgccagctgtccgcatcgcgtgttatcgcgatcgcaaaccgccgtagtgcacggtattctcgaagggctggatatgagtaaaatcgccgccctgcagcgtgtgagtccccgcaccgccgcctatcataagaataagatcatggaaaaatacagcctgaataataatcatgaatttttccagtttatgaatcttttacgagagcgctggtag

SEQ ID NO: 136183 - DNA, 291 bp, Enterobacter cloacae
atgcgacagcgtcaccagcggggtgatgttgtgcttcgccatctcgtcgaacagcttgtcgtagaacgcgaggccggcttcgttcggctcggcgtcgtcgccgttggggtagatgcgggtccaggcgatagagactcgcaggcagttaaagcccatctcggcaaacagggcgatatcttccggatagcgatggtaaaaatcgatcgccacatccttaatcccgttgtcgccgggtatacgctcgaccacttcgccgaaaacgccgtgcggctgtacatcggaggtggataa

SEQ ID NO: 136184 - DNA, 1299 bp, Enterobacter cloacae
atgattcaggcctttgaggccagccaggcgccgggcgcggcggtggagcactttctcggcattccggtgacctttatcaactacagctcgtcagtgatcccgattattctcgcctcatgggtctcctgctggctggagcgcaagagcaatgcgctgttgccgtcatcgatgaaaaacttcttcagcccggcgatctgcctggcggtggtggtcccgctcaccttcctggtgattggtccggtcgccacatggctgagccatctgctggccaacggctaccagtttatctacgcgtttgcgccatggctggcgggcgcggtactgggcgccatgtggcaggtgtgcgttattttcggcctgcactgggggctggtgccgttgatgatcaataacatgacggtgcttggtcacgactccatgctgcctattatcctcccggcggtgattgcccaggtgggcgccgtgctcggtattttcctcgccacccgcgatgcgcgccagcgggtgctggccggttccgccttctccgccgggctgttcggcatcaccgagccggctatctatggcctgaccctgccgctgcgccgtccgtttatctttggctgcgtcgccggggcgattggcggggcgatcactgcctttagcaacagttatgcctactcgtttggcctgccaaacatctttttcccggcgcaaatgatcccgcccggcgggattgacgccagcgtctggggcgggcttatcggcaccggcgtggctttcgtgctcgcctgcgtgctgaccttcttcgccggcctgccgcgcggtagcgccgcaccgggcgccgtgacggtagccccggcctcggcaaacgatattctggcgccgatgagcggcagcgttatcgccctcgagcaggtgccggacagcaccttcgccagcggcctgctgggtaaaggggtcgccattatcccggcggtgggccaagtgattgccccgttcccgggcgaagtggcctccctgtttcagactaaacacgccatcggcctgcaaagcgacagcggcattgagctgctgatccacgtcggcatcgacacggtcaaactcgacggcgtgccctttaccgcgcatgtgaaagagggcgacagggtacaggccggcgatctgctgattgagtttgatcgccaggcgattctggacgccggctacgacctggcgaccccgatcattatcagcaacagcgacgactaccgggagattgatacggtggcgtccagcaccgtcgaagccggtcagccgctgttgtcagtcagccattaa

SEQ ID NO: 136185 - DNA, 834 bp, Enterobacter cloacae
atgcaaatcgccaaagtactcaataacaatgtggtggtggttctcgacgagcaccggcgcgaacaggtggtgatggggcgagggctggcctttcagaaacgcccgggcgacgtgctggacgacagtaaaattgaaaaagttttcgccttacaaagcgatgagctggtcggccgcttaggcgagcttctcagtcagataccgttagaagtgatgaccacctgcgatcgcattatcgacctggcacgcggacggctgggcaagttacaggaaagtttgtacatcacgttaacggatcactgtcattttgctatcgagcggcagaaaaagggcatcgcactgcgtaacgtgctgctgtgggagattaagcggctgtatccgaaggagttcgcgctgggccaggaggcaagggccatcattgccaaaaggctcggcgtggagctggcggaggacgaagccggatttatcgccctgcatctggtgacggcgcagctcaacagcgaaatgccggaggtcatgcacgtgacccgggtgatgcaggagatcctgcagctggtgaagtatcagctgcagcttaactacgatgaagagtcgctgagctatcagcgtttcgtcacccacctgaagtttttcgcccagcggatgctgacgcgcacggtggtggaagatgacgacgtctcgctgcacagcgcggtgaaagataactacgccaaagcgtggaagtgtgcggaaacggtggcgacgcatctgcaaaagcagtatcagcggtcgctgaccaccgaagaaattatgtttcttgccattcatatcgaacgggtaagaaaagaggggcgttaa

SEQ ID NO: 136186 - DNA, 1365 bp, Enterobacter cloacae
atgcataacaaaaaaataaatcagcttttgatcggcgctatgctggcggcgatggcgcctgccgtgagcgccgcggacatcccggcgtggaacggcagcgcgctggggtttgaagccgggcagcaagggctgctgggcgatatgctaggcattcgtccgatccttgaagaaaacggctttcattataatctcggctatcttaacgagatggcctacaacgccggcggcggttatgaccatgataaacacctggcctatattgaccaggtgtcattgacctttacccaggatctggagcgctggaccggcataccggacgcgcggcttgagggcaatatcgtcaaccgcaaccacgatgataatctcaccacgaaacggctgcaggatccgcgggtgagtttcaacgatctatcgcaggagagctggggcggcgggtcgattacccgccttggctggctcacctttgcccgcagctttgacgaccgccgcctgacctggcgcatcggcatgatgaacaaggtgcaaaccttcgaccagatcataccctgcgattttcagctgctgacccagtgcggtgggaaatcggccaactcgctgacctggaataactggaacattcatacctggggcaccaccctggagtacaagctgacgccgaccgtcaccctgaaaggcggggtgatggagcaaaacccgcaggctaccgcgcgcagccacgcgtggagctggtcgacgaagggtagcaaaggcatcttactgccgatggagatcgaaacccgtccgctgattaatggcctgccgggagcctataaccttggcgtggtctggactaacgcgccgcagagcgacctctacagcggtaaatccggcggcgccggggcgaccgatccgcaaggttacgccgagcacgacagcacctggtttatgtacgccggcctgaaccagcagatcacccgccacgccgacgacccgctgcggggaatgagcgtctcactgagcggcagcctcagcgaccagcgcagcaactatatccactccgcagtcgccgcctccatgcgctaccgcggtctgtttgacgcccgcccggaggactggattggcttcggcctgacgtggatcgacatgagcagccactacgcacgtaatcagcgctatatgaatcagataagcggcgccaccgactataacgatccggcttacctgccggtggccggtcattcgctgaacggtgagctctattatcgcttccgcccggtctcctggctggagctgcagccgggcctgcagtactggcaccgtccgggcggcgtcgcgcagacccaggacgcgtgggtagtggagtggaaaaccgtcgtgaccttctga

SEQ ID NO: 136187 - DNA, 399 bp, Enterobacter cloacae
atgagtaaatcgctgactattatctggcagtacctacgggctttcgtcctgatttacgcctgcctgtacgccggaatttttatcgccgggctgctgcctatcactatccccggcagcatcatcggcatgctgatcctcttcgtgctgctggcgctgcaaattatgccgccgcaatgggtcaaccccggctgtaatatcctgatccgctatatggcgctgctgttcgtgccgatcggcgttggggtgatgcagtactgggagctgctgcgcgcccagctggggcctgtcgttatctcctgcgccatcagtacgctggtggtgtttgtagtggtgagctggagctcccatttggtgcatggcgaacgtaaagtgattggccaaaaaggaaaagaagaatga

SEQ ID NO: 136188 - DNA, 696 bp, Enterobacter cloacae
atgatgcatgaaatctggtggtcgctaccgctaaccctgatcgtcttttttctcgcccgcaaactggcggcccgctttaagttcccgctgctcaacccgctgctggtggcgatggtggtgattattccatttcttctgctgaccgggatctcctatgagcgttattttgccggcagcaaagtcctgaacgatctactgcagccggcggtagtggcccttgcgttcccgctgtatgaacagctgcaccagatccgcgcccgctggaaatctatcattaccatctgctttatcggcagctgcgtggcgatgatcaccggcaccaccgtcgctctgctgatgggcgccacgccgcaaatcgccgcctctattctgcctaagtcagtcactacgccgattgctatggcggttagcggcagcatcggcggcattccggccatcagcgccgtgtgcgtaatttttgtcggcatcctcggcgcggtatttgggcatacgttgcttaacctgatgcgcattcgcaccaaagcgtcgcgcggcctgtcaatgggcaccgcctcgcacgccctcggcacggcccgctgcgccgagctggactatcaggaaggcgcgtttagctcactggcgctggtgctatgcgggatcatcacctcgttgatggcgccgttcttatttccgctgatcctcgcagtggtaggttag

SEQ ID NO: 136189 - DNA, 897 bp, Enterobacter cloacae
  misc_feature (274)..(283): n is a, c, g, or t
atgcactcacgttttcaagctgctttgacgactctggcagcagatctgcaggcagccatcgccccgatgctcgccgacccgcatttcccggcgctgctcgaagccgatcaggtggcgacgctgcagcatgcgacaggtctggacgaagacgcgctggcttttgcgctactgccgcttgccgctgcctgcgcgcgccccgacctttctcattttaacgtcggggctatcgcccgcggcgtcagcggccgctggtactttggcggcaatatggagnnnnnnnnnnagtttctcggcgctaccatgcagcagaccgttcacgcggaacagagcgccatcagccacgcctggctgcgcggcgagacctccctgcgcgctatcacggtgaactacacgccgtgcggtcattgccgtcagtttatgaacgaactgaacagcgggctggcgctgcgcattcatctgccgggtcgcgaagcgcatgccctggagcactatctgccggacgcctttggcccgaaagacctcgagatcaaaaccctgctgatggatgaacaggaccatggcttcccggtcagcggcgatgccctaacccaggcagctattcaggccgccaaccgctgccatgcgccctacagccactcgccttccggcgtggcgctggagctgaaagacggtaccattttcagcggtagctatgcggaaaacgcagcgttcaacccgacgctgccgccgctgcagggggcgctgaatctcctgagcctcaacggctatgattatcccgctatccagcgggcaatcctggcggagaaagccgacgcggcgctgatccagtgggatgccaccgtcgccaccctgaaggcgctgggctgccacaatattgagcgcgtcctgttaggttga

SEQ ID NO: 136190 - DNA, 717 bp, Enterobacter cloacae
atgttaaagcgtgcgttctacagcctgttagtcctgctcggcctgctgctgttgaccgtgctgggccttgaccgctggatgagctggaaaaccgcgccctatatctatgatgaactgcaggacctgccctaccgtcaggtcggtgtggtgctgggcaccgccaaatattaccgcaccggcgtcatcaatcagtattaccgttaccgcatccagggtgcgctgaacgcctacaacagcggcaaggtcaactatctcctgctgagcggcgataatgctctgcaaagctacaatgaaccgatgaccatgcgtcgggacctgattaaaggcggcgtcgatcccgcggatatcgtactggactatgccggtttccgtaccctcgactcgatcgtccgtacccggaaagtgttcgacaccaacgacttcattatcatcacccagcgcttccactgcgaacgggcgctgtttatcgccctgcatatggggatccaggcccagtgctacgcggtgccgtcgccgaaggatatgtggagcgtgcggctgcgcgagttcggcgcccgctttggcgcgctggcggacctctatatcttcaaacgggaaccgcgctttctcggccctctcatcccgattccggcgcagcagcatgacgtgccggatgacgcccaatcctacccggccgtcaccccggagcagctgctggagctgcagaaagaaaagtag

SEQ ID NO: 136191 - DNA, 1011 bp, Enterobacter cloacae
atgagtgcgttaaataaaaagagttttctcacttacctgaaagagggtgggatatatgttgtccttctggtcctgctggccattattattttccaggatccgacatttttaagtctgctcaacctgagtaatattctgacccagtcctcggtgcgtattattattgccctcggcgtggccggacttatcgtcacgcaggggaccgacctctccgccggccgtcaggtgggtctggcggcggtgattgccgccaccatgctgcaggcggtggataatgccaataaggtattcccggatatggcgaccatgccgatcccgctggtgatcctgctggtgtgcgccatcggggcggtcatcggcctgattaacgggatcgtcattgcctacctgaacgtgacgccgtttattaccactctcggcaccatgattatcgtctatggcattaactcgctgtactacgacttcgtgggcgcgtcgccgatctccggcttcgacagccacttctcccatttcgcgcaggggtttgtggcgctgggctccttccgcctgtcctacattaccttctacgcgctgattgccgtcttctttgtctggatcctgtggaacaagacgcgctttggcaaaaacattttcgctatcggcggtaacccggaagcggcgaaggtctccggggttaacgtagcgttaaacctgctgatgatctatgccctctccggcgtgttctacgccttcggcggcctgctggaagccggacgtatcggttcggcgaccaataacctcggctttatgtatgaactggacgccatcgccgcctgtgtggtgggcggcgtatcgttcagcggcggggtagggacggtgtttggcgtggtgaccggggtgattatcttcaccgtcatcaactacggcctgacctatatcggcgtcaacccttactggcagtacattattaagggggcgattattatcttcgccgtggcgctggactccctgaaatacgcccgtaagaaataa

SEQ ID NO: 136192 - DNA, 1521 bp, Enterobacter cloacae
atggtcagcaataatagcgaacggtcaggcgaatatttgttggagatgagcaacatcaacaaatcgtttcctggcgtcaaggctcttgataatgtcaacctgaaggttcgtccgcactccattcatgcgttaatgggtgagaacggcgccggtaaatcgacattattaaaatgcctttttgggatctatcaaaaagattccggtagtattctttttcagggaaaagagatcgatttccattcggcgaaagaagccctggaaaacggtatttcgatggtgcatcaggaattaaacctggtattacagcgttcggtcatggataacatgtggctcgggcgctatccaactaaaggcatgtttgtcgatcaggacaaaatgtaccgggataccaaggccatttttgatgagctggatattgatatcgatccgcgcgcccgcgtcggtaccttatcggtatctcagatgcagatgattgagatcgcgaaggcgttttcctatgacgccaaaatcgtcatcatggatgagccgacgtcatcgctgacggaaaaagaggtcaaccatctgtttaagatcatccgtaagctgaaagatcgcggctgcggtatcgtctatatctcgcataaaatggaagaaattttccagttgtgcgatgaaataaccatcctgcgcgacggccagtggatcgccacccagccgctggaagggctggatatggataagatcatcgccatgatggtcgggcgttcgcttaaccagcgttttccggatcgcgaaaacactccgggcgaagtgatcctccaggtgcgcaatctcacctcgctgcgccagccctccattcgcgatgtctcctttgacctgcataagggcgaaattctcggtatcgccggcctggtgggcgctaaacgcaccgacatcgtggagaccctgttcggcatccgtgagaaggccagcggcaccatcacgctgcacggcaagaagatcaacaaccacagcgccaacgaggcgattaaccacggttttgcgctggtgaccgaggagcggcgctctaccgggatttacgcctatctggatatcgggtttaactcgctgatctccaatattaagaaatataaaaacagcgtcggcttgctggataactcgcgaatgaagagcgatacccaatgggttattgactcgatgcgcgtcaaaacccccggtcagcatacgcagattggctcgctttccggtggtaaccagcaaaaggtcattataggccgctggctgctgacccagccggagatcctgatgctggatgagccaacgcgcggtatcgacgtcggcgccaagtttgaaatctatcagctgattgccgaactggctaaaaaagacaaagggatcattattatttcttccgaaatgccggaactgctggggattaccgaccgcattctggtgatgagcaacggcctggtcgcgggcattgttgagactaaaaccactacgcaaaacgaaatactgcgtcttgcgtcattgcacctttaa

SEQ ID NO: 136193 - DNA, 999 bp, Enterobacter cloacae
atgaataagaaggtgtttaccctgtctgctgtaatggctggtctgttatttggcgccgccgcacacgcagcagatacccgtatcggcgtgacgatttataaatatgacgacaactttatgtcggtagtgcgtaaggcgattgaaaaagatggcaaatccgcgccagacgtccagctattgatgaatgattcgcagaacgaccagtcgaaacaaaacgatcagattgacgtgctgctggcgaaaggcgtgaaggcgctggcgattaacctggttgacccggccgccgcaggtacggtgattgaaaaggcgcgcgggcagaatattccggtggtgttcttcaacaaagagccttcccgcaaagcgctggatagttatgacaaggcttattacgtcggtaccgactcgaaagagtccgggattattcagggcgatctgatcgccaagcactggaaagccaacccgaactgggatctgaataaagacggtcagatccagtacgtcctgctgaaaggcgagccgggccatccggatgcggaagcgcgtaccacttacgttattaaagagctgaatgataaaggtctgaagacccagcagctgcagctggataccgcgatgtgggataccgcccaggcgaaagacaaaatggacgcctggctctccggcccgaatgccaacaagattgaagtggtgatcgctaacaacgacgccatggcgatgggcgcggttgaagcgctgaaagcgcacaacaagagcagcattccggtgttcggcgttgatgccctgccggaagccctggcgctggtgaaatccggcgcgatggccggtactgtgctgaacgatgccaacaaccaggcaaaagcgaccttcgagctggcgaaaaaccttgccgacgggaaagacgccgcggcaggcaccaactggaaaattgacaacaagattgttcgcgtcccctacgtgggcgtcgataaagacaacctgagccagtttaccggcaaataa

SEQ ID NO: 136194 - DNA, 1023 bp, Enterobacter cloacae
atgatcaccattcgtgatgtcgcccgccaggcgggcgtttccgtggccaccgtgtcgcgggtgctgaataacagcgcgctggtgagtccggatacgcgcgacgtggtgatgaaagcggtgacccaactgggctaccggcccaacgccaacgcccaggcgctggccacccaggtcagcgataccatcggcgtagtggtgatggacgtctccgatgccttcttcggcgcgctggtgaaagcagtggataccgttgctcagcagcatcagaaatatgtgctgatcggcaacagctatcacgaggcggaaaaagagcgtcacgccatcgaggtgctgatccgtcagcgctgctcggcgctgatcgtccattcgaaagcgctgagcgatgatgaactgagcgactttatgcaacatatcccggggatggtgctgatcaaccgcatcgtgccggggtatgcccatcgctgcgtcggactcgacaacgtcagcggcgcgctgatggccacccgtatgctgctcaatcatggtcaccagcgcatcggctatctctcctcaaaccacggcattgaagatgacgatatgcgccgggaagggtggagcaaagcgctgcaggagcaaggcatcatcgccccggacagctggatcggttccggctccccggatatgcagggcggtgaagcggcgatggtcgaactgctggggcgcaatctcggcctcaccgcggtgtttgcctataacgacagcatggcggccggcgcgctgacgacgctgaaggacaacggcattgtcgtgccgcagcatctgtcgctgattggctttgatgatattcctatttcccgttacaccgatcctcagctcaccaccgtgcgctatccggtaatgtcgatggcaaagctggccaccgagctggcgctgctgggggcggccggcaagctggatcgcgaggcaacgcactgctttatgccgacgctggtgcgccgtcattccgttgcccagcggcaaactgtggggccgatcactaactga

SEQ ID NO: 136195 - DNA, 1158 bp, Enterobacter cloacae
atggagagaaatgtcacgctggactttgtccgcggcgtcgccatcctcggtatcctgcttctcaatatcagcgccttcggcttgccgaaggccgcttatctcaatcccgcctggtcaggaagcgcgtcccttagcgatgcctggacctgggcgctcctcgacctgctggcgcaggtgaagtttctcaccctgttcgcgctgctgtttggcgccggtcttcagctattgcttccgcgagggaagcgctggatccagtcgcggctgacgctgctggcgctgctcggtttcattcacggtctttttttctgggatggcgatattctgctggcctatgccctggtggggctggtgagctggcgcatggtgcgtgaggcgcaccatgtcaaatcgctgttcaacaccggggtggtgctctacctcaccggcattgcggtgctggtcctgttggggctgatctccgggaccgcggcgaatcgctcgtgggcgccggacgcggcgaacctgcagtatgagcagtactggaagctgcacggtggcatggaggcggtcagcaaccgggcggatatgctatctgacaatctgctggcgctgggcgcgcagtatggctggcagctggcggggatgatgctgatgggcgcggcgctgatgcgcagcggctggctgaaggggcagtttagcctgcgtcactaccggcgtaccggcgcgctgctggtggcggccggcatggcggtcaatctgccggcaatattcgcccagtggtatctggcatgggactatcgctggtgcgcgtttttactgcaggcgccgcgcgaacttagcgccccgctgcaggctatcggctatgccgcgctggcctggggctactggccgcaactctgccgtttccgcctggtgggcgctatcgcctgcgtcggacgcatggcgctgaccaactacctgctgcagaccctgatctgcaccaccctgttttatcatcttgggctgtttatgcgcttcgatcgtctgcagctgctggcctttgtcccccccatctgggccgttaacctccttgtctcatcgctctggctgcgccgcttccgccaggggccggtggaatggctgtggcgtcagttaaccctgcgtgcgtcaggcacatcattgaaagacacatccagataa

SEQ ID NO: 136196 - DNA, 669 bp, Enterobacter cloacae
atgtcatcactgagtaaagaagccgtcctcgttcatgaagcgctggtcgctcgtgggctggagacgccgatgcgtgcgccagtacaagaaattgataacgaaacacgcaagcgtttgattaccggtcatatgaccgagattatgcaactgctgaatctggatctgagtgatgacagtctgatggagaccccgcatcgcatcgccaaaatgtatgtcgatgagatcttctccgggctggattactctcgcttcccgaaaatcaccgtcattgaaaacaaaatgaaggtcgatgaaatggtcaccgtgcgcgatatcaccctgaccagcacctgcgaacaccatttcgttaccatcgatggtaaagcgacggtagcctatatcccgaaagattcggtgatcggcctgtcgaaaatcaaccgcatcgtgcagttcttcgcccaacgtccgcaggtccaggagcgtctgacgcagcagatcctgatcgcgctgcagacgctgctcggcaccaacaacgtggcggtatccattgacgcggtgcattattgcgtgaaggcgcgcggcattcgcgacgcgaccagcgccaccaccactacctctctcggcggcctgtttaaatccagccagaatacccgccaggaattcctgcgcgcagtacgtcaccacgactaa

SEQ ID NO: 136197 - DNA, 834 bp, Enterobacter cloacae
atggaactgcttgaagagcatcgctgttttgacggccagcaacaacgctggcgtcatcactcccctgtcctgaactgcgccatgacgttcagcatttttttaccgcctgagcgcgaaacgccgccgccggtgctgtactggctgtcggggctgacctgtaacgatgagaactttaccaccaaggcgggcgcccagcgcattgccgccgagctgggcatcgcgctggtgatgccggataccagcccgcgcggtgacgaggcggccaacgacgacggttacgatctcggacaaggcgccggcttctacctgaacgccaccgaggcgccctgggcggcgcactaccgaatgtacgattacctgcgtgacgaactgcccgcgcttattcgtagcgagtttagcgtcggcgaacgctgcgccgtcagcggccactcgatgggcggccacggcgcgctcattatggcgctcaaaaatcccggccgctacgccagcgtctccgccttcgcgccgatcgtcaatccctcccaggtcccgtggggcaagaaagcgtttaccgcctatctcggcgcggatgaatcggcatggcactcctgggacagctgcgcgctgatgcaggccagccggccggaggacgccgtgccgacgcttatcgatcagggcgacaacgatcctttccttgccggacagctgcagccggcggtactggcggaggtcgcgcggcagaaggcctggccgttaacgctgcgcatccagcccggttacgaccacagctattacttcattgcctcgtttattgaagaccatctgcgcttccatgcgcagcatctctttggctaa

SEQ ID NO: 136198 - DNA, 1974 bp, Enterobacter cloacae
atgttcaggttaaacccttttatccgggcgggattgtctgcgtccgtcgtatcgttggcgtttccggctctggccgatgtgaatgaagaaacgctggtggtgaccgcctcggccactgaacagaatgtcaaagacgcgccggcgagcatcagcgtcatcacccaacaggatttacaacgcaagcctgttcagaacctgaaagacgtgctgcgcgatgtgcctggggtccagctcaccaacgaaggggataaccgcaagggcgttagcatccgcggtctgagcagcagctataccctgatcctggtcgacggcaagcgcgttaactcgcggaacgccgtcttccgccacaatgacttcgacctaaactggatcccggtggatgctattgagcgtatcgaagtggtgcgcggcccgatgtcctccctctacggctccgatgcgctcggtggggtggtcaacattattaccaaaaaaatcggccagaaatggaccgggacgctgagtgctgataccactattcaggagcaccgcgatcgcggggatacctataacggccagttcttcaccagcggcccgctgatcgacggcgtacttggaatgaaggcctacggcagcctggcaaaacgcgccaaggacgatccgcagtcatccagtaatgccaccggcgagacgccgcgcatcgagggcttcaccagccgcgatggcaatgttgaattcgcctggacgccgaacgaaaaccacgattttaccgcaggctacggctttgaccgtcaggatcgcgattccgattcccttgaccgcaaccgccttgagcgggagaactactctctgagccataacggccgctgggatatcggcaacagcgagcttaagttctacggcgaaaaggtggataacaaaaatccagggcagagcgggactattacctcggaaagcaatgccatcgacggcaagtatgtcctgccgctgggcatgattaaccagctggtgaccttcggcggcgaatggcgccacgacaaactgaaagatccggtcaacctgagcagcggcggccagtcgacgtcggccagccagtacgccctgtttatcgaagacgaatggcgcatcatcgagccgctggcgctgaccaccggcattcgtatggacgaccatcagacctatggcgatcactggagcccgcgcgcctatctggtgtataacgccaccgataccgtcaccgtcaaaggcggctgggcgacggcgtttaaagccccgtcgctgctgcagcttaaccccgactggaccaccaactcctgtcgcggctcgtgcagcatcgtcggtaacccggatctgaaaccggaaaccagcgaaagcttcgagctcggtctctactaccgcggggaagagggctggcttgaaaatgtcgaaggcagcatcaccaccttccagaataatgtcgacgacatgatcgatgttctgcgcacctccagcgccagcgaagcgccgggctacccgaactttgtcggctggaaaaccgtcaacggcaagcgcgtgccgatcttccgctatttcaacgtcaacaaagcccgcatcaaaggggtggagacggaggtgaagatcccgtttggcgatgagtggaagctgacggtgaactacacctacaacgatggtcgcgatctgagcaatggcggcgacaaaccgctgcagacgctgccgttccataccgccaacggcacgctcgactggaaaccgctggacgactggtccttctacgtgacggccaactataccggccagcagcgcgcggtgagcgccaccggcaaaacgccgggcggctacaccctgtttgacgttggcgcggcatggcaggtgaccaaaaacgtgaaactgcgctctggggtgcagaacgtgggtgataaagatctgagccgggacgactacagttataccgaagaaggccgtcgctactttatggcggtggattatcgcttctga

SEQ ID NO: 136199 - DNA, 1470 bp, Enterobacter cloacae
atggtttcggaaactaaaaccacagaagcgcccacgctacgtcgtgaactgaaggcgcgccacttgaccatgatcgccatcggcggttccatcggtacgggtctttttgttgcctctggcgcaaccatttcgcaagcaggtcccggcggggcgctgctgtcttatattctgatcggtttgatggtctatttcctgatgaccagcctcggcgagctggcggcgtttatgccggtatccggttccttcgccacctacgggcagaattatgttgaagaaggcttcggcttcgcgctgggctggaactactggtacaactgggcggtgacgatcgccgttgacctcgtggcctcacagctggtgatgagctactggttccccgacactccgggctggatctggagcgccttgttcctcggcatcatgttcctgctgaactggatctcggtgcgcggctttggcgaggcggaatactggttctcgctgataaaggtagccaccgtcattatctttatcatcgtcggcgtgatgatgattgtcggcatcttcaaaggggcgcagccagccggctggagcaactgggggatcgcggatgcgccgttcgccggcggtttctcggcgatgattggcgtggcgatgattgtcggcttctcgttccagggcaccgagcttatcggcatcgctgccggtgaatctgaaaatccggagaagaacattccgcgcgcggtgcgccaggtcttctggcgtatcctgctgttttacgtcttcgcgatcctgattatcagcctgatcattccgtataccgatccgagtctgctgcgcaacgatgtgaaggatatctccgtcagcccgttcaccctggtgttccagcatgctggtttgctgtcggcggcggcaatcatgaacgccgttatcctgactgccgtgctgtcggcgggtaactccgggatgtacgcctccacgcgtatgctgtacaccctggcctgcgacggtaaagcgccgcgcattttctcgaagctgtcgcgtggcggcgtgccgcgtaacgcgctgtacgcgaccaccgtgatcgcggcgctgtgcttcctgacttccatgtttggcaaccagacggtgtacctgtggctgctgaacacctccgggatgacgggctttatcgcctggctgggtattgcgatcagccactatcgtttccgtcgcggctacgtcctgcagggtaacgatattaataatctgccgtatcgttccgggttcttcccgctggggccgatcttcgccttcgtgctgtgcctgatcatcaccctcggacagaactacgaagcgttcctcaaggacactattgactggggcggcgtggcggcgacctacattggtattccgctgttcctcgtcatctggtttggttacaagctggcgaaaggcacccgctttgttcgctacagcgaaatgaccttcccggaccgctttaagcgttaa

SEQ ID NO: 136200 - DNA, 867 bp, Enterobacter cloacae
atgcatattacgctgcggcagctggaagtgttcgccgaagtccacaagagtgggtcgaccactcaggcgtcacagatgctggcgctttcgcaatccgcggtcagcgccgcgctgaccgatctggaagggcagctcggcgtgcagctgtttgaccgcgtcggtaaacgactggtggtgaatgagcatggacggctgctgtatccgcgtgcgctggcgctgctggagcgggccctggagatcgagcagctgtttcgcggcgataacggggcgatccgagtctacgccagcagcaccatcggcaactatattatgccggagattattgcccgctatcgtcatgacttcccggatctgccggtcgagctgagcgtcggcaacagcctggacgtcatcaacgccgtcgccgacctgcgggtggatttcggcctgattgaggggccgtgccatgccgccgatattattgccgagccgtggctggaggatgagctggtggtgtttgccgcgcccaactcaccgctgctggcgggggaggtgaccctgcagcaactggccgaggcgccgtggatcctgcgcgagcatggctccggcactcgggagattgtcgattacgttctgctgtcgcatctgccggcgtttcatctgggcatggagctgggtaattcagaggcgatcaagcacgcggtcaggcatggcctgggcatcagctgtctatcgcggcgggtgattaccgaacagcttgcctcgggcacgctggcggagctgaaagtgccattgccccggctgacgcgcacgctgtggcggatccatcaccggcagaagcatatttctaaagcattacaacgttttctgcactattgccaggtgtag

SEQ ID NO: 136201 - DNA, 1050 bp, Enterobacter cloacae
atgacagcactcactttacccaccaaacatcgttccctgtggcattttgtcccaggcctggcgctgaccgccgctctgaccggcgccgccctgtgggccggtagtttcccggccatcgccggcgcaggctttagcgccctgaccctcgctatcctgttcgggatggtcgtcggcaacacggtctacccgaaaatctggcagccctgcgacggcggggtgatcttcgccaagcagcatctgctgcgcctggggatcatcctctacggctttcgcctgacgttcgcccagattgccgacgtcggcgtgagcggtattttgattgacgttctgacgctctccagtacctttttcatcgcctgcttccttggccagaaagtgtttggtctcgataaacacaccagctggctgatcggcgccggcagcagcatctgcggcgcggcggccgtgctcgccaccgagccggtggtcaaagccgaagccagtaaagtgacggttgccgtcgctacagtggttatcttcggtaccatcgccatcttcctctacccggcgatgtacccgctgctggcgcactggtttaccccggagacctacgggatctatatgggctccaccatgcatgaagtggcgcaggttgttgccgccggccatgcggtcagcccggacgcggagaacgcggcggttatcgccaaaatgctgcgcgtcatgatgctggctccgttcctgctgttcctggcggcgcgtgttaaacagctgaccccggcaggcaacggcgagaaaagcaaaatcaccattccgtggttcgccattatgttcatcctggtggcggtgtttaactccttccatctgctgccgaaagccgtggtggatatgctggtgacgctggataccgtcctgctggcgatggcaatggccgccctcggggtcaccacccacgtcagcgcgctgaaaaaagccggggcgaaaccgctgctgatggcgctgatgctgttcgtctggttgattgtcggcggcggggtcattaacgtcgctatccacagcctgatggcataa

SEQ ID NO: 136202 - DNA, 855 bp, Enterobacter cloacae
atgaaatacgtaggagcgcacgtgagcgcctcaggtggactggccaatgccgccattcgcgccgccgaaatcgaagcaaccgccttcgccctcttcaccaagaaccagcgccagtggcgcgccgcgccgctcagcgacgagaccatcgccgaattcaaagccgcctgtgaaaagtatcactttggcccggggcagatcctgccgcacgacagctacctgattaacctcggccacccggtggaagaagcgctggaaaaatcccgtgatgccttcattgatgaaatgacccgctgccagcagctggggctgacgctgctcaacttccaccccggcagccatctgcagcagatcccggaggaggagtgcctggcgcgcatcgccgaatcgatcaatatcgcgctggtgaagaccgaaggcgttactgcggtgatcgaaaacaccgctggccagggcagcaacctcggctttaagttcgagcacctcgcggccatcatcgacggtgtggaagataaatcccgcgtcggcgtctgcatcgatacctgccatgctttcgccgccggctacgacctgcgcagcgccgaagcctgcgaaaaaaccttcgccgccttcgaacgcatcgtcggttttcagtatctgcgcggcatgcatctcaacgatgccaagagcgccttcggcagccgggtcgaccgtcaccacagcctgggggaaggcaacatcggccacgattgcttcagctggatcatgcaggacagccgcttcgacggtattccgctgattctggaaaccatcaacccggatatctgggcggaagagattgcctggctgcgggcgcagcagattgccgaagtggcgtaa

SEQ ID NO: 136203 - DNA, 240 bp, Enterobacter cloacae
atgcgcgttctgccgtgctgtatcgtcggcggcgcggtaaccggcgctatctccatggcggtcggcgcgaaactgatggcgccgcacggcgggctgtttgttctgctgatcccgggggcgattacgccggtgctgggctacctgctggcgattgttgccggaacgctggtggcgggccttgcctacgccgtgctgaaacgccctgaggcgcaaacagcggaagttgaaaaagcggcataa

SEQ ID NO: 136204 - DNA, 942 bp, Enterobacter cloacae
atgtccaaccgattccgccccgcctggctgctggtcctcgccgccctctctacctccgcgctggccaaagcgccggaaaccgtcaacatcggctatcaaaaggcgaatatcttcgcgctgctgaagtaccgcggcacgctggatgagagcctgaaaaaacagggcattgccgtacgctgggtcgaattccccgccgggccgcaaatgctggaggggctgaacgtcggtagtatcgatctggccgcgaccggcgatgcgcctccggcctttgcccaggcggcgcaagccgatctggtctaccttgcccactcccccgctaacccgaaaacggaagcgattgtggtgcctgaacagtcggcaatccacagcgtggccgacctgaagggcaagcgcgtggggttgaacaaggggtctgacgtcaactacctgctggttgccgcactggaaaaagcgggcctcagctataaagacatcaccccggtctatctgccgccggcggacgcccgcgccgctttccagcgcggggcgattgatgcgtgggtgatctgggatccgttcctcgcagaagtggaaaccaacgcgaaagcccgacagatccgcaatgccgaggggctggtgccgcactacaccttctatctcgccagccgcaagtttgcagatacctacccggagacagcaaagcaggtggtggatgagctgggtaaactcagcgcgtgggcgaacagccatcaggacgaggccgccgggctgctgtcgacctcaaccggactggataaagccatctggctgaagaccctggcccgcctgccctacggtgccgaacgcatgaccccggcggtgtataacgaacagcaggcgctggcggatacctttacgcgcatcggcctgctgccggtgaaagtcgacgtgcgcagcgccacctggtcgctggataaaccttga

SEQ ID NO: 136205 - DNA, 633 bp, Enterobacter cloacae
atgctggtgagccaggacaccaccaacagcgatccgatggcggtggtcgactggatcaatatgttcgccctggcggtgaacgaagagaacgccgccggcggccgggtggtgaccgcgccaaccaacggcgcctgcggtatcgtgccggcggtgctggcctactacgacaagtttatccgcaaggtgaacagcaactccctggcccgctatatgctggtcgccagcgcgattggttcgctgtataagatgaacgcctccatctccggcgccgaagtcggctgccagggtgaagtgggggtcgcctgctcgatggcggcggccggtctggcggaactgctgggcggcagcccgggtcaggtgtgcatcgcggcagagatcgctatggagcataacctcggcctgacctgcgacccggtcgccggccaggtgcaggtgccgtgcatcgaacgcaacgctatcgctgccgtgaaagcggtcaacgccgcgcgaatggcgctgcgccggaccagcgagccgcgagtgtgtctcgataaagtgatcgagaccatgtacgaaaccggcaaagacatgaacgccaagtaccgggaaacctcccgcggtggtctggcgatgaagattgttgcctgcgattaa

SEQ ID NO: 136206 - DNA, 732 bp, Enterobacter cloacae
atgatcagcgtattcgatatctttaaaatcggcattggcccttccagctcccataccgttggaccgatgaaagcgggcaaacaattcactgacgacctgatcgcgcgcggcctgctggccgaggtgagcaaagtcgtcgtcgacgtctacggctccctctccctgaccggtaaaggccaccataccgatatcgcgattatcatgggactcgccggcaacctgccggacaccgtcgacatcgacgccattccgggctttattcaggacgttaatacccatggccgcctgatgctggccaacggtcagcacgaagtggacttcccggtggatcagtgcatgaatttccatgccgacaacctgtcgctgcatgagaacggcatgcgtatcaccgccctggccggcgacaaggtgctctacagccagacgtattactctatcggcggcggctttatcgttgatgaggagcacttcggccagactaccgaggcgccggttgccgttccttacccttacaaaaacgccgccgacctgcagcgtcactgccgtgaaaccgggctgtcgctctccggcctgatgatgcagaacgaactggcgctgcacagcaaagaagcccttgagcaacacttcgccgcggtgtggccagtatcgagcgcggcatcaccaccgaaggcgtcctgccgggcaaactgcgcgtcccgcgccgcgccgccgcgctgcgccgtatgctggtga

SEQ ID NO: 136207 - DNA, 1290 bp, Enterobacter cloacae
atggaaaccactcaaaccagcaccatcgtttcgggcgaaacccgcagcggatggcgtaaaaccgacaccatgtggatgctgggcctgtacggtacagcaattggcgcgggcgtcttgttcctgccgatcaacgccggcgttggcggcatgatccccctgatcatcatggcgattctggccttcccgatgactttcttcgcccaccgcggcatgacccgcttcgtgctctccgggaaaaacccgggcgaagacatcaccgaagtagtggaagaacacttcggcgtaggcgcaggtaagctgattaccctgctttatttcttcgctatctacccgatcctgctggtttatagcgtggcgatcactaacaccgtcgaaaccttcatggcgcaccagctgcacatgacgccgccgccgcgcgccattctgtcgctgatcctgattgtcggcatgatgaccattgtgcgtttcggcgagcagatgattgtgaaagcgatgagcgtgctggtgttcccgttcgttatcgcgctgatggtgctggctctgtatctgatcccgcagtggaacggcgcggcgctggagacgctctccctgagcggcgcttccgttaccggcaacggcctgctgatgaccctgtggctggcgatcccggtgatggtcttctccttcaaccactcgccgatcatctcttccttcgcggtagccaaacgtgaagagtacggcgaaggcgctgagaagaaatgctccagtatcctcgcgcgcgcccacatcatgatggtgctgaccgtgatgttcttcgtcttcagctgcgttctgagcctctctccggcagacctggcggcggcgaaagagcagaacatctcgattctgtcttacctggcgaaccactttaacgcgccaatcattgcctggatggcaccgatcatcgcgatgatcgccatcaccaaatccttccttggccactatctgggcgctcgcgaaggctttaacggcatggtgattaaatccctgcgcagtaaaggcaaatcgattgaaatcaacaaactgaacaagctgaccgcgctgttcatgctggtcaccacctggattgtggcaaccctgaacccgagcatcctcggtatgatcgagacccttggcggcccgattatcgcgatgatcctgttcctgatgccgatgtacgcgattcagaaagtcccggcgatgcgtaaatacagcggccatatcagcaacgtcttcgtggtgattatgggcctgattgccatctccgcgatcttctactctctgttcagctaa

SEQ ID NO: 136208 - DNA, 1368 bp, Enterobacter cloacae
ttgattacacatgttagcccgcttggttcaatggatatgctgtcgcagctggaagtggatatgcttaagcgcaccgccagcagcgacctgtaccaactctttcgcaactgctcgcttgctgtgctcaattcggggagcctgaccgataacagcaaggagctcctgtcccgtttcgaaaatttcgagattaacgtgctgcggcgcgaacgcggcgtgaagctggaactgatcaacccgccggaagacgccttcgttgacgggcggattatccgctccctgcaggccaacctgttcgccgtgctgcgcgatatcctgttcgtttacggccagatccacaataccgttcgcttcccgaacctcgatctcgaaagttcggttcatatcactaacctggtgttctcgatcctgcgcaacgcccgcgcgctgcacgtcggcgaggcgccgaacatgatcgtctgctggggcggccactccatcaacgaaaacgaatatctctacgcccgccgcgtcggtacgcagctgggcctgcgggaactgaatatctgcaccggctgcgggcctggcgcaatggaggcgccgatgaaaggcgccgccgtcggccatgcgcagcagcgctacaaagacagccgctttatcggcatgaccgaaccatccattatcgctgcggaaccaccgaacccgctggtcaatgaactgatcatcatgccggatatcgaaaagcgtctggaggccttcgtacgtatcgcccacgggatcattattttcccgggcggcgtcggcactgccgaagagctgctctacctgctgggtattctgatgcaccccgacaacaaagcgcaggtgctgccgctgatcctcaccgggccgaaggagagcgccgactacttccgcgtactggacgagtttatcacccataccctgggcgaatcggcccgtcgccactaccggatcatcattgacgaccccgcggaagtggcgcggcagatgaaaaaagcgatgccgctggtgaaagagagccgtcgcgagaccgatgacgcctatagctttaactggtcgattcgcatctcgccggacctgcagatgccgtttgatccgacccacgagaacatggccaacctcaaactctccccggatcagccggtggaagtgctggccgccgacctgcgtcgtgccttctccgggattgtcgcggggaacgtcaaagaggtgggcatccaggccattgagcagtacggtccttacaaactgcacggcgatccggagatgatgcgccgtatggacgatctgctgcagggcttcgtcgcccagcaccgcatgaagcttccgggcggcaccgcctatattccttgctacgaaatcatcgcctga

SEQ ID NO: 136209 - DNA, 846 bp, Enterobacter cloacae
atgtcttcttacgataatcatcaggcgctggccggcctgacactcggtaaatcaaccgattaccgcgatacctatgacgcctcgctgctgcagggcgtgccgcgcagtttaaaccgcgacccgctgggcttgcatgccgataatctgccgtttcacggcgccgatatctggacgctgtacgaactctcctggctgaacggcaaaggtctgccgcaggtggctgtcggccacgtcgagctgcccgataccagcctcaatctggtggagtcgaaaagctttaagctctatctcaacagctttaaccagacccgtttcgccagctggcaggacgttgcagagacgctgactcgcgatctcagcgcctgcgcgcaggggaaggtgaaggtatcgctctaccgcctggatgaactggaaggccagccgattgcccgcctgcacggcacctgcatcgacgatcaggatatcgagatcgataactatcagttcagcgccgattacctgcagggcgccgccagcggcaaaatcgtggaggagacgctggtcagccacctgctgaagtctaattgccttatcactcatcagccggactggggctcggtgcagatccagtatcggggggcgaaaatcgaccgcgagcagctcctgcgctatctggtttcgttccgccaccataacgaattccatgagcagtgcgtcgaacgtatctttaacgatattctccgtttctgccagccggaatcgctttccgtttacgcccgctatacgcgacgcggcggtctggatatcaacccctggcgcagcaatggcgacttttcccccgccaccggccgcctcgcccgtcaataa

SEQ ID NO: 136210 - DNA, 546 bp, Enterobacter cloacae
gtggaccatcagacagcagaagcgctacgcgcttttacccaacgatattgcgccgtctggcagcagcagcgccacagcctgccgcgcagtgaagagctttacggcgtcccgtcgccttgcgttgtcgacacccagggcgaggccgttttctggcagccgcagccgttttcgctggcgcaaaatatcagcgcggttgaacgcgccctcgacattgtggtacaacagccgcttcattcttattataccactcagtttgccggcgatatgtccggccggtttgccggcgaaaccttgacgctgctgcagacctggagtgaagaggatttccagcgggtgcaggaaaatttaatcgggcacctggtggtgcagaagcggttgaagctgtcgccgacgctgttcatcgccaccctcgagagtgaactggatgtgatttccgtctgtaatctcagcggcgaggtagtcaaagagaccctcggcaccgccaaacgcattacgctttctccctcacttgcgggtttcctcaaccaccttgagccagttctgtaa

SEQ ID NO: 136211 - DNA, 339 bp, Enterobacter cloacae
  misc_feature (201)..(210): n is a, c, g, or t
atgactcttcacgatagcgtgcgcgatcgcctgcgcgccattgaagccctgctgcgcgaaacggagcactggcaggagacggcgcctgacagcagcgccttcgccagcgataagccgttttgcctggataccctggagccgctggagtggctgcagtgggtcctgatcccgcgtatgcaccagctgctggagagcggccannnnnnnnnnccgctgccgcaaaattttgccgttgcgccttattacgaaatggctctggatcaggcccacccggtccgcgaatccatgctggcggaacttctgctgttagacgcgctgtttgccggtgagcaggcctga

SEQ ID NO: 136212 - DNA, 444 bp, Enterobacter cloacae
atggcggaagtcggaatttttgtcggcaccatgtacggcaactcgctgctggtcgcggaagaagcggaagcgatcctcagcggactgggacacaaggctaccgtgtatgaggatccgcaggtcaacgactgggaatcctacacgggtaagtatgtgctggtggtcacctccaccaccgggcagggcgatctgccggacagcatcgtcccgctgtatgagggcatcaaagatatgtatcagcctcacctgcggtacggcattatcgcgctcggcgacagcacctatgccaacttttgcggcggcggcctgaagttcgatcagctgctgcaggagcagggcgcgaagcgcatcggcgagatgctgaagattgacgccagcgaagacccggagccggagagcgtctccaatccgtgggttgagcagtgggccaccctgctcgcataa

SEQ ID NO: 136213 - DNA, 1341 bp, Enterobacter cloacae
atgactactcaatccagcccgattatcacagagatgaaggtcattccggtggccgggcacgacagcatgctgctgaacatcggcggagcgcataacgcatggtttacccgcaatatcgtggtgttaaccgataacgccggccataccggcgtcggcgaagcgcccggcggagaggtcatctaccagacgctgctggcggcgatcccgcaggtggtgggccaggaggtcgcccgactcaatcgcgtggtgcagcaggtgcacaaaggcaatcaggcggcggatttcgacaccttcggcaaaggggcgtggaccttcgaactgaaggttaacgcggtggcggcgctggaagcggcgctgctggacctgctcggccatgtgcttaatgtgccggtctgcgagctgctgggcccgggtaagcagcgtgatgccgtcaccgtgctgggctacctgttctatatcggcgatcggcagaaaaccgaccttggctatctggaccatacgccgggcgatcacgaatggtaccgcctgcgccaccagcaggcgttgagcagcgaggcgatagtgcgtctggcggaagccgcccaggatcgctacggtttcaaagactttaagctcaaaggcggcgtgctgcccggcgagcaggagatcgacaccgcgcgggcgctgaaaaagcgtttcccggatgcgcgcatcaccgtcgaccctaacggcgcctggctgctggatgaggccatcgcgctgtgtaaagggctgcaggatgttctgacctacgccgaagatccgtgcggcgccgagcagggtttctccggccgggaggtgatggccgagttccgccgcgccaccgggctgccggtcgccaccaatatgatagccactaactggcgcgaaatgggccatgcggtgatgctcaacgccgtcgatatcccgctggcggacccgcacttctggacgctctccggcgcggtgcgggtggcgcagctgtgcgacgactgggggctcacctggggctgccattccaacaaccactttgatatttccctggcgatgtttacccacgtcggcgccgccgcgccgggcaaccccaccgccatcgatacccactggatctggcaggagggcgacgcgcgcctgaccaaaaatccgctgcagattattaacggcagcattgccgtgccagacgcgccgggactcggcgtggaacttgactgggagcaggtgcgcagagcccatgaggcctataaagcgctgccgggcggcgcgcgcaacgacgcgggcccgatgcagtacctgatccccggctggacattcgaccgcaaacgtcccgttttcggccgccactaa

SEQ ID NO: 136214 - DNA, 1341 bp, Enterobacter cloacae
atgacgactttctcttcaacgcccgttgtcaccaccatgcaggtgatcccggttgccggccatgacagcatgctgatgaacctgagcggcgcgcacgccccgtacttcacccgcaatatcgtaattatcaaagataacgccggccataccggcgtcggtgaaatcccgggcggtgaaaaaattcgccagaccctggaggatgccattccgctggtggtgggcaaaacgctgggcgagtataaaaacgtgctgggcgcggtgcgcaatcagtttgccgaccgcgacgccgggggccgcggcctgcagacctttgacctgcgcaccaccattcacgtggtgaccggcatcgaagcggcactgctggatctgctgggccagcaccttggggtcaacgtcgcctcgctgctaggcgatggccagcagcgcagcgaagtcgaaatgctgggctatctgttctttgtcggtaatcgccatgcgacgccgctggcctatcagagccagccggatgagcagtgcgagtggtatcgcctgcgccatgaagaggcgatgacgccggatgcggtggtccgcctggcggaagcggcgtatgaaaaatatggtttcaacgactttaagctgaagggcggcgtgctggccggttttgaagaagccgaagcgatcagcgccctggcgaagcgcttcccgaatgctcgcgtcactctcgacccgaatggcgcctggctgcttgaggaggccattcagattggtaaacagctgaagggcgtgctggcctatgcggaagatccgtgcggcgccgaacagggcttctccggccgcgaagtgatggccgagttccgccgcgtgacgggcctgccgaccgccaccaatatgatcgccaccgactggcggcagatgggccatacgctgtcgctacaatcggtggatatcccgctggcggacccgcacttctggaccatgcaggggtcggtgcgcgtagcgcagatgtgccatgagttcggtctgacctggggttcgcactctaataatcacttcgacgtgtcgctggcgatgttcacccacgtcgcggcagcggcgccgggcaagatcaccgctatcgatacccactggatctggcaggagggcaaccagcgtctgaccaaacaaccttttgaaatcaaaggcggcatggtgcaggtaccgagtaccccgggcctgggggttgagctggatatggaccgcgtgatgcaggcaaatgagctatataagaaacatggtcttggcgcccgcgacgatgcgatggcgatgcagtatctgatcccgggctggacctttgacaacaagcgtccatgcatggtgcgctaa

SEQ ID NO: 136215 - DNA, 1140 bp, Enterobacter cloacae
atgaaaatagtgatcgcaccggattcctggaaggagagcctgagcgcgctggaagtggccagtgcgatagagcaaggctttcgcgagatttatcctgacgccgagtacgtcaagctgccggttgccgatggtggggaagggacggtggaagccatggtggcggcgaccggcgggcttctggttccgctgacggtcaccgggccgctgggcgagccggttgaggcattttacgggctgtccggcgatcgccagtgcgcctttatcgaaatggcggcggccagcggcctggagagcgtcccgccggcgcagcgtaacccgctgctgaccacttcctggggtaccggggagcttatccgccatgcgctggacgccggggtaagacagatcattattggtattggcggcagtgcgaccaatgacggcggcgccgggatggcgcaggcgctgggggcgaaactgctgaccgccgagggccagcaaattgcctccgggggcggcgcgctggagacgctggcgctcatcgatctcagcgaactcgattcgcggctggcagattgccggattgacgttgcctgcgacgtcaccaacccgttgaccggcccgcagggcgccagcgcggtgttcggcccgcaaaaaggggcgacggcgcagatgatcgaccggctcgacagcggcctgcggcactatgcccggattatcgcccgcgatttagatatcgacgtgctgagccttgagggcggcggcgcggcgggcggcatgggtgcggcgctgtatgcgttctgtggtgctcagttgcgtccgggcattgagattgtcaccgatgcgctacagctggctgagcgggtggcggatgccgatttagtgatcaccggcgaagggcgtatcgatagccagacgatccacggcaaagtgccggtgggggtggcgagagtggcgaagcgttttaacgtcccggtgatcgggattgccggcagtcttaccgccgatgttggcgtcgtgcatcagcacgggctggatgcggtattcagcgtgttgtataccatctgtacccttgatgaagcgttggccaatgccgccgccaacctgcgaatgacggcgcgtaacgtagccgcggttttgcagatgggcgacaggcggtaa

SEQ ID NO: 136216 - DNA, 2751 bp, Enterobacter cloacae
atgaccaactacagcctgcgtgctcgcatgatgattctgattctggcgccaaccgtcctgataggactgttgctcagtattttctttgtcgctcatcgttataacgacctgcaacgccagctggaggacgctggcgccagtattatcgaaccgctggcggtctccagcgaatatggcatgaacttgcaaaaccgcgaatccatcggccagctgatcagcgttctgcatcgtcgccactcggagatcgtgcgggccatctcggtgtacgattcgcataaccgcttatttgtcacctccaattaccagctcaatcccagcgaactgcagatcccgaaaggcgaggcattcccccgtcacctcagcgtcatccgcgatggcgacatgatgatcctgcgcacgcctattgtctcggaaagctattctccggatgaatcacccgaatctgacgctaaaatgccgggcaatatgctaggctacgtcgccctggagctggatctaaaatcggttcgcctccagcagtacaaagagatttttatctccagcgtaatgatgctgttctgtatcggcatcgcgttaatcttcggctggaggctgatgcgggacgtcactgggccaatccgcaatatggttaacactgtcgaccgcatccgccgcggacagctggacagccgggtcgaaggctttatgctcggcgaactggatatgctgaaaaatggcattaactcgatggccatgtcgctggcggcataccacgaagagatgcaacacaacgtcgaccaggcgacctccgatctacgggaaacgcttgagcagatggagatccagaacgtcgagctggacctggcgaaaaagcgcgcccaggaggcggcgcgcattaagtctgagttcctggccaatatgtctcacgagctgcgcaccccgctcaatggggtgatcggctttacccgcctgacgctgaaaaccgatctcaacgctacgcagcgcgaccacctgaccaccatcgaacgttcggccaacaatctgctggcgatcatcaatgacgtgctcgacttttccaagctggaagccgggaagctgatcctggagagtattccgttcctgctgcgcacttcgcttgatgaagtggtcaccctgctggcgcattccgcgcacgataaagggctggagctgacgctgaatattaagaacaatgtaccggataacgtcattggcgatccgctgcgtctgcagcagattgtgaccaacctcgtgggcaacgccatcaaatttaccgagcacggcaatattgacgtactggtggagcagcgggccatcagtaattcccgggtacagatcgaaattcagatccacgataccggcatcggcatccccgagcgcgaccagtcccggctattccaggccttccgtcaggccgatgccagtatttcacgccgccacggcggcaccgggctcgggctggtgatcactcagcgtctggtcaaagagatgggcggggatatttcgttccacagccaaccgaaccgcggctccaccttctggttccatatcagcctcgatctcaacccgaacgccattccggatacgctgaacaccgacgggcttgtcggcaaacgtctggcctatgtggaagccaacgcgacggcggcgcagtgtaccctggagatgctggccgctacgccgctggaggttatctatagccctaccttctcctcgctggcggaagcgcagtatgacattctgctggtcggtatcccggtttcaatgcgcgatttgtcgccgcatcgggaaaaattagccaaagcctgcgcgatgtccgataacgtactgctggccctgccgtgccatgcccaggtcagcgccgaagccctgaagcgcgacggcgttgccgcctgcctgttaaagccgctcaccaccacccgtctgctaccggcgctggtggctaccagccacgcgcttgcctccgcgccgctgatgcagatcgacagtcataagttgccaatgacggtaatggccgtcgacgacaacccggctaacctgaagctgattggcgccctgctggatgatcttgtgcagcaggtgatcctctgcgacagcggccagcaggcggtggacaaggccaagcagctgcagatggatctgatcctgatggatattcagatgccggatatggacggcatccgcgcctgtgagcttatccatcacctgtcccatcatcagcaaaccccggttattgcggtcaccgcgcacgccctggagggccagcgtgagaaattactgagcgccggcatgaacgactatctggcgaagccaatcgaagaagagaaactgcacgcactgctgctgcgctatcagcccggcctgcacagcgtcgttccggcgtcgctaccgcccgcagagccgatcgtcgatcataaccagacgctcgactggcagctggcgctgcgccaggcggccatgaagccggacctggcgcgggagatgctgcaaatgctgatcgcctttatgccggaggtgcgtaacaaagttgaggagcagctggtgggcgagcagccggaagggctggtggatctgatccataaactgcacggcagctgcagctatagcggcgtgccgcggctgaaaaagctgtgccataccctggaaagtcagctgcgggcaggcaccgccgccgaggatctggagccggagctgcttgagctgttagatgagatggataatgtggcccgcgaagcgtgccggatgggggtgtaa

SEQ ID NO: 136217 - DNA, 1305 bp, Enterobacter cloacae
atggcgcaattctactctgcaaaacggcgtgtgacgacgcgccagatcataaccgttacagtcaacgacctcgatccctttggtcagggtgttgcccgccatcaggggaaggcgctgttcgtgagcggcgtgctgccccacgagcaggccgaggtggtgctggtggaagataaaaaacagtacgcccgcgccgaggtgaaacgccgactgaccgacagcccgcagcgccaggcgccgcgctgcccccattttggcgtctgcggcggatgccaacaacaacatgccagcgttccgcttcagcagcaaagtaaacgcgccgcgctggggcgactgatgaagcgcgaggtagatgacgtcatcgccggcgcgccgtggggctaccgccgtcgcgcacgcttgagcttgaattatcagccgaagacccaacaattgcagatgggttttcgccaggccaacgccaaagcgatcgtcgatgtggtgcagtgccctgttttggtgccccaacttgaggcattgctgcccgccgtgcgcgagtgcttaagcgcgctgagcgcattacgccatctcggccacgtcgagctggtgcaggcggacaatggcccgctgatggtgctgcgccataccgcagccctgccggcgacagacagggaaaaactggaacgcttttcgcaaactcacggtctttccctgtacctcgcgccacaaagcgagatactggagcatattcatggcgaagcgccatggtatacctcagacggactacgcttagtgttcagcccgcgggattttatccaggtcaacgacggcgtaaatcagcagatggtgcgtaccgcactggagtggctggatctgcggccagaggaccgggtgctggatctgttctgcgggatgggcaactttaccctgccgctggcgacacgcgccgcccatgtggtgggcgtggaaggggtgccggcgctggtggagaaggggcgggaaaactccgcccgcaatggtttatcaaatgtcactttcttccatgaaaatctggaagaagacgtcacccgtcaggcctgggcgaagcacggctttgataaagtgctgctggacccggcccgcgccggcgcgccgggcgtgatgccgcatataataaaactggcaccgcggcgggtggtgtatgtttcctgcaacccggcgacgctggcgcgagacagcgaaaccctgttgcaggctggatatcagattcaacgcctggcgatgctggatatgttcccgcataccggccatctggaatcaatggtgttgtttgagcgcaggcttacataa

SEQ ID NO: 136218 - DNA, 2238 bp, Enterobacter cloacae
atggttgcggtaagaagtgcacatcttaataaagctggtgaatttgacccgaagaaatggatcgcgagtctgggaatttccagccagcagtcgtgtgagcgcttagccgaaacctgggattattgtcgcgaaaaaacgcaaggacacccgcaggcggacctgctgctgtggcggggcgtcgaaatggtggagatcctctccaccctaagtatggacatcgatacgctgcgcgcggcgctgctgttcccgctggccgacggcgaagttgtcagcgaagaggtgatgcaggagagcgtaggtaaatcggtcgtgaccctgattcacggggtgcgggacatggccgctatccgccagctgaaggctacccataccgactcggtctcttccgagcaggtggataacattcgccgtatgctgctggcgatggttgacgatttccgctgcgtggtcatcaaacttgctgagcggatcgcgcatctgcgcgaggtcaaggacgcgccggaagatgagcgcgttcttgcggcgaaagagtgcaccaatatctatgctcccctggcgaaccgcttaggcatcggccagctgaagtgggagctggaagattactgcttccgctatctgcacccggcggaatacaagcgcattgccaaactgctccacgagcgccgtatcgaccgcgagcattacatcgaagagtttgtcggccacctgcgctcagagatgaaagccgaaggcgtcaaggcggaagtctatggccggccgaagcatatctacagtatctggcgcaaaatgcagaaaaaacacctcgctttcgacgagctgtttgacgttcgcgcggtgcgtattgtggctgagcgtttgcaggattgctatgccgcgctggggatcgtccatactcactaccgccatctgccggatgaattcgacgactacgtggccaacccgaaacccaacggttaccagtctattcataccgtggtgctggggccgagcggcaagacggtggagattcagatccgcacccggcagatgcatgaagacgccgagctgggcgtggccgcgcactggaagtacaaagagggcgcgggcgccggcaccagcggcggccgcggctatgaagaccgcatcgcctggctgcgtaagctgattgcctggcaggaagagatggccgactccggcgagatgctcgatgaagtgcgcagccaggtcttcgacgaccgggtgtatgtctttacgccgaaaggcgacgtggtggacctgcctgcggggtcgacgccgctcgactttgcctatcatattcacagcgatgtcggccatcgctgcatcggcgccaaaattggcggccgcatcgtgccattcacctaccagctgcagatgggcgatcagatcgaaattattacccagaagcagccgaacccgagccgtgactggctgaaccctaacctcggctatgtgaccaccagccgcggacgctcgaagatccacgcctggttccgtaagcaggatcgcgacaagaacattctcgccggtcggcagatcctcgacgacgagctggagcatttgggcatcagcctgaaggatgcggaaaagcacctgctgccgcgctataacttcaacgagctcgatgaactgctggccgccatcggcggtggcgatatccgtctcaaccagatggtcaacttcctgcaggcgcagttcaataaacctagcgccgccgagcaggatgcggccgcgctgaagcaactgcagcagaaaacctacacgccgcaaaatcgcaccaaggacaatggccgggtagtggtggaaggggtaggcaacctgatgcaccatattgcccgctgctgccagccaatcccgggcgacgagatcgtcggctttatcacccaggggcgcgggatctccgtgcatcgcgcggactgcgatcagctggcagaactgcagtcgcatgccccggagcgcatcgtcgatgcggtatggggcgaaagctactcggcgggctactcgctggtggtcagggtggaggcgaacgatcgcagcggtttactgcgcgatatcactaccatcctcgccaatgagaaggtgaacgtgctgggcgtcgccagccgcagcgatacccgtcagcagctggcaaccatcgatatgaccatcgagatttacaacctgcaggtgctgggccgggtgctcggtaagctcaaccaggtgccggatgtgatcgacgcgcgccgtctgcacggcggttaa

SEQ ID NO: 136219 - DNA, 792 bp, Enterobacter cloacae
atgactcaaattgaccgcttgctcggcatcatgcgccgcctgcgcgacccggaaaacggctgcccatgggataaagagcagacctttgccaccatcgccccttacacccttgaggagacctacgaggtcctcgatgctatccagcgggaagattttgacgatctgcgcggtgagctgggcgatctgctgttccaggtggtgttctatgcgcaaatggcgcaggaagagggacgctttaactttgacgatatctgcgccgccatcagcgacaagctggagcgtcgccacccgcatatcttcggcgaggcatcggcgggcaatagcacggaagtcctggcccgctgggagcaaatcaaaagcgcggagcgggcggaaaaagcccagcattcggcactggacgatattccccatagcctgccggcgctgatgcgcgcgcataaaatccagcgccgctgctcggcagtgggtttcgactggacctcgctgggcccggtgctcgacaaagtgcatgaagaaattgatgaagtgatgcatgaagcgcagcaggcggtggtggatgaagcaaaactggaagaggaagtgggcgatctgctgtttgccacggtgaatttatcccgtcatttgggcgtcaaagccgaggtggcgctgcagaaagcaaacctcaaatttgagcgtcgtttccgcgaggtcgagcgtattgtcgccgcccgcggcctggaaatgaccggcgtcgacctcgataccatggaagaagtgtggcaggaagtaaaacgccaggaaactgatctctaa

SEQ ID NO: 136220 - DNA, 1638 bp, Enterobacter cloacae
atgacaacgaactatatttttgtgaccggcggggtcgtatcctctctgggtaaaggcattgccgcagcctccctggcagccattcttgaagcccgtggtctcaacgtgaccatcatgaaactggatccgtatatcaacgtcgatccgggcaccatgagcccaatccagcatggggaagtgttcgttactgaagacggcgcagaaaccgatctggacctgggccactatgagcgttttatccgcaccaagatgacgcgccgcaataacttcaccaccggccgtatctactccgacgtgctgcgcaaagagcgccgtggcgactacctgggcgcgaccgttcaggttatcccgcacatcaccaacgctatcaaagagcgcgtactggcgggcggtgaaggccatgacgtcgtgctggtggaaatcggcggtaccgtaggcgatatcgaatccctgccgttcctcgaagcgattcgtcagatggcggtagagatcggccgcgagcataccctgttcatgcacctgactctggtgccgtacatggccgccgcgggcgaagtcaaaaccaagccgacccagcactccgtgaaagagctgctctccatcggtattcagcctgatattctgatctgccgctccgatcgcgcggttcccgccaacgaacgagccaaaattgctttgttctgtaacgttccggaaaaggctgtgatttctctgaaagacgtcgattccatttataaaattccgggcctgttgaaatctcaggggctggacgattatatttgtaaacgattcagcttaacttgtccggaagcaaacctggccgaatgggaacaggtaatctatgaagaagctaatccggcaggcgaagtcaccatcggtatggtcggtaagtacattgaactgccggatgcctacaagtcggtgattgaagcgctgaaacacggcggtctgaaaaatcgtgttaccgtcaacatcaagctgatcgattcgcaggatgtggaaacgcgcggcgtcgaaatcctcaaggatttagacgctatcctgatcccgggcggcttcggctaccgcggcgttgaaggcaagatcgccaccgcgcgctatgcgcgtgaaaacaatattccttatctgggcatttgcctgggtatgcaggttgcgctgattgagttcgcgcgtaacgtagcgggtatggaaaacgccaactcgacggaatttgtgccagactgtaaatacccggtcgtggccctgattaccgaatggcgtgacgaagatggcaacgttgaagtccgctctgagaagagcgatctgggcggcaccatgcgcctgggcgcgcagcagtgccagctgagtgatgattctctggtacgccagctttacggcgagccgaccatcaccgagcgtcatcgtcaccgctacgaagtcaacaacatgttgttgaaaccgattgaagctgccggtctgcgcgttgcgggccgttccggggatgatcagttggtcgagatcatcgaagtgccgaaccatccgtggtttgtggcctgccagttccacccggagtttacttcgacgccgcgtgatggacacccgctgtttgccggctttgtgaaagccgcgagcgagtaccagaaacgccaggcgaagtaa

SEQ ID NO: 136221 - DNA, 1047 bp, Enterobacter cloacae
atgaaaaaatggtcacgccacctgctcgcggcgagcgctctggcaatcggcatgggcgctgcgcacgcggacgatagcaaaacgctctatttctataactggaccgagtatgtgccgccgggcctgctggagcagttcaccaaagagaccggcatcaaggttatctattcgacctacgagtcgaacgaaaccatgtacgccaagctcaaaacctataaagacggcgcgtacgacctggtcgtcccgtcgacctactttgtcgacaagatgcgcaaagaaggtatgctgcagaagatcgataagagcaagctgactaacttcagcaacctcgatccgcagatgctgaataaaccgttcgatccgaataacgactactccatcccctatatctggggggcgacggccatcggcgtcaacagcgaggcgattgacccgaaaactatcaccagctgggccgacctgtggaagccggaatacaaaagcagcctgctgctgaccgacgacgcgcgcgaagtgttccagatggcgctgcgtaagctgggctattccggcaacaccaccgacccgaaagagattgaagccgcctataacgagctgaaaaagctgatgcccaacgtcgcagcgtttaactctgataacccggcgaacccgtatatggaaggcgaagtgaacctcgggatggtatggaacggctcggcttacgtcgcccgccaggcaggtactccgctggaagtgatctggccgaaagagggcggcatcttctggatggacagcctgtcgatcccggcgaacgccaaaaacgtcgacggcgcgctgaagctgattaacttcctgctgcgcccggatgtcgccaaacaggtcgctgaaaccatcggttatccgacgccgaaccttgcggcgcgcaagatgctcagcccggcagtggccaacgataaatcgctctatccggacgccgcaaccattgagaaaggcgaatggcagaatgacgtcggcagcgccagcgccatttatgaagagtattaccagaagctgaaagcgggccgttaa

SEQ ID NO: 136222 - DNA, 786 bp, Enterobacter cloacae
atgatcggtcgactgctgcgcggcggctttatgaccgccatctacgcgtatctctacatccctattattattctgatcgttaactcgtttaaccggtcgcgcttcggcatcaactggcaggggttcactaccgactggtatagcctgctgatgaacaacgatagtctgctgcaggccgcccagcactcgctgaccatggcggtgctgtcggcgaccttcgccacccttatcggctcgctgaccgccgtggcgctgtaccgttaccgctttcgcggcaaaccgtttgtcagcggcatgctgtttgtggtgatgatgtcgccagatattgtgatggccatctctctgctggtgctgtttatgctgatcggcgtccagcttggtttctggtcgctgctgttttcgcatatcaccttctgcctgccgtttgtggtggtcaccgtttactcccgcctgaaaggctttgacgtgcggatgctggaggcggcgaaagatctgggcgccagcgagatgaccatcctgcgcaaaattatcctgccgctggccctgccggcggtagccgctgggtggttgctgagcttcaccctgtcgatggatgacgtggtagtctcctcgttcgtgaccggtccggggtatgaaatcctgccactgaagatctattcgatggtcaaggttggcgtttcgccagaggtgaacgccctggccacgattttgttggttctgtcgctggtgatggtcatcgccagtcagttaattgcacgtgataaaactcaggggacgttaaaatga

SEQ ID NO: 136223 - DNA, 858 bp, Enterobacter cloacae
atgaagaacaccagtaaattccagaatgtggtgatcgccactatcgtcggttggctggtgctgtttgtcttcctgcccaacctgatgatcatcgccaccagctttttgacccgcgacgatgccaacttcgtcaaactggtcttcacgctggataactattcgcggctactggatccgctctattatgacgttctgctgcattcgctaaacatggcgctgctggcgaccctcgcctgcctggcgctgggctatccgtttgcgtggttcctcgcccggctgccgcagaaggtacggcccctgctgctgttcctgctgatcgtccctttttggaccaactcgttgatccgcatctacgggctgaagattttcctcagcactaaaggttacctgaacgagtttctgctgtggctgggggtgatcgacaccccgatacgcattatgttcaccccctcggcggtgatcatcggcctggtgtacatcctgctgccgtttatggtgatgccgctctactccagcattgagaaactggatcgcccgctgctggaagcggcgaaagatctcggcgccagcaagctgcagacctttatccgcattatcatcccgctgaccatgccggggatcatcgccggctgtctgctggtgatgctgccggcgatggggttgttctacgtttccgacctgatgggcggcgccaagaacctgctgatcggcaacgtgatcaaaagccagttcctcaatatccgtgactggccgttcggcgcggcaaccagcattaccttaaccctggtgatgggcctgatgctgttgatttactggcgcgcggcgcgcctgctgaataaaaaggtggagctggaatga

SEQ ID NO: 136224 - DNA, 1137 bp, Enterobacter cloacae
atgggacagagtcaaaaattgaatatacaaccgcgttcgcgttcgccgctggtgcatctggcgggaattcgcaagagctttgatggtaaaacggtcatcgacaaccttaacctgaccatcaacaatggtgagtttctcactctgcttggcccctctggctgcggtaaaaccaccgttctgcgccttattgccggcctggaaaacgtcgacagcggacggatccatctcgaagatcacgatatcactcatgttccggcggaaaaccgccacgtcaataccgtattccaaagctacgccctgtttccgcatatgacggtgttcgagaacgtcgcctttggcctgcggatgcagaaaacaccggcggcggaaatcaccccacgggtgatggatgccttaaagatggtgcagttggaggcgtttgcccagcgcaaaccgcaccagctctccggcggccagcagcagcgcgtggccatcgcccgcgcggtggtcaacaaaccgcgtctgctgctgctcgatgagtctctttcggcactggattacaagctgcgcaagcagatgcagaacgaactgaaagcgctgcagcgtaagctcgggatcaccttcgtcttcgtcacccacgatcaggaagaggctctgaccatgtccgatcgcatcgtggtgatgcgtgatggcaaaatcgaacaggacggcaccccgcgagagatctacgaagagccgaagaacctgtttgtcgccagctttatcggcgagatcaatatctttgacgccacggtaattgaacgtctcgacgaacagcgcgtgcgcgcccgcgttgaaggacgggaatgcaacatcaccgtcaattttgccgtggaggccggccagcgtctgcatgtcctgctgcgcccggaagatctgcgcgtcgacgagatccaccataacagcgacgccgacggcctgatcggctatgtccgcgagcgcaactataaaggcatgactctggagtcggtggtggaactggagaacggcaaaatggtgatggtcagcgagttctttaacgaagacgacccggatttcgaccactctcttgaccagaaaatgtctatcaattgggtggaaagctgggaggtggtgctggccgatgaagaacaccagtaa

SEQ ID NO: 136225 - DNA, 1233 bp, Enterobacter cloacae
atggataaaatgcttgagcgttttttgcagtacgtttctttggacacgcagtcaaagcctggcgttcgtcaggtccccagcacggaagggcagtggaagctgttacgcctgttgcaggcgcagctggaagaaatgggactggtcaaggtaacgctgagtgaaaaagggacggtaatgggaactttgcccgctaacgttgagggcgatatcccggccatcggttttatctcccacgtcgacacctccccggatttcagtggtaaaaacgttaatccgcagattgttgaaaactatcgcggcggcgatatcgcgctgggtatcggcgatgaggtgctctccccggtgatgttcccggttctgcatcagcttttgggacagacgctgatcaccaccgacgggaaaacgctgctcggggcggacgacaaagccggcattgccgaaattatgaccgcgctggcgactctgcaggcgaaaaatattcctcatggcgatatccgcgtggccttcacccctgatgaagaggtgggtaaaggggcgaagcatttcgacgtcgaggcctttgacgcccgctgggcctataccgtcgacggcggcggggtcggcgaactggagtttgaaaacttcaacgccgcctcggtgacgataaaaattgtcggtaataacgtgcaccccggcaccgcgaaaggggtgatggtcaacgcgctgtcgctggccgcgtgcattcatgccgaagtaccggccgatgaagcgccggagaccactgaaggctatgaaggtttttatcacctcaccagcatgaaaggcagcgtcgatcgggccgagatgcattacatcatccgcgattttgaccgtaagcacttcgaggcgcgcaagcgcaagatgatagagatcgccaaaaaggtcggcaagggactgcacccggactgttatattgagctggtgatcgaggacagttattacaacatgcatgagcaggtgatcgcccatccgcacgtggtcgatattgcccgccaggcgatggtggactgcgatattgaaccgcagatgaagccgatccgcggcggcaccgacggcgcgcagctgtcatttatgggactgccatgcccaaacctgtttaccggtggctacaactatcacggcaaacatgagtttgtcaccctggaaggaatggagaaagcggtgcaggtgatcgtgcgtatcgccgagctgacggcggcacgcaaagggcattaa

SEQ ID NO: 136226 - DNA, 1122 bp, Enterobacter cloacae
atggattatcaattaacgcttaactggcccgactttatcgaacgctactggcaaaaacggccggtggtattgaagcgcggcttcgccaattttatcgaccccctaagcccggacgaactggcaggactggccatggagagcgaggtcgatagccgccttgtcagccatcaggatggaaaatggcaggtcagtcacggtcctttcgaaagctacgatcacctgagcgaaaacaactggtccctgctggtgcaggcggttaaccactggcatgaaccgtccgcagcgctgatgcatccgttccgtgccctgccggactggcgtatcgacgacctgatgatctccttctcggtgccgggaggcggcgtcggcccgcatctggatcagtatgatgtgtttatcattcagggcaccggccgtcggcgctggcgcgttggggaaaaggtgccgatgaaacagcactgcccgcatccggacctgctgcaggttgaccccttcgaggcgatcatcgatgaagagatggagcctggcgatattctctatattccgccgggattcccgcatgagggttattcgctggaaaactcgcttaactattcggtcggctatcgcgcgccgaatgcccgcgagctgtttagcggctttgccgactatgtcctccagcgcgaactgggcagccagcgctacgccgatccggacgtgccgtcccgcgaccatccggcggatattttaccgaccgaactcgaccgcctgcgcgagatgatgctgggtctgattaaccaaccggagcactttaagcagtggttcggcgagtttatcacccagtcgcgtcatgagctcgacgtcgcgccgccggagccgccgtatcagccagatgagatttacgatgccctgcagcagggcgataccctggaacgcctgggcggcctgcgggtgctgcgcattgacggcgaggtattcgttaacggcgagaagatcaactccccgcaccgtccggcgctggacgccttagccacccatctgacgctgcgcgccgaccattttggcgatgcgctggaagatccttctttcctcgccatgctggcagcgctggtcaacagcggctattggttctttggcgactga

SEQ ID NO: 136227 - DNA, 1467 bp, Enterobacter cloacae
atgaagggactgttgcggcatatcttcccgctgtcattacgggttcgcttcctgctggcgaccgccggggtggtgctggtgctctccctggcctacggcatggtggccctggtgggctatagcgttagcttcgataaaaccacctttcgcctgctgcgcggcgagagcaatctcttttatatgctggcgagatgggaaaacggcgctattgacgtcgatatcccggaaaacctgaatatggaaagcccgacggtgacccttatctacgatgagcagggcaaactgctgtgggcgcagcgtgatgttccctggctggcgaaacgcattcaaccggaatggctgaaacgcaatggcttccatgagattgaagccgatgtcgacagcagcagtatgctgttgcgcaataaccatgagattcaggaacagctggacgctatccgcgaacagggcgacgactctgagatgacccactcggtggcgatcaacctctacccggccaccagcaaaatgcctcagctcagcattgtggtggtcgacaccattccggtggagctcaagcgcagctatatggtgtggagctggtttgtctatgtgctggccgccaacctgctgctggtgatccccctgctgtgggtcgccgcctggtggagcctgcggcccattgagtcgctggccaaagaggtgcgcgaactggaggaacatcaccgcgaaaagctcaatcccaacaccactcgcgagctgacccggctggtcagcaacctcaaccgcctggttcgcagcgagcgcgaacgctatgacaaataccgcactaccctcaccgatctcactcacagtctgaaaacgccgctggcggtgatgcagagtacactgcgctcgctgcgcggcgagaagatcagcgtcgacgaggcggagccggtgatgctggagcagataagccgcatctcgcagcagattggttattacctgcatcgcgccagcatgcgcagcggcggcaccctcttgagccgggaattacacccgatcgcccccctgcttgacagcctgacttccgctctcaacaaggtctatcagcgcaaaggggtcaatatctcgctcgacatctcgccggagatcacttttgtcggcgagcagaacgattttatggaagtgatgggtaacgttcttgataacgcctgtaagtattgcctggagttcgtggaagtttccgtgcgccagaccaccgacagccatctgcacatcctggtggaagacgatgggccggggatcccgcagagccagcgccgggccgttttcgaccgcggccagcgggctgataccctgcgtcccggccagggggtagggctctccgttgcgcgtgaaattgtcgaacaatatgatggagagatcatcgccggggaaagcctgctcggcggcgcctgcatggaggtggtgtttggccgccagcagatggaagataaacagagttaa

SEQ ID NO: 136228 - DNA, 672 bp, Enterobacter cloacae
atgcgcgtactcgtggttgaggataatgccctgctgcgtcaccacctcaaagttcagctgcaggagctgggccatcaggtcgatgcggcggaagatgccagggaagcggactactatctgggcgaacatctcccggatatcgccatcgtcgatctcggcctgccggatgaagacggtttatcactgatccgccgctggcgcagccacgacgtgtcgctgccggtgctggtgctgaccgcccgcgaaggatggcaggataaagtggaagtgctgagcgccggggcggatgattacgtcaccaagcctttccatattgaagaggttgccgcccgcatgcaggcgctgctgcgccgtaacagcggtctggcctcgcaggtgatctccctgccgccgttccaggtcgacctctcccggcgcgagctgtcggtgaatgaccagccgatcaagctgaccgcctttgaatacaccattatggaaaccctgatccgtaaccgcggcaaagtggtcagcaaagattcgctgatgctccagctttacccggatgccgaactgcgagaaagccacaccatcgacgtgctgatgggtcggctgcgcaagaaaattcaggctgaatacccacaggacgtcatcaccacggtgcgcggccagggctatctgttcgaattgcgctga

SEQ ID NO: 136229 - DNA, 504 bp, Enterobacter cloacae
  misc_feature (418)..(427): n is a, c, g, or t
atgtttcagcagcagagcgcggactgggtcaggctggcgcaatcgcccagccggacggaacgcatcgaagccttcttcggcggccacggctacgaaccgcaccggcatgacacctacgccatcggccagacgatcgccggcgtgcagagctttcactatcgcggcggacgccagcacagcctgcccggcggaacgatggtgcttcatccggacgaaatacacgatggcgaggcgggcaccgaggcggggtttcactaccgcatggtctatatcgaaccggcgctgatccagaagatactcggcggcaggccactgccgtttattcccggcggcctgtcggcggatccgcgcctgcggtgcgccgcgctgccgttattaaaagcggtcacggacaccttcgagccgctggaggaagagnnnnnnnnnngaagaggacgccctgtacgacctggcgcagaccctggccgttgtcggcggccaacgttcccgtcgccaggcgtttga

SEQ ID NO: 136230 - DNA, 273 bp, Enterobacter cloacae
atgcaggatatgaccctcgacaccctgtcgcaggtcagcggccgggaccgctggagcctgagccgggatttcagaacgctgtacggtaccagcccgtggcgctacgtcatgatgcgccggctcgatttttgccgccagcggatgcgcgccggggagcgtctggtggatattgccgccgacgcgggctttgccgaccagagccacatgacgcgccagtttatcagccgctttggcctctctccggggcgctggctgcgggcgatccgcggataa

SEQ ID NO: 136231 - DNA, 363 bp, Enterobacter cloacae
atgtatcaactcgttaatcttgctcagaaattttccctgttcagcgaacaatggcagcccaaagtggtggctgagatgaacgactatcagttcaagatcgtgcgcatcgtcggcgattttatctggcacagccacccggaaaccgatgagacattgatggtggtggagggggtattgcgcgtggacttccgcgacgggcatgtgctggtgaaggccggggagatgatcgtcgtgccgcgcggggtggaacataagacctcggcggagacggaagcgaagctgatgctgattgagccgcgcggggtgttgaataccggccacgagggcggcgagcggacggcggtgaacgacgtttggatctga

SEQ ID NO: 136232 - DNA, 1095 bp, Enterobacter cloacae
gtgaaagcggtagagtatttcctgaaagagaaagtcgctgacgtcgccgagctgcacgccgtgtcggagtttattcacttcgcctgtacgtctgaagacataaataacctctcccacgcgctgatgctgaaaaccgcccgcgacgaagtggttctgccttactggcgcaagctgattgacgcggtaaaagatctggcgacccagtatcgcgatgtgccgctgctctcccgtacccacggccagccggcaacgccgtccaccatgggtaaagagatggcgaacgtcgcctaccgtatggagcggcagtatcgtcagctgaaccaggtggaaatcctcggtaaaatcaacggcgcggtgggtaactacaacgcccacatcgccgcctacccggaagtcgactggcatcagttcagcgaagagttcgttacctcgctgggtattcagtggaacccgtacaccacgcagatcgagccgcatgactatatcgctgagctgtttgactgcatcgcgcgcttcaacaccattctgatcgacttcgatcgcgacgtgtggggctacatcgcgctcaaccacttcaaacagaagaccatcgccggggaaatcggctcctccaccatgccgcacaaggtgaacccgattgacttcgaaaactccgaaggcaatctcggcctggccaatgcggtcatgcagcacctggccagcaaactgccggtttcccgctggcagcgcgacctgaccgactccaccgttctgcgtaacctcggcgtgggcatcggctatgcgctgatcgcctatcagtccaccctcaaagggatcagcaagctggagctgaaccaggatcgcctgctggacgaactggatcacaactgggaagtactggctgagccgatccagaccgtgatgcgtcgttacggtatcgaaaaaccgtacgagaagctgaaagagctgacccgcggcaaacgcgtggacgcggaagggatgaagcagtttattgacagcctcgccctgccggaagaggaaaaagtgcgtctcaaagcgatgaccccggccaactatatcggtcgggcaaccaccatggttgacgagctgaagtaa

SEQ ID NO: 136233 - DNA, 642 bp, Enterobacter cloacae
gtggcgaagaattactatgacatcaccctggcgctggctggcgtttgccaggcggcgcgactggttcagcaactggcgcatcagggacattgcgacagcgatgccctgcatgtgtcgctgaacagcatcatcgacctcgatcctgagtcgacgctggcggtgttcggtggcagtgaaaccaatcttcgcctcggtcttgaaacgctgctcggggtgctcaataccagcagccgtcagggcctcaatgcggaactcacccgctataccctgagcctgatggtgctggagcgcaagctcgccgccagtaaaggggcgatggacacgctcggcaaccgcatcgccggcctgcaccgtcagctggaacactttgacctgcagtccgaaacgctgctcagcgccatggcgggcatctatgtcgatgtgataagcccgctggggccgcgtattcaggtgaccggctcccctgccgtgctgcaaagcccgcaggtgcaggcgaaagttcgctcagcgctgctggcgggtattcgcgccgcggtgctctggcatcaggtgggcggcggacgtctgcagcttatgttttcccgtaatcgtctggttaaccaggcaaagcaaattcttgctcatttaaccccggagttgtga

SEQ ID NO: 136234 - DNA, 1167 bp, Enterobacter cloacae
atgaacggtgagcgcgtgctagaatacgccgcctcgaagttcaatgtagcgagtatttccatgtcagaaagccagaaaaaagtgatcgtcggcatgtccggcggcgtcgactcctcggtctccgcgtacctgctgctgcagcaagggtataaggtggaaggcctgttcatgaagaactgggaggaagacgacggcgaggaatactgcaccgccgccgccgaccttgccgatgcgcaagcggtctgcgataagctgggcattgaactgcacaccgttaactttgccgccgaatattgggataacgtctttgagctcttcctggaagagtacaaagccggccgcacgccgaacccggatattctgtgcaataaagagatcaaatttaaagccttcctcgagtttgctgccgaagacctcggcgccgactacatcgccaccgggcactatgtgcgccgcgccgatgtcgacggtaaaagccagctgctgcgaggactcgacggcaacaaagatcagagctacttcctctacacccttagccacgagcagattgcccagagcctgttcccggtgggtgaactggaaaaaccgcaggtgcgtaagatcgccgaagagctggatctgatcaccgcgaagaaaaaagattccaccggcatctgctttatcggcgagcgtaaattccgcgatttccttggccgctatctgccggcgcagccgggcaaaatcctcaccgtcgacggcgaggagatcggtacccatcaggggctgatgtaccacaccctgggccagcgtaaagggctgggtatcggcggcaccaaagagggtagcgaagatccatggtacgtggtcgataaagacgttgagaataatattcttatcgtcgcccagggccatgaccacccgcgcctgatgtccgtcggtctgattgcccaacagctgcactgggtaaaccgtgaaccgctacaaggcaccctgcgctgcacggtgaaaacccgctatcgccagaccgatatcccctgcaccgttaccgcgctggatgaagaccgtatcgaagtccgcttcgatgagccggtcgcggcggtgaccccgggccagtccgcagtgttctatttaggggaagtgtgcctcggcggcggaattattgaacaacgactgcctctgcagtcctga

SEQ ID NO: 136235 - DNA, 459 bp, Enterobacter cloacae
atgtttaaacctcatgtcaccgttgcctgcgtggttcacgcccaggataaatttctcatcgtcgaagagaccattaacggcaaagcgctgtggaaccagccggccggccatctcgaggccaatgaaacgctgctgcaggccgccgaacgtgaactgtgggaagagaccggcattcgcgccacgccgcagcacttcatccgcatgcatcagtggctggctcccgataacacgccgtttctgcgcttcctgttcgccatcgaacttagcgatctgtgcgccactgaaccgcacgacagcgatatcgatcgctgcctgtggctcagtgctgaggaaattcttaacgcgccgaacctgcgctcgccgctggttgccgaaagcattcgctgctacctgcaggacccgcggcagccgctgtcgctgattggcgcatttaactggccgttcacagggggtgaatga

SEQ ID NO: 136236 - DNA, 651 bp, Enterobacter cloacae
atgcggcaattgataaagcctgaaaataccatgcagaaaacttcatttagaaaacatcgcgttgagcgattcagcacacaacaagtcaccagacaacgtaaagaacgccagccaaaaactgtgatcttgttcaataaaccctatgatgtgttgccgcaatttaccgatgaagccgggcgcagcacgctgaaagattttattccggtggcgggcgtctacgccgcaggtcggctcgatcgcgacagcgaaggcctgctggtgctgaccaacgacggcgcgctgcaggcgaagctgacccagccgggtaagcgcaccggcaagatctactatgttcaggtggaaggcgaacccacgcccgaggcgctgaccgccttgcgcgacggcgtaacccttaacgacggccccaccctgcctgccggcgtagaacttgtcgaggagcccgtctggctgtggccgcgcaacccgccgattcgtgagcgcaaatcgattcccacccgctggttgaaaatcacgctctacgagggacgcaaccgccaggtgcgccggatgaccgcccacgtcggcttccccaccctgcggctgatccgctacgccatgggcggctatacgcttgacggactggccaacggcgactggcgtaaagccgaataa

SEQ ID NO: 136237 - DNA, 1251 bp, Enterobacter cloacae
atggaaagcaaagtagtagttccggcggaaggtcaaaaaatcaccctgcaaaacggcaaactgaacgtccctcacaatccgattatcccgttcattgaaggtgacggtatcggcgttgacgttaccccagcgatgctgaaagtggttgatgccgccgttgagaaagcctataagggcgagcgtaaaatttcctggatggaagtttacaccggtgagaaatcaacccacgtctatggccaggacgtctggctgccagctgaaaccctcgatctgattcgtgactaccgcgttgctatcaaaggtcctctgaccaccccagtcggcggcggcattcgttctctgaacgtggcgctgcgccaggagctggatctttacgtctgcctgcgtccggtacgttactaccagggcaccccgagcccggttaaacacccggaactgaccgacatggttatcttccgtgaaaactcagaagatatctatgcgggtatcgagtggaaagccgactctgcggaagcagacaaagtgatcaaattcctgcgcgatgagatgggtgtgaagaaaattcgcttcccggaacattgcggcatcggcatcaagccgtgctctgaagaaggcaccaaacgcctggtgcgcgccgcgattgaatacgcgatcaccaacgatcgtgattccgtcactctggtgcacaaaggcaacatcatgaagttcaccgaaggcgcgttcaaagactggggctaccagctggctcgcgaagagttcggcggcgagctgatcgacggcggtccgtgggtgaaaatcaagaacccgaacaccggcaaagagatcgtggtgaaagacgtgatcgccgatgcgttcctgcagcagatcctgctgcgtccggcggaatacgacgttatcgcctgtatgaacctgaacggcgactatatctctgacgccctggcggcgcaggttggcggtatcggtatcgccccgggcgccaacatcggcgacgagtgcgcgctgttcgaagcgactcacggtactgcgccgaagtatgccggccaggacaaagtgaacccgggctccatcatcctgtccgcagagatgatgctgcgccatatgcagtggttcgaagccgcagacctgatcgtcaaaggcatggaaggcgctatcgccgccaagaccgtgacctatgacttcgaacgtctgatggaaggcgctaaactactgaaatgtagcgaatttggcgacgcgattatcgcgaacatgtaa

SEQ ID NO: 136238 - DNA, 714 bp, Enterobacter cloacae
atgaatctcctgaaaccgcagcaagacagtgagccagaggaggcgctggaaaccgctatggcgatggtggcctccgccctctctgactcgtcaagggtcagtattctctgcgcgctgatggacgggcgcgcatggacggcaaccgaactcagtacggtcgccgaggtgtccgcctccaccaccagcggccatcttgcccggctgctcagcaacggactggtggtgtgtctcgcgcaggggcgccaccgctattaccgcctggcgggctcgcatattgccgggctgctggaaaacctgatgggcgtctctatgcaagcgcataagacgcttctccccagcacgccggttaatcttcgctacgcccggacctgctacgatcatctggcgggcgagctggcggtgaatatttatgagtatatgctgcgggaaaaatggctggcggccgatggactggccctgacgtcagccggtaaaacccagcttgaacgccttggcgcagtgtttaacgcccgcccacggcgtaagccctgctgcccctgtctcgactggagcgaaagacgttttcatctgggcggcgatgccggttcgtcgctaatgacgctgttcctgcaaaaaggatggataacgcgcgcgccgggatatcgggaagtacaagtgacggatagcggcaaagcggcgctgtcccggctgtttaatctgaaagtgagcggatag

SEQ ID NO: 136239 - DNA, 393 bp, Enterobacter cloacae
atgtatgacattcacgtgattctcagcaactcgccgggctcgcttggcgcaatgggtatggcgctgggtaacaacggcgtggggctcgaaggcggtggcgtattcaccacgcctgatgccggacatgcgcattttctggtggaagacggtgagacagcccgcagggtgctgaccgaggccggctttacggccagcaatgtatgccgtcctctgatacgaaagttacctcaggaacgtcctggggaactgggagacatcgcggacaccctggcccataatggtattaatattctggtacagtacagcgaccaccgtaaccggctcattctccttaccgatgatgacgcccgggcagcggaagtgaccaaaaaatgggccatactttctgaatga

SEQ ID NO: 136240 - DNA, 324 bp, Enterobacter cloacae
atgattgcggtactttttgaggccgacgccttaccacaagcacaggaaagatatcttcagctggcggccgggctgacgcctttgctatcagacacgccggggtttattgccatcgagcgctttcagagcctgagtacgcccggcaaaatcctctcgctatcctggtgggaagatgaagcctcggtggccaactggcagcaaaatgagcggcatctggctgcccagcgcgaaggcaaagcatcgattttttcatactacagaatacgcgtcgcccgcgtgttccgggattacacatcggatcggggagcacagtcagatgtatga

SEQ ID NO: 136241 - DNA, 228 bp, Enterobacter cloacae
atgctcgagttacgtccgaattgcgaatgctgtgataaagatctgccgccagactcacccgaggcgtttatctgttcgttcgagtgcaccttttgccgggactgcatgacgacgcgactgaacggacattgcccgaactgcggcggcgaactggtgcggcgccctgtgcgtcccgaagaggcgctgcggcgccaccccgcatccaccctgcgccgccatgcacagtag

SEQ ID NO: 136242 - DNA, 1194 bp, Enterobacter cloacae
atgaaagcactcacttatcacggcccgcatcatgtcagcgtcgacaccatgcctgacccggctcttgaggcagcggacgatattattctgcgcgtcaccgcgacagcgatttgcggttccgatctgcatctgtaccgcggaaagatccccggcacgcaccatggtgatattttcggccatgaatttatgggggaagtggtggaagccggttccgaggtcaccgcggtccgcaaaggcgaccgggtggttatcccgtttgtcatcgcctgcggagactgcttcttttgtcgcttgcagcagtatgccgcctgcgaaagcaccaatagcggccagggagcgacgctcaatcgaaaaggcatttcgccaccggcggcgctgtttggctatagcgatttgtacggcgggatcccgggcggccaggcggaatatgtacgggtccccaatgccaataccggaccgtttaaagtgccagacaccttacccgatgaaaaggtgctgtttctgtcagatattctgcccaccgcctggcaggcggttaaaaacgccgaggtcaaacccggcagtagcgtggctatttttggcgccggcccggtaggcctgctctgcgcctcctgcgccaggctcaatggcgcagaacagatatttatcatcgatcataacgattaccgactcgatttcgcgcaacaacgctatggcgcgatcccgataaactttgaccaccatgacgatcctgcgcagtggattatcgataacacgccgggccatcgcggcgtcgacgcggtgatcgacgccgtgggcttcgaggcgaaaggtagccttacggaaaccgtcctcagcaccctgaaaatcgaggggagcagcggaaaagccctgcgccagtgcatcgccgccgtgcgccgcggcggcatcgtcagcgtacccggggtttacgccggtttcatccacggctttatgtttggcgatgcctttgataaaggactgaccttcaggatgggacaaacccacgtccacgcctggctgccggatctgctggcgcttattgagcaagggctgcttaccccggaggagattgtcactcaccatatgccgctggaggaggccgcgcgcggctatcagatctttgagaaacgtgaagaggcgtgccgcaaagtgatcctcgtaccgggaatgcagcccgggaaagcgaccctctga

SEQ ID NO: 136243 - DNA, 186 bp, Enterobacter cloacae
atggcagagcatcgtggtggttccggtaattttgctgaagaccgtgaaaaagcttctgaagcaggtcgtaaaggtggtcagcacagcggcgggaactttaaaaatgatccgcagcgtgcgtccgaagcgggtaaaaaaggcggacagaatagccacggcggtggccgcaagtccgataattcctga

SEQ ID NO: 136244 - DNA, 495 bp, Enterobacter cloacae
atgaatatgaaaagcattgaagatgtatttattcacctgctctcagatacctacagcgcagagaaacaattaacccgcgggctggctaaactagccagagcggcgtccagtgaaaaactcagcgcggcgttcaatgctcatcttgaagaaacccagggccagatcgaacgtatcgaccagattattgaacaggaatccaacctgaaaatcaaacgcatgaaatgcgtggccatggaaggattaatcgaagaagctaatgaagtcgttgagagcacggaaaaaaatgaggtacgtgatgctgcattaattgccgctgcgcaaaaggtcgagcattacgaaattgccagttacggtactctggtcaccctggcagagcagttgggctataaaaaagcagccaaactgcttgccgaaaccctggaagaagaaaaacaaaccgatgtgaaattaaccgatctggcggtaggtaatattaataagaaagcggaaaaataa

SEQ ID NO: 136245 - DNA, 507 bp, Enterobacter cloacae
atgaatcacgttgaacattaccatgactggctacgagatgcgcatgccatggaaaaacaggcagagtccatgctggaatcaatggctggccgtatcgataattatccggatctccgtgccagaatcgaacagcatgttaacgagaccaaacggcaaattaccgtgctggaagagatcctcgaccgcaatgagatttcgcgctcggtgattaaagattcgatgagtaaaatggcggctctcggccagtccatcggcgggatgtttccttccgatgaaatcgtcaaaggctcgatcagcgggtacgttttcgagcagtttgaaatcgcctgctatacctctctgctggcggccgctgaaaaagcgggcgataccgcctccatcccagccattgaagccatcctggcggaagagcgggaaatggccgactggctgattaaacatattcctcagaccacagagcagtttctcctgcgttcagatgctgacggcgtagaagcgaaaaaataa

SEQ ID NO: 136246 - DNA, 888 bp, Enterobacter cloacae
atgtttcgtcatgtgaaacaactgcagtataccgtacgcgttgctgaaccgaatccggggctcgcgaatttactgctcgaacagtttggcggccctcagggcgagttggccgccgcgtgtcgttatttcacccagggattaagcgatgacgatcccggccgcaaagatatgctgatggatatcgcgacagaggagttgagccatctggagatcattggcactttggtcggcatgctgaataaaggcgccaaaggagccctggcggagggcaccgagagcgaggcggaactctatcgttcgctcaccgccaacggcaatgacagccatattacatccctgctgtacggcggcggtaccccgctgaccaactcggcgggcgtgccgtggacggcggcctacattgatactatcggcgaacccaccgccgacctgcggtcgaatgtcgcggcggaggcgagggcgaagatcgtctatgaacgcctgatcaacgtgaccgacgatcctggcgtgaaagacgcgctggccttcctgatgacccgcgaagcggcgcatcagctctcttttgagaaggccctgcagtcgattcgcaacaactatccaccgggcaaactgccgcccattagcgagtacgctaacacctactacaatatgtctgaaggtggagaagtacgcggcagctggaacagtgacaaacacttcgattatgtcaaggatccacagccgggcgtagacggcggagatggcagtgcttctgtcggcctgacgccagagcaggaagcgctgtgcaaagcgatgctgaagcgaacgcagtctgacccgcagggcgatcctttgaccggcgccgaactcggcgccgggaagcaaaacacttcatcatcggctaagtga

SEQ ID NO: 136247 - DNA, 1407 bp, Enterobacter cloacae
atgtttgaattcgacgcgtttcatctggcccgattgcaattcgcctttaccgtatccttccatatcctctttccggccatcaccatcggccttgccagctaccttgtggtgcttgaggggatgtggctgcgaacccgggataatgtctggcgttcactctacaatttctggctgaaaatctttgccgtcaattttggcatgggcgtagtctccggattagtcatgtcctatcagttcggcaccaactggagcggattttcccagttcgctggcagtattaccggcccgctgctgctgtacgaagtgctgaccgccttcttccttgaagcgggattcctcggggtgatgctgtttggctggaataaagtgccgccagcgctgcattttattaccacctgcatggtggcgcttggcacgttggtttctaccttctggatccttgcctccaatagctggatgcagacgccgcagggttttatcatcgaaaatggccatctcatcccgcaggactggctggcgattatctttaacccctcttttccgtatcgcttgttccatatggcgatagccgcgtttctcagtagcgccatgttcgtcggggcgtctgccgcgtggcatcttctgcgcggcaacgactcgccggccatccgcaaaatgctgtcgatggcgatgtggatggcgctgctggtggcgccgatccaggcggtggtgggggatatgcatggtcttaacacccttgagcatcagccggcgaagatcgcggccatcgaagggcactgggaaaatcgccccggcgaggccacgccgctgctgctgtttggcctgccggacatggagcaggagcggacccgctatggtcttgagatccccgctctcggtagcctgatccttacccacagcctgcataagcaggtgccggccctgaaagacttcccgaaagaggaccgaccctattcgcccgccgtcttctggtcgtttcgcatcatggtcgggatgggcgtgttgatgatcgccttagggatctgcagcgcctggctgcgctatcggcggcggctgtaccactcgcgtcccttccagtggtttgcgctctgtatggggcccgccggtcttattgccctggtcgccgggtgggtgaccaccgagatgggccgccagccgtgggtgatatacgggttgttgcgcacgcgggatgcggtgtcgttgcacagcaccctgcagatggccatcagcctgctggtatttatcgtggtttactgcgccgtgtttggcgtggggtattactatattttccggcttatcaaaaaagggccgcagccggtgacggagctgacctcgcaaaccgcaggcaccccggcgcgtccgctctcagcggctgagccggtgcgtgatgaggagaacgcatcatga

SEQ ID NO: 136248 - DNA, 2073 bp, Enterobacter cloacae
gtgctggaagcgctcacggtcttccgcccggtcgatagcgtccggactggtaccgataaccggcacgccggcagcttccagggcacgagccagcttcagcggggtctgaccgccgtactggacgataacgccttttggcttctcgatgcgcacgatttccagcacgtcttccagggtcaccggctcaaaatacagacggtcggaggtgtcgtagtcggtagagacggtttccgggttacagttgaccatgatggtctcgtaaccgtcctcgcgcagcgccagcgaggcgtgtacgcagcagtagtcgaattcgataccctgaccgatacggttcgggccgccgccgaggaccatgattttatcgcggtcaacggacgggttggactcacactcttcttcataagtggagtacatgtaggcggtatcggtagcaaattccgcagcgcaggtgtccacgcgcttgtagaccgggtgcaggtcatactggtcgcgcagcttgcggatttccgcttcccgcacgcccgccagcttcgccagacgcgcatcggcaaagcctttacgcttcagggtgcgcaggaagtcagcgtcgaggccgttgatgcccacttccgccactttctcttccagacggaccagctcttcaatctgtaccaggaaccagcggtcgatgttggtcaggttgaagacgccgtcaaccgagaggcccgcgcggaacgcgtcagcgatataccagatacgctcagcgccggcatctttcagctcgcggcggattttggtcagcgcttccgggtcgtcgaggctcactttcgggtcgaagccggtagcgcccacttccagaccgcgcagcgctttctgcaaggattcctgctgggtacgaccaatcgccatcacttcgccgacagacttcatctgggtggtcagacggtcgttggcgccggcgaatttttcgaagttaaagcgtgggattttagtgaccacgtagtcaatggacggttcaaaggaagccggggtgcggccgccggtgatgtcgttcatcagctcgtcgagggtataacctaccgccagcttggctgccactttagcaatcgggaagccggtggccttagaggccagcgccgaggagcgggagacgcgcgggttcatttcgataacgatcaggcgaccgtttttcgggttgaccgcgaactgcacgttagagccgccggtttcgacgccgatttcacgcagcaccgccatcgaggcgttacgcatgatctggtactctttgtcggtcagggtctgcgccggggcaacggtgatggagtcaccggtgtggatccccatggcgtcgaagttttcgatggagcagacgatgatgcagttatcgttcttatcgcgcaccacttccatctcgtactctttccagccgatcagcgattcatcgatcagcagttcgttggtcggagagagatccaggccgcgttcgcagatttcttcgaactcttcgcggttataggcgataccgcctccggtgccgcccatggtgaaggacggacggatgatgcacgggaaaccaacgtcggcggcaaccgccagcgcctcttccatcgtgtgggcgataccagagcgcgcagtgtcgaggccgatttttttcattgcgatatcgaaacggcgacggtcttcggctttatcaatcgcatcggcggtggcgccaatcatggtcacgccgaattcagccagtaccccctgacgctccagctcgagcgcgcagttcagcgccgtctggccgcccatggtcggcagcaccgcatccgggcgctctttttcgatgattttacgcaccacttcccagtgaatcggctcgatgtaggtggcatcggccatttccgggtcggtcatgatggtcgccgggttagagttcaccaggataacgcggtagccctcttcgcgcagcgctttacaggcctgggcgccggagtagtcaaactcacacgcctgaccgataacaatcgggcccgcgcccagaatcaggatactttttatgtctgtacgttttggcattgctcttttactcctgattatttcgcggactga

SEQ ID NO: 136249 - DNA, 1149 bp, Enterobacter cloacae
ttgattaagtcagcgctattggttctggaagacggaacccagtttcacggtcgggccatcggggcaaccggcacggcggttggggaagtcgttttcaatacttcaatgaccggttatcaagaaatcctcactgatccttcctattcccgccaaatcgtcactcttacttatcctcatattggtaatgtcggcaccaacgccgccgatgaagaatcttctcaggtacatgcgcagggtctggttattcgcgacctgccgctgattgccagcaacttccgcagtactgaagacctctcttcttatctgaagcgccataacatcgtggcgattgccgatatcgatacccgcaagctgacgcgtctgctgcgtgagaaaggggcgcaaaacggctgcatcatcgcgggcgacagcccggatgcccagctggcgctggaaaaagcgaaagcgttcccaggcctgaacggcatggacttggcgaaggaagtgaccaccgcagaaacctatagctggacgcaaggcagctggaccctggcgggcgacctgccggaagcgaaagcggaaagcgagctgccgttccacgttgtggcatatgacttcggcgcgaaacgcaacatcctgcgcatgctggttgaccgcggctgccgcctgacggtggtgccggcgaagacctccgccgcggacgtgctggcgctcaatccggacggtatcttcctctccaacggccctggcgacccggcgccgtgcgattacgctatcgaggcgattgaaaaattccttgagaccgatattccggtattcggcatctgccttggccatcagctactggcgctggcgagcggtgccaagaccattaagatgaagttcggccaccacggcggcaaccacccggtgaaagatattgataacaacgtggtgatgatcactgcccagaaccacggtttcgctgtagatgaggcgacgctgccggccaacctgcgcgtgacccataagtcgctgttcgacggcaccctgcaggggatccatcgtaccgacaaaccggcgttcagcttccaggggcaccctgaagcgagcccggggccgcacgatgccgctccgctgttcgaccactttatcgagttaattgagctctaccgtcagtccgcgaaataa

SEQ ID NO: 136250 - DNA, 822 bp, Enterobacter cloacae
atgcatgatgcacaaatccgcgtggccatcgccggcgcgggcggccggatgggacgccagttaattcaggctgcattgcagatggaaggcgtggcgctgggcgcggcgctggagcgcgaagggtcaagcctggtgggcagcgacgccggcgagctggcgggcgccggcaaagcgggcgtcgcggtgcagagcagcctggcggcggtaaaagatgatttcgacgtgttgatcgattttacccgcccggaaggcacgctgaaccatctggcgttttgccgcgagcacggcaaagggatggtcatcggcaccaccggttttgacgacgctggcaaacaggcgattcgcgatgccgcgcaggacattgccattgtcttcgccgctaactttagcgttggcgtcaatgtcctgttgaagctgctggagaaggcggcgaaggtgatgggcgactataccgacatcgaaattatcgaagcgcaccaccggcataaagtggatgcgccgtcaggcaccgcgctggcgatgggcgaagcgatcgccggggcattgaacaaagatctcaaggactgcgcggtctacagtcgtgaaggctacactggcgaacgcgtcccgggcaccatcggcttcgcgaccgttcgcgcgggggatattgtcggggagcatacggcaatgtttgctgacatcggtgagcgtattgaaatcacccataaagcgtccagccgcatgacctttgcaaatggcgccgttcgttcagctttatggctgaaagacaagaaaaatggcctgtttgatatgcgtgatgtgctggatctgaatagtttataa

SEQ ID NO: 136251 - DNA, 909 bp, Enterobacter cloacae
atgagcgacgtgttaattaatcctgcgcgtgtgcggcgcgtgaagccactgagtgccgaagaggtggtcagcgcggtagagcgcgcgctgttgaccgaagttcgcctgaccccaaagcccgggttggtggatattcgtaacgctggcgcgcactgggatatggatctggcctcgtttgaggccagcaccgcggtggtggctccgtggatggagaaatttttcatcatgggccacgatactgcggcggtcgcgccggagcaggtattgatgatgctgcgcccggtagggatggcctgtgagaacgatatgctggaggccaccggcggggtgaatacccatcgcggggcgatcttcgcttttggcctgctcagcgcggcggcgggcaggctggtgtcgaaaggtgagccgatagagcagcaccggctttgcgaccaggtggcgcgcttctgtcgcggcatggttatgcaggagttgtcttctgctggcggggaacggctcagtaaaggcgaggctcattttctgcgctatggtctctccggggcccgcggcgaggcggagagcggtttcctgacggtgcgtacccaggccatgccagtatttacccgcatgatggaagagaccggcgacagtaatctggcgctactgcaaaccctgctgcatctgatggcgtggaatgatgacaccaacctggtctcgcgcggcgggcttgccgggctgaactttgtccagcaggaggcgcagcgactgctgtggcagggcggcgtgctggcggacggcgggctggaggcgctgcgacagtttgacgatgagctgattgcccgccatctcagccccggcggcagcgccgatctgttggcggtgacctggtttttatccgcgtttcccgccggcgcgcttttcccactgtaa

SEQ ID NO: 136252 - DNA, 1527 bp, Enterobacter cloacae
atgaaagagacagtagcaatgcttaatcagcagtacgtgatgccgaatggactgacaccttatgccggcgtaacggcgaaaagtccctggctggcgagtgagagcgaaaagcgccagcgcaaaatctgcgattcgctggaaacggcaatccgtcgctccggcctgcaaaacggcatgaccatctcgtttcaccacgcgtttcgcggcggtgacaaagtcgtcaatatggtagtggcgaagctggcggaaataggttttcgcgatctgacgctggcatccagttcgctgatcgacgcccactggccgctgatcgagcatattaaaaatggcgtgatccgccagatctacacctccggcctgcgcggcaagttgggcgaggagatctccgccggtttaatggaaaacccggtgcagatccactcccacggcggtcgcgtacagctgattcaaagcggcgagctgtcgattgatgtcgcgtttctcggcgttccttgctgcgatgagtttggcaacgccaacggctttagcggtaaatcacgctgcggttcgctgggctacgcgcgcgtcgatgccgagcacgctaaatgcgtggtgctgctgaccgaagagtgggtggattatcctaactatccggccagtattgcccaggatcaggtggatctgatagtccaggtagatgaagtcggcgatccgcaaaaaattaccgcgggtgccatccgtctgaccagcaacccgcgcgagctgctgatcgcccgccaggcggcgaaagtcgttgagcactccggttactttaaagagggtttctcgctgcagaccggtaccggcggcgcctcgctggcagtaactcgcttccttgaagataaaatgcgccgtaacggcattaccgccagcttcggcctcggcggtatcaccgggacgatggtcgatttgcacgaaaaagggttgatcaaaacgctgctcgatacccagtccttcgatggcgacgcggcgcgttcgctggcgcagaacccgaaccatgtcgagatctccaccaatcagtatgccagcccaggctccaaaggcgcctcctgcgagcgcttaaacgtggtgatgctcagcgcgctggaaattgatatcgactttaacgttaacgtgatgaccggttctaacggtgtgctgcgcggggcgtccggtggccatagcgataccgccgccggtgcggatttgaccattattaccgcgccgttagttcgcggccgtattccctgcgtcgtggaaaaggtgctgacccgcgtcacgccgggggccagcgtggatgtgctggtcactgaccacggcattgcggtcaacccggcacgtcaggacctgatcgacaatttgcgcagcgcaggcattccgctgatgaccattgaggaactgcagcagcgtgctgagctgttgactggcaagccgcagccgatcgaattcaccgatcgggtggtggcggtggtgcgctatcgcgacggttcggtcatcgatgtgattcgtcaggtgaaaaacagcgactaa

SEQ ID NO: 136253 - DNA, 870 bp, Enterobacter cloacae
atgaaaccacgtcgcagtatgttgttcatccctggcgccaatgccgccatgttaagcacgtcattcgtctacggcgccgatgcggtgatgttcgacctggaagatgccgtttcgctgcgcgagaaagataccgctcgtctgctggtgtatcaggcgctgcagcatccactgtatcaggatatcgaaaccgtggtgcgcattaacccgctgaatacgccgttcggtcttgccgaccttgaagcggtagtccgcgcgggcgtggatatggtgcgtctgccgaaaaccgacagcaaagaagatatccatgagctggaagcgcatgttgagcggattgaacgcgagtgcggccgggaagtgggcagcaccaagttaatggcggcgatcgagtcggcgctgggcgtggtgaacgcggtggaaatcgcccgtgccagcccgcgtctggcggcgatcgcgctggcggccttcgattacgtgatggatatgggcacctcccgcggcgacggtactgaactgttctacgcccgctgcgctgtactgcatgccgcccgcgttgccggcatcgccgcctatgacgtggtgtggtcggatatcaataatgaagagggcttcctggcggaagcgaatctggccaaaaacctcggctttaacggcaaatcgttggttaacccacgacaaattgaactcctgcatcaggtctatgccccgacgcgcaaagaggtcgatcacgcgctggaagtgattgccgcggcggaagaagccgaaacgcgaggtctgggtgtggtatcgctgaacggcaagatgatcgatggaccgattatcgaccatgctcgcaaagtggtggcgctctcggcttccggtattcgtgattaa

SEQ ID NO: 136254 - DNA, 294 bp, Enterobacter cloacae
atggaaatgaagattgacgccctggccggcacgctggagtccagcgatgtgatggtcaggattggacccgcggcgcagccgggcattcagctggaaatcgacagcattgtgaaacaacagtttggcgctgcgattgagcaggtagtgagagaaacgctggctcagcttggcgtgaaacaggccaacgtggtggtcgatgataaaggcgcgctggaatgtgttttgcgagctcgcgtacaggccgcggcgctgcgcgcggcgcaacagacccaattacaatggagccagctatga

SEQ ID NO: 136255 - DNA, 921 bp, Enterobacter cloacae
atggcgattatcgccgagtatcagcagcggctggtcggctgcggtgctatcgccggcaatgtgctgaaatgcatcgccatcgatccctcgctgcagggggaggggctgagccttaaattactgaccgagctcctgacgctggcctatgagctggggcgcagcgaactgtttttgttcactaaaccttgcaatgccgcgttattttccggcgccggcttctggccgatagcccaggcgggcgaccgcgccgtgctaatggaaaatagccgcgaacggctgactcgttactgtcgacagctggcgatgtaccgtcagccgggaagaaaaatcggcgctatcgtgatgaatgccaatcccttcaccctcggccaccgctggttggtagaacaggcggccagccagtgcgactggctgcatctgtttgtggtcaaagaagatgcgtcctgcttttcctatcacgatcgcttcaagctcattgaacaggggattaccggcatcgataaggtgacgctgcatcccggttcggcgtatctgatctcgcgggcgacgttccccggctatttcctgaaagagcagggggtggttgatgactgccacagccagattgacctgcagctcttccgcgagcgcctggccccggcgctgcagattacccatcgctttgtcggcaccgagccgctgtgtcccctgacccgtaattacaaccagcgcatgaagtcactactggaagcgccaggcgacgcgccgcccattgaagtagttgagcttgcgcgaatcgaaaaaaatggtggacccgtgtcggcctcccgagtgcgcgaactctatcgacagcgcaactggcaggcggtcgcggcgctggtaccgccgggaaccctctcttttctgatgcaactggcggaaagcgaacatcaaaccgcctga

SEQ ID NO: 136256 - DNA, 1341 bp, Enterobacter cloacae
  misc_feature (1309)..(1318): n is a, c, g, or t
atgactaacatgagtcaggctccggcgacggagaaaaagggcgttagcgatctgctgggatttaaaatcttcggcatgccgctccccctttacgcatttgcgttaattacactattactttcacatttttataacgcattacccaccgatatcgtcggcggctttgccatcatgtttattatcggcgctatattcggggaaattggcaagcgcctgccaatattcaacaaatatatcggtggcgctccggtgatgattttcctggtggcggcttattttgtctacgcaggtatttttacgcagaaagaaatcgatgctatcagcaacgttatggataagagtaacttccttaacttattcatcgcggtattaattaccggagcaattctgtcggtaaaccgccgcctgctgctgaaatcactgctcggctatattccaactatcctgatgggcattgtcggcgcgtctatttttggcatcgctatcggcctggtgttcggtattccagtggatcgcatcatgatgctgtacgtcctgccgatcatgggtggcggcaacggcgcgggcgcggtccccctgtcggagatttaccactccgtcaccggtcgttctcgcgaagagtattactcgaccgctatcgctattctgaccatcgctaacatcttcgccatcgtctttgccgccgtcctcgatatcatcggcaaaaaacacacctggctgagcggcgaaggggaactggtgcgtaaagcctcgttcaaagtggaagaagatgagaaagcgggacaaatcacccatcgcgaaaccgccgtcggtctggtgctgtccactacctgcttcctgctggcctacgtcgtggcgaagaaaattctgcccagcattggcggtgtggctattcactatttcgcgtggatggtgctgatcgtcgccgcgctgaacgcctccgggctgtgctcaccggaaatcaaagccggtgctaaacgcttgtctgatttcttctccaaacagctgctgtgggtgctgatggtcggggtcggcgtctgctacaccgacctacaggaaattatcaacgccatcaccttcgctaacgttgttatcgccgccattatcgttatcggtgcggtgctcggcgcggcgatcggtggctggctgatgggcttcttcccaatagaatcggccatcactgcaggcctgtgtatggccaaccgcggcggctccggcgacctggaagttctctctgcctgtaaccgtatgaaccttatctcttatgcgcaaatctcctcccgtttgggcggcggtattgtgctggtcnnnnnnnnnncgccagcatcgtgttcggcatga

SEQ ID NO: 136257 - DNA, 252 bp, Enterobacter cloacae
atgactgacaatgccatcctgttaggcgaaggcttcaccctgatgtttctcggcatgggctttgtgctggtgttcctgctgctgctcattttcgccatccggggaatgtccctcgccgtcaaccgcctgtttcccgagccgcccgccgcccccgcagcggcgccggccgccgtcgcgcccgccgacgatttcgcccgcctgaagccggcgattgtcgccgccattcaccaccatcgccgtcttcacccttaa

SEQ ID NO: 136258 - DNA, 1779 bp, Enterobacter cloacae
  misc_feature (6)..(15): n is a, c, g, or t
atgacnnnnnnnnnnaccgttgccattaccgatgtcgtcctgcgcgacgcccaccagtccctgttcgccacccgtctgcgtctcgacgatatgctgcccgttgccgctcagctggacgacgtcggctaccgctcgctggagtgctggggcggcgccacctttgacgcctgcatccgctttctcggcgaggacccgtgggtccgcctgcgcgagctgaaaaaggcgatgcccaagaccccgctgcagatgctgctccgcggccagaacctgctcggctaccgccactacgccgatgacgtggtggagcgcttcgtggagcgcgccgtcaaaaacggcatggacgtcttccgcgtcttcgacgccatgaacgacccgcgcaacatgcaggccgccctgcaggcggtccgccgccacggcgcccacgcccagggtacgctttcgtacaccaccagcccggcccacaccctgcagacctggctcgacctcaccgaacagctgctggagaccggcgttgactccgtcgccatcaaggacatgtccggcattctgacgccgcatgccgcctttgagctggtcagcgaaatcaagaagcgctatgacgtcaccctgcacctgcactgccatgccaccaccgggatggcggagatggcgctgctgaaggccattgaagccggggtcgacggcgtggatacggcgatttcgtccatgagcgccacctacggccacccggccaccgaggcgctggtcgccaccctcgccggcacgccgtacgacaccgggctggatatccacaagctggagagcatcgccgcgtacttccgcgaggtgcgcaaaaaataccacgccttcgaaggccagctgaagggcaccgacagccgtatcctcgtcgcccaggtgccgggcgggatgctcaccaatctcgaaggccagctgaagcagcagagcgccgcccaccgtctggatgaagtgctggcggaaatcccccgcgtgcgcgaggacctcggcttcatcccgctggtgaccccgacctcgcagattgtcggcacccaggcggtgctcaacgtcctgaccggcgagcgctacaaaaccatcgcgaaggagaccgccggtatcctgaagggcgagtacggccgcaccccggccccggtgaacgccgccctgcaggcgcgggtgctcgacggcgccgacccggtgacctgccgcccggcggatttactcaagccggagctggcgcagctggaagcggatgtcagacgccaggcacaggagaagggcatcacgcttgccgaaaacgccatcgacgacgtgctcaccgtggcgctgttcccgcagcccggcctgaaattcctcgaaaaccgccacaacccggcggcctttgagccggtaccgcaggcggaagccgcgcagccagtggcaaaagcagaaaaacctgccgcctccggcgtctacaccgtggaggtggaaggcaaagcctttgtggtcaaagtcagcgacggcggtgacgtcagccagctgacggcggctgctcctgcctctgcacccgccgctgccgccccggccggcgccggtaccccggtgaccgccccgctggcgggcactatctggaaggtgctggccagcgaaggccagacggtggccgcaggcgaggtgctgctgattctggaagccatgaagatggagaccgaaatccgcgccgcgcaggccgggaccgtgcgcggtatcgcggtgaaagccggcgacgcggtggcggtcggcgacaccctgatgaccctggcgtaa

SEQ ID NO: 136259 - DNA, 1302 bp, Enterobacter cloacae
atggaaagtctgaacgccctgattcagggcatggggctgatgcacctcggcgccggccaggccatcatgctgctggtcagcctgctgctgctctggctggcgattgcgaagaagttcgagccgttactgctgctgccgattggcttcggcggcctgctctccaatatcccggaggccgggctggcgctcaccgccctggagagcctgctggctcaccacgacccggcgcagctggcggtgattgccgcgaagctccactgcgcgccggacgtccactccatcaaagaggcactggcgctggccctgccgtcggtacaggggcagatggagagcctcgcggtggacatgggctactccgccggggtgctggccatcttctataaggtggcgattggctcgggcatcgcgccgctggtcatctttatgggcgtcggggcgatgaccgatttcggcccgctgctggctaacccgcgcaccctgctgctgggggcggcggcgcagttcgggatcttcgccaccgtgctcggggcgctgacgctgaactacttcggcatcatcagcttcaccctgccgcaggcggcggccatcggcatcatcggcggcgccgacggcccgacggcgatttacctgtcgggcaagctggcgccggagctgctgggggccatcgcggtggcggcgtactcctatatggcgctggtgccgctgatccagccgccgatcatgaaggcgctgaccacggataaggagcggaagatccgcatggtgcagctgcgcacggtaagcaagcgggagaagatcctcttcccggcggtgctgttgctgctggtggcgctcctgctgccggacgccgcgccgctgctggggatgttctgcttcggcaacctgatgcgcgagagcggcgtggtggagcggctgagcgatacggtgcagaacgcgctgatcaacatcgtcaccatcttcctcgggctgtcggtgggggccaagctggtggcggacaagttcctgcagccgcagacgctggggatcctggtgctgggggtgatcgccttctgcgtggggaccgccgccggggtgctgatggcgaagctgatgaacgtgttcagccggcacaaaatcaacccgctgatcggctcggcgggggtgtcggcggtgccgatggcggcgcgggtgtcgaacaaggtgggtctggaagcggacgggcagaacttcctgctgatgcacgcgatgggcccgaacgtggcgggggtgatcggctcggcgatcgccgccggggtgatgctcaagtacgtgctggcgatgtag

SEQ ID NO: 136260 - DNA, 1716 bp, Enterobacter cloacae
atgtctgaaattttctgttctgtgctccacctgtcggcgccgggggcgcaaaacggggagaataacaatttaatgtctatctacccaatgtatacccgaaaaatcacccactggtttgccaggcgatcgtttcagaatcgcatcttcctgctgatcttattcacctcgacgatcgtcatgctggcgatgtcatggtatctgacagacattaccgaggagcgtctgcattatcaggtcgggcaacgggcgctgattcaggcgatgcagatttcggcgatgccggagctggtggaggcagtgcagaaacgcgatctcgccagaatcaaagcccttatcgaccccatgcgttcgttctccgacgccacctacatcaccgtcggtgatgccagcggccagcgcctctatcacgtcaatcctgatgaaatcggcaaatcgatggaaggcggcgatagcgatgaggcgttgataaacgctaaaagctacgtgtcagtgcgcaaaggctcgctgggatcgtcgctgcgcggtaaatcgccgattcaggacgcaaccggcaaggtgatcggcattgtgtcggtaggctataccattgagcaactggaaaactggctcagcctgcagataagttcgctgctgatcccgatggccatcatgttactgcttctgctcttttgcgcccgccgcttctcactgcatatcaaaaaacagatgctcaatatggaaccccagcagctgtcacagctgttgatccagcaaagcgtgctgtttgaatcagtgttcgaagggcttatcgccatcgactccgattataaaatcactgcgattaatcagactgcgcgtcgcctgctcaatttgagtcagccggaaccgacgcttatcggcaaacggatcagcagcgttatctcgcaggaggtcttcttctacgatgcgccacagaccaataaaaaagacgagatcgttaccttcaatcagatcaaagtgatcgccagccggatggcggtgatcttaaacaatgagccacagggctgggtgatcagctttcgcagcaaagacgatatcaacacccttagcctgcagcttagccaggtacaacaatatgccgataacctgcgcgccgtacagcatgagcatcgcaatctgatctccactatcgccggtctgctgtttcttaaacgctataaccaagcgctggaactgatccaacagcagtcggaaagtcaccagaaggtgatcgattttattgcacgcaatttccaggacaaccacctggccgggctgttgatcggcaaatattaccgggccaaagagcttggacttgagctgattttcgatccggcctgcttcgttgatagattacctaccgccctttcgcacaacgaatggatctcgatcgtggggaatctacttgataacgcctacaatgccagcctgcgtcaaccgcagggttcaaaacagatcgaatgcctgatcaacagtgatggccaggaggtgatcattgagatcgccgaccagggatgcggcattgacgaggcgctgcgcgatcggatcttcgagcgcggcgtcaccagcagcgccagcaaagatcatggtatcggactctggctggtacgcagctacgtggaacaagcaggcggcagtatcgtcgtcgaaaataatattccttttggcaccatttttacgctttatatccccctgacccgagatgaacatcatggatag

SEQ ID NO: 136261 - DNA, 705 bp, Enterobacter cloacae
atggatagcatcactactcttattgttgaagacgaacctatgctggcggagatcctggtggataacattaaacagtttccccagttcgacgtcattggtattgcggataagcttgagagcgccaggaaacagctcagactgtatcaaccgcagctgatcctgctggataattttttacccgacggcaaaggtatcgatctgatccgccatgcagtcagtacacattacaagggacggattatctttattactgcggataatcacatggaaaccatcagcgaagcgctgcgtcttggggtgtttgattacctgattaagccggtgcactatcagcgcctgcagcacacgctggagcgctttgcccgctatcgtagctcgctgcgctccagtgaacaggccagccagctccatgtcgacgcgctgtttaatattcaggcccgggaacaaacggaacccgccagcgcaccactgcgcgggatcgatgaaagcacctttcagcgcgtgctccagctgtttgccgacccgacggtggtgcataccgccgactcgctggcccgtatcctcggcagcagcaaaaccaccgctcgccgttatctggaacaaggagtgaagaacgactttctggaagcggaaatcagctacggcaaggttggccgacctgagcgtatctatcacggcaagcagacctatcctgagcagagataa

SEQ ID NO: 136262 - DNA, 630 bp, Enterobacter cloacae
atgactgaacgggtttattacaccagcgatgctaccgacgggcgcgcccagatcatcgcctgcactgcagaagcggatggccgttacgccatcgaactggatcggacgctgtttcacccgcaagggggcggtcaaccggcggaccgtggatggattgccgggcaggtggttgagacggtggctgtgcgcggcgaaagggtgttgcatattctgtcgcaaccccttcccctcggtgaagtggagatgaaaattgatgcctccgcgagacagctgcatgctcgtctgcattctgccggccacctgcttggcctggcgggcgaacagcttggctggcaaccggtgaaagcgcaccactggcccggcgaagggcggataacctttgccagcaggaatagcgccgcgctgccggacgccagtgcgctactggcgctagtaaaggcatggcaggcgcaggacttaccgcgtcaggtgacgttcgctgatggcatgcgcaaggtgggattcggcgagctgccagcctatccctgcggaggcacccacgtcgcccgtctggcggagctgggcgacattgtcattagtcagattaagatgaagaaggggcagctggtggtcagctacaccctggcgtaa

SEQ ID NO: 136263 - DNA, 930 bp, Enterobacter cloacae
atgaatctgaacctcctgcccgacctcgctcttttcgttcagatagtcgaccagggcagcttctccgccgtcgcccgccagaacggcattaccccttcagccgttagccgcagcgtgtcacggctggagcgagagatgggctgtaaactgctgcagcgtaccacccgcaagctgcgtcttagcgatgccggggaaacgatatatcagcatgcccagcagatgctggaagcggcgcgacaggcaatggattccgcaggcagtcgccaaacggtcgcccagggaaagctgacgctcagcgtcccgaaagccgtcggccgctttgtgatccacccgctgatgatggcgtttttccaccgctacccgcaggtggacgtctgcctgcggctggaagatcgccctcttgattttatcgatgacggtattgatctggcgctacgcatcaccgataccccctcccccggcctgcatggcaaaccgctgatgccaatcaggcacgttatctgcgccactgaggcctatttacagcagcacggtacgccgtacacgccgcaggatctgcgcgcgcatagctgcattagccttggcgaaacgcccgccgatgcgcgctggaagttccgtcgggaaggcaaaacagaaacggtgcaaacctacgggcggtacgccgccaaccataccgccgtacgcctcgacgcggtcagacagcatttagggatcggcagcctgccgctgttcaccgcccgtgaggcgctggcgaagggcgatatcgtgcaggtgctgcccgagtgggaatttatcagcagctactccggcgacctgtggctgctgtgggcgggagataaacatatgcccgccaagatgcgggcgatgattgattatctcagcgagacggtgccggcgctgaacgcaggcagcacagagccagcgaaataa

SEQ ID NO: 136264 - DNA, 366 bp, Enterobacter cloacae
atgacctatggacaggcgtatttgagcggctggaaagagacctttaattttagtggccgcgccagccggcagcagttcttgacgttttttctcatcaatgtattgatcgccgccgcgccagtggccgcctggagtctggccacccttgttgaccctcactacgggctcctcagttttgttgtcataccctttgcggcgctgtggctgctgttgatggcgctccccctgctggctgtaggctgccggcgaatgcatgatatcggccgctccgggatctggtttgtgttgggagttatcattccgtggtttgcaattatttcgctggctctgtgctgcctgcgttcagcgccggcaccgtctcgctga

SEQ ID NO: 136265 - DNA, 915 bp, Enterobacter cloacae
atgcgcttaccaatcattcttgataccgatccgggcatcgacgatgccgccgccattgccgcggcgctgttcgcgcctgagctggatctgcagttgatgaccaccgtagcgggcaatgtctcggtggagaagacgacccgtaacgcgctgcaattgctgcatttctggaatgccgatgtaccgctggcgcagggggcgtcgatgccgctggtgcgtccgttgcgcgacgccgcctcggtgcatggcgaatccggcatggaggggtatgactttgttgagcatcaacgtcaaccgttggcgaagccggccttccaggctatccgtgatgcgcttatgcatgctgccgagccgatcaccctggtggcgattggcccgctgaccaatatagcgctgctgctgacccagtacccggaatgcgtgtttaatattcgtcggctggtgatcatgggcggctcggcgggccgcggcaacttcacgccgaatgcggaattcaatatcgctatcgacccggaggccgccgcgaaagtgttccacagcgggctggagattgtgatgtgcgggctggacgtcaccaaccgggcgctgctggcggcggattatctggcgacgctgccgacgctgaaccagaccggtaaaatgctccatgcgctgtttagccactatcgcagcggcagcatgagcagcggtctgcgcatgcacgacttgtgcgctattgcgtggctggcccgcccggaactgttcactctccagccgtgctttgtggcggtggagacgcaggggacctggaccgccggcaccacggtggtggatatcgaaggacgactgggccagccggcgaacgcccaggtggcgctggatatcgacgtcgaagggtttcagcgctgggcggcggaggtgattgccctggcgccgtga

SEQ ID NO: 136266 - DNA, 951 bp, Enterobacter cloacae
atgcagatcctgttggctaacccgcgcggtttttgcgctggcgttgaccgcgctatcagcattgtagaaaacgcgctgacgctgtatggcgcaccgatctatgttcgtcatgaagtggtgcacaaccgctatgtggtggatagcctgcgcaagcgtggcgccatttttatcgaacagatcagcgaagtgccggacggcgcgatcctgattttctccgcccacggcgtgtcgcaggcggtacgcaacgaagcgaagagccgcgacctgacggtgttcgatgccacctgtccgctggtgaccaaagtccatatggaagtcgcccgcgccagccgccgcggcgaagagtcgattctgattggccatgccggccacccggaagtcgaaggcaccatgggacagtacaacaacccgcaaggggggatgtacctggtcgagtcgccggaagacgtgctgaagctggaagtgaaaaatgacgcccggctgtcgtttatgacccagaccacgctctccgtcgacgatacctcggatgtgattgacgccctgcgcgcgcgttttccgaaaatcgtcggcccgcgcaaagacgacatttgctatgccaccactaaccgtcaggaagccgtgcgcgcgctggcggagcaggctgacgtagtgctggtggtcgggtcgaaaaactcctccaactctaaccgcctcgccgagctggcgcagcggatgggcaaagcggcttacctgattgacgacgcctccgatatccaggaagcgtgggtcaaggatgcggcctgcgtcggcgtgacggcgggcgcgtcggcgccggatattctggtgcagaacgtcattacccgcctgcaggagctgggcggcggcgaagccgtgccgctggaaggccgggaagagaatatcgtctttgaagtgccgaaagagctgcgtgtggatgtccgtgaagtagagtaa

SEQ ID NO: 136267 - DNA, 459 bp, Enterobacter cloacae
  misc_feature (233)..(242): n is a, c, g, or t
atgtctaaatccgtacagagcaacagcgcggtactggtgcacttcactctgaaactggacgacggctccactgccgagtccacccgcagcaacggcaaaccggcgctgtttcgcctcggcgacacctctttgtctgaagggctggagcaacagcttctcggtttgaaagagggggagaaaaaggccttttcgctggagcctgacgccgcctttggcgtacccagcccggaccnnnnnnnnnngattcagtatttctctcgccgcgagtttatcgacgctggcgagccggagatcggcgcgattatgctctttaccgcaatggatggcagcgaaatgcctggcgtgatccgcgaagtgaacggcgattccatcaccgttgacttcaaccatccgctggccgggcgcactgttcattttgatattgaagtgctggagatcgatccggcgctggaggagtaa

SEQ ID NO: 136268 - DNA, 501 bp, Enterobacter cloacae
atgagtaaatcgatctgttcaacggggctacgctggctgtgggtggtcgtagccgtgctgattatcgatctgggcagcaaattcctgatcctccagaacttcgctctgggggagacggttccgctgttcccgtcgcttaatctgcattatgcccgcaactatggcgcggcctttagcttcctcgccgacagcggcggctggcagcgctggttcttttccgggatcgcgatcggtatttgcgtagtgctgacggtgctgatgtaccgttcgaaggcgacgcaaaagctgaacaatattgcctacgcgctgattatcggcggcgcgctgggcaacttgttcgatcgcctgtggcatggctttgtggtcgatatgatcgacttctacgtcggcgactggcattttgccaccttcaacctcgccgatagcgcgatctgcatcggcgcagcgctgattgtgctggaaggcttcctgccgaaaccgactgtgaaagagcaggcgtaa

SEQ ID NO: 136269 - DNA, 2349 bp, Enterobacter cloacae
atggacttcaaaaccgaagccaacatcatccgcgcgctgggcaaaatcatcggtaatggccacctgcataaaggcgccaaaccggtgcactggtgcgtagactgccgttccgcgctggcggaagcggaagtggagtattacgacaaaacctctccgtctatcgatgtcgcgttccacgcggtagacaaagccgcggtactggcgaaattcggcgtagccgacgtcaacggtccggtgtcgctggttatctggaccaccacgccgtggaccctgccggccaaccgcgctatctctctgtctcctgagttcgactatgcgctggtgcaggttgacggccaggcgctgatcctggcgaaagacctggttgagagcgtaatgaagcgcgttggcgcgacggactacactattctggcggcggtacaaggttctgagcttgagctgatgcgctttaagcatccgttcctcgatttcgacgtgccggcgatccttggcgaccacgtgacgctggatgccggtaccggtgcggtgcataccgctggcggccacggtccggacgactacaccatcagccagaaatacggtctggaaatcgccaacccggttggcccggacggcgcttacctgcctggcacctggccgtctctggacggcattaatgttttcaaagccaatgacatcatcgttgagatgctgcgtgagcgtggcgcgctgttacacgttgagaaactgcagcacagctatccatgctgctggcgccacaagtcgccgatcatcttccgcgccactccgcagtggttcgtgagcatggatcagaaaggcctgcgcgcgcagtcgctgaaagagatcaaaggcgtgcagtggatcccggactggggccaggcgcgtatcgaatcgatggtcgctaaccgccctgactggtgtatctcccgtcagcgcacctggggcgtgccgatgtcgctgttcgtgcataaagaaacccatgaactgcacccgcgtacccttgaactgatggaagaagtggcaaaacgcgttgaagttgacggcatccaggcgtggtgggatctcgattcccgcgacattcttggcgatgacgccgacagctatgagaaagtgccggataccctcgacgtctggtttgactccgggtcgacccactcttccgtggttgacgtgcgtccggaattcgccggtcacgccgccgatatgtatctggaaggttctgaccagcatcgcggctggttcatgtcctcgctgatgatttccacggcgatgaaaggcaaagcgccatatcgtcaggtactgacccacggcttcaccgtcgacggtcagggccgcaaaatgtccaagtctatcggcaacaccgttagcccgcaggacgtgatgaacaagctcggcgccgatatcctgcgcctgtgggtggcttccaccgactacaccggcgaaatggcggtctctgacgagatcctcaaacgcgctgcggacagctatcgtcgtatccgtaacaccgcgcgcttcctgctggcgaaccttaacggtttcgatccggtgaaagacatggttaaaccggaagagatggtggtgctggaccgctgggcggtcggctgcgcgcaggcggcacaggaagatatcctgaaagcctacgaatcctacgacttccatgaagtggtgcagcgcctgatgcgcttctgctccatcgagatgggctcgttctacctcgacatcatcaaagaccgccagtacaccgccaaggcggacagcgtggcgcgtcgcagctgccagaccgcgctgttccatatcgtggaagcgctggtgcgctggatggcgccgatcatgtccttcaccgcagatgaaatctggggctatctgccgggcgagcgtgagaaatatgtcttcaccggcgagtggtatgaaggactgttcggcctggccgacgacgaagcgatgaacgacgatttctgggacgagctgctgaaggtgcgtggcgaagtcaacaaggtgatcgagcaggcgcgtgcggataagaaagtcggcggctcgctggaagcggcagtcacgctgtatgctgatgccgatctggcggctaagctcaatgcgctgggcgatgaattgcgatttgtcctgttgacctccggggcgaacgtcgcagactatgcgagcgcgtccgctgatgcgcagcaaagcgaactgcttaaagggctgaaagtcgcattgagtaaagctgaaggtgagaaatgcccgcgctgctggcattacaccaccgatatcggcaaggtggcggaacacgcggaaatctgcggacgctgtgtgagcaacgtcgccggtgacggcgagcaacgtaaattcgcctga

SEQ ID NO: 136270 - DNA, 1110 bp, Enterobacter cloacae
atgctttccgtttctacggtaaaaagtgcatcaaaagcatccgtttattattttgaagaagacaattattacttccagggcgaacaatccacagcctggtatggagctggcgccgaatcacttggacttgaagggccagtaaagcaagaaatgtttaagcaggttctggaggggaaactgccagacggcagtgatttaactcatatggttggcaatgaaaataagcaccggccgggttacgatcttacattttctgcgcctaaatccgcttcaattcttgccctggtatatggcgataaaactgtcctcgatgcgcataaatgggccgttgaacggaccttagacgaagtggaaaaactcgcatcgactcgtacttacagtggtggtgaaaccacatttgaacaaactggaaaccttgtaattgcgcagttcttacatgacaccaaccgtaattctgaaccacacatgcatacccacacggtcgtggccaatgtaacgatgaacggaagtggctggaaaacattatcttcggatactaaaagtgggaagggatttaccgatactgtctggaaccaccaggtagccattgggtcaatctatcgtcgcttttataaagggaaactggaagccgaaggttatcccattgaggagaagggaccacgtggtgaatgggatattgcaggtgtgcctatcgatgatttatctacgcgccggcaggaaataatcgaaaaagtgggtgaggatgccagcgccaaagcaaaaagtgtcgccgcgcttgatacccgaaaaaccaaggatttcaccgatatcgaaaacgtcaggaaaggctggcgggaaacaatggaaaaggccggtttcgattatgaacaattcgaaactgaacgtcaggaacgtgtgccaggaacatctcaggttcccactttgaccgcgggtagtgatcctcaaaagggaaatgcgccagcagacccccacagagtgaatattacgccgcaaaatgtacccggagtggtgcatccgggggctgatcgctccgagcctcagcctgtcctggaaaagcaagctaaagagaatcccctgtcagctattgttgataaggctatcggggtctga

SEQ ID NO: 136271 - DNA, 2133 bp, Enterobacter cloacae
atgagccttaactcccgggactttactcagggtggacaggtattgaaatacatgatcggcatgtttttgcaaatcatgaatatcgccacctactatatattaatgctttcagtgcttgtttttttaggctggttattgataaggatgagttttcagcaaatttggcatgggctctgttactggcttattagatattgcgttataccgatgcgggaacattcagttaatcaggagtggagtccctacgtttttcactttacgaaatctaccggcgaggtgattgagttctctcgcaccgccatccaggttatggtcgatccatactttattggcgtggccatgaagttgaaagacacggctttctggggttggggattagcttcatttacctttgtaggcggaattctggctgtcacctggtatctgggtgctaaagggaagaaacaacgaagtgatgaaatacttggtggcagagacctggttgatgatgtcaacgtggttaacaaacaattaaaaaaagaaggtaagtattctccgcttaacttatctggactgcattttccaaaatattcagaaatgcaaaactacgctctacacggtactgtgggttcggggaaaagtactgcaattaatgactttttggctcagatccgagctaagggtgacagggttattatctatgacaaagggaataactttatcccgatattctaccggcaggacagagatgtgttgcttaatccaatggataaacgctgcgcagcctggaacctttgggatgaatgccagagcgcagtagacttcgagaactttgctacaacactccttccagattcaggtaatggtgaccccttctggttactttcagcacgtcatttatttgtggaaaccgcccgacggctggcaaaggaaggcgaccgttctatttataccctgctgaataagttgctctcgattacgcttgcagatctccgtgaatttcttaaaggaacagacgcatcaaacctggttgaaggtagcattgaaaaaaccgcgatgacaattcgaacagttttaaccagttatgttcgttcactgcgatatttacaagggcttgatgatcaggggaaacgaccttttaatttacgtgactggatagctacggaagatccagagggagataattcatggatttttattagcagcgatggccgtaaccataatgctttaaaaccgcttattacagcatggctttatatgtctatggtaaatatcctcggcctgacagccagcagggaaagaaggatatggttgttccttgacgaattaccatcccttcataagttaccgaaccttccggagttctgcgcagaagccaggaaatttggtgggtgtacttttgttgctattcagaacttccctcagttaagacaaatatatggtaaggatttcgctgaatccatatgggatttactcaatactcgtttcttttaccgcgctccaagtggaccagtggctgaatttgtcgaaacagaactcggtgagaaacgaattaaaaaattccgtgatcagtactcatatggtgtagacattatacgtgatggtgttcagttctcgaaagatgatgtgcgcgataagctggtttcgtattctgatattcagcgacttaatgacctgcaatgttacgtgaccttaccaggtgattaccccgtcgtaaaactggacctgaaaagaaaagagtatagagatattgctattgggcatattccaagaggcgatgattttcttgatccggaagtcgaaaagcagcttgaagacgcttcggaagatttaataggcaatgcgtctgttattcttaatcgacttttcagttcatctcgtcaggaaggcgaatctgttttgaatgtggttaatcaaccaaagcattcccgaaacaattctcaaggtccgggagagggagactcttcagaaaacaacgctgaagctgaagggcggggaaataacctgaacgctgaacaagctgtccaggaattacccgaggatactgaccctgttaaaaacgaagcacccgcagaagaaaaattacctgagcgcgctgatgaaactcaaatcaacagacgtattgaaataggggctgaattggagaggtggtaa

SEQ ID NO: 136272 - DNA, 564 bp, Enterobacter cloacae
atgcttactcatgaaaagattcgaatagagacagagcagattataaagttgcttgctacaactgacaggccagtaacatcgttctttcatattttaaaacctggcctgactcttatggtgatacctaacttactggcaacgatattgcttatccttgaatggataaatggttatattagttcaggtgtcgggccgggggctttcttaggcaatttggttctttctttcttgttggctgcaatgctttcgccgtatgctaactttttttatatgctgtctatgaaggatgtcgaaaatttagagattgttaaagtactgcgtaagaaaattaaaacctattttatagttctttctatagtctggattatatccagcattccattgatgatgttagggggcggagtcattgttatccctatcatggtaatggtgacatttatactcagtatgttcgttttttctatagatatatcaaggtatcagctttcaggcgtgtttggcgcactgaagggcgttaaagacgttgtgatcaagactggacaaacagataatttaaatcattag

SEQ ID NO: 136273 - DNA, 2871 bp, Enterobacter cloacae
atggggcttgatatttgggttgtcagcagcggtgaaatgatcgcaatgggattaaacgccgttgccgctctgctgaactcgggcggctggagtagtgtcctttggattgcggaaactatagggatactatgctgtgtggtcatgtaccttaaaacgcatgacctgcgcggtatgtttgcctggggcttcacctttgtcttggtaactgcgctgctcctgacccccaaggtcagtgtagtagtgaatgatctcacccggccggacaggattgaccgggtggacaatgttcctgttggcctcgctgtcccactgtggatgctgacaggactgggatacaccatagcgacaggatatgaggactttttccattttccggatgagcgagcatataccaaaaccggtatgttattcgcctcaaaattacttgatgactcatacacaatggtgggggaaaatgcagtactgcaagataatttcaacgaatacattaaaaattgtaccattcctgatattcagctaaatcacaaattcacaattaatgatgtgatgcgctccactgatgttgcaacacttatattcagcaagccaagcccattgcgaggaatatattaccagactgaaaacggatcagaatttcttgcgtgtgccgatgccgtcccgagattaaaagcggccattgaagctgatgcccgcccgggtgggggcactttccttacccatgcagccagtatgcttccgggtaacaagaatgcacagacaatttatcccgggatgctggaaagctcatacaactacttttttaacgccagtaaatcgtcaacaaatattatcaagcagaacgtggctatcgcagggttgcgcagaggatttaattcctactctaaatcgatgaatgatactgcgtcactggttgatattgcatccgaatcatcactgatgaagttgcgtttgtcgcattccgtaagttaccggattgcttctgaggtacttcctcaactccacactgtgtttatgctgctgtgcatcgctattttcccggtcatgatgctggcactctatatcaaagaagtggcatgggctgtggtgaaaaactatctcaatctgatgggaagcctgatgctctggcctgtcatgtttgcgatctttaattttgcagtaaatttcagcacgcgtgtaggttcgtctggagaacctaccttgtccaacatgaaccgtttaatggagaccatgtcgacgacggccgggattgcaggctggctgatgatgtctatcccgtttatctcgttcaagctgttcacttcactgggtcaaaacattgcaagtgccggttcatatctcggtaactccctggggggagcggcgacggcggattctgctgcagtggcgtcagggaacctcagttacggtaatgttcaggtggataacatcaacggctttaaacgggatacaaacgtggtgaaccgtgatggtatggtgacgaaccagttagcgaatggcgccatgatcaccgagaccgcgggcggtcagacagttgtaaatgtcaccgaggctaactctaaaatggccacggacattaattttgaccatcatttatccagcgctgcgcagaaaatgacacgtgaaagccaggcacaaacgcagaccgctctggaagggtataaccactctgttacacagaatgccgcacagctaaaacagttccatgaacagtttggaaatagtgatgccaccacccttgctgcgcagaccggtatgtccgtgacggatgcacagaaggtgaataaagcgctatcactggcacagggttactctgacagaaaccacgtcagcttcgatcagggcttcagtgaactggaaaccaaatctaaatctgttgaaggaagagttggggttggtgcttccgtgggcgtagatactgataaatcagtcctgggtaaggtggccggactggcagtcggtgtgtcaggaaaagtggatggccatactggagtagactggaaaggggcaagtgggagcacatcccaaacttctgaaggtggcagtaaccgtcgtgattacgggcatgatgtatcagctcaggatatgcagaccttcaacgaagggatggatgtcctgcgaaattacagcgtgacctacaatggcgcccatgttgacaacgccgcttctggtctactcaatcagatctctgcaggcgtgaataccagtgacagccattaccagcaatacactaccagtctggcgcgcactcacgaataccaacagatggcttcccagaccgataccatgagtgcccaggtacgtggaaattacaatcaggaatttgtggaatgggttaaaactcggatgcctgcctctgaatggcagccaattgtggcggataccggtaatcctgaactgcgtgagcgaagggagcaactcgcagaggcatttatggaagataaattacgttcacgggttgaggggcattatgagcaaagtgctgcacatgtcggagataatatatcatcgcctcgtaacgttgccggtgagcagtatggtaatgcatatcaggcaaattcagctgagattgaccagcgtggccgagatgccggtattcgccatgatgtgaagcaggatgttactcgccatgttgataccactcagaagaatatggatgacactgaagatgtggtgaatattgacaaaaaccagatgacaaaaggcaagggtgtaagcgaaactggttataataatgccaattcggatttccgggaaaagcatgcaggagcaaaaacgcatcaggatacagggtttgacggcaaaaacgtgcttaatagcttgacttacaaggactatacaagacagttggaacagaaactgaaaaatgaataa

SEQ ID NO: 136274 - DNA, 1365 bp, Enterobacter cloacae
atgaagtattcgacagcagctgcgctgttaactgccctggcgcttattactacgcagtcgcaggcaggcgtaaatgatgatttgaataaattctttgaccagatgggaggaggtggcgctaacgtctccgtgccggcggcgtggaaggggcaagcggcaggatatctgaccggtggcaatctctttttgcggacaccagtcagaaacatccagctgatatctgtcaccctgccagacgtgaaatcaggttgtggtgggatcgatgcttatcttgggtcgttttcatttatcaacagcgaccagatcaaaattatggggaaacaaatactgagcaacggccttggttatgcttttgatctcgggctggaaaccgtctgcccccagtgcaagtcggtcaaagattaccttcagaaactggccacggatgtgaacaatatgaacatatctacctgccaggcttcacaggccatagtgggaggtctgtggccaaaaacgcaggaagccagcaagaagatctgtcaggatattggcggcgcccatgatgtcttctcagactgggcggcttctcgccagggctgcggcgttggcgatgaaaccgataaggtattcagtaaagctacccctgaagaaaaaaagcgtatcccacgtaaccgtaaccttacctggtcaactttcgaaaaaataaatcagttcatcagcaatgaccgcgaattgaaagaactgatcatgtccctggtagggaccgtcatttatgacgataaaggcaatcccacttttctggcgccgcgcgggggcagtgattcaattttcgacactttactgaatggtggtactgcgaagatttatcactgtaacgataatactgattgcctgaagccaagtgctgcagagttcacactaagttcgtcacaaggtatgacaaaccgggtaagaactatgctgcagtccatattcgctaaagggcgtaccgacacaaaacttaccgataatgaaaaggcattaatctccagcacacgggtaaaaatacttcgctatgcaattgactcggcttctttaggaatggacgacagtgttctgacgagtctttcagaatatattgccagtgatatggtaatgtcatatatcggtgggctaattgaccttgctgaaagttcctcctccggaacactgaacactgaagatgaaaatgcccgattccgggaaaatcttctttcagtaagaagtcaactgggccagcgtgtatcacgcattcaggtgcaacaaaacgggttaattgaatttgataataacctgaatcaaatgcgtcagcagctctccagcaatatgtcagacaaagtattatctaattatgattacggtggctaa

SEQ ID NO: 136275 - DNA, 555 bp, Enterobacter cloacae
atgaaaggaaaatggttatttaaaagcggtgcgatattgttttgtaccatgttatcttttttcacctgtgccaatacacttgatgaaatagcaacgctggataataataaaagcgttacgggaaccttgccagaccgtaataatgtgcaggcaaaagtcgcgcaggaaaacaaacctgtctggctgaaattagcaaacggaaagacaattgatatacagcgatggcagattgtccactttttgagttcacaatgtccctactgccatcagttcaatccggtattaaaaaaagtcagcgatacgatcggcattaatgtctttgtgtacagcttcgatggtgcaggtgatgccgtatttccgtcagtattacccactacgacagatattctaaataactttttcgcagaattacccaaagttacacctactgattttatcgttaacaaagataccctggtgactattcctctttcccagggggctataagtgaagaagcgctggtacagagactgaacgaatcgtttacccttgctgaccatatgggggtcttatga

SEQ ID NO: 136276 - DNA, 771 bp, Enterobacter cloacae
atgaaatattccgccttattacttctctgcattccactaatgtgtatagcagatgaaccaaaagaagatggctaccattataaaccagcagttggctggtactggtataaccaacctaaaaagaacgaagaaaggaagcaggagataaacccggaatcgtcttcgcctccatcttcttattcagaagtaatgcagaaacttcatgcaaaacgtgaagagttactcaataaagcaattctgacgggtaatgatgaagatgtaataagatataaacagtttcaggattttcttgttggtaaagtcagtacattcagttcgcgatgggaatcagcattattaagtcatcctgagcttgattataacttgaagcaccctgtatataatggtgctgcaccgatagagtatgcggcgcagagaaaaaaacaggctgaagcaataaactacattaatcagaagtacggtgtttttttcttctacaggggcaatgagccacttgataacaaactcggaagtgtagtcaaagagttttcccagcagtatggaataccgtttattgcagttaccgttgatggtcgtgtgaatcctgatctccctgatagtcgacaggatcaggggcaatcagcccgaatgcaaattacacattttccggccatctttctggttgagccaataaagcaaacgtataagcccttatcgtatggttttatcactcaggacgacctggcacgccgtgtccttaatgttgtgaccgattttaaaccgatcgattga

SEQ ID NO: 136277 - DNA, 1938 bp, Enterobacter cloacae
atgaaatctaatgggttaaaaatatccgttgtactcatgacgggatggctactttcttttacggctttggcatccagtatggatcagtcgatgaaagagggtagagatatagcgggttctgcactcagttcaggtgttgaggcaactaaaaattttaaaccggaagatgaatttgaaggatttaattctaaacctccggaatccggatattatcacggcgtcacctccagtggcagcaatattggagataaaggaaacagtgaacttgcaacctctgatttaggtaagctaaccagggagtcatttataaataatcctgcagacaaaattgacagaaactctgatatgattaaaaacagtgattctatcagggataatgctgaattgattgcagcaggcacttctcagcaatgcgtaaagcaagatatatctaaggttacattcactagtcatagctgctctcaggacaaaagtgtttcggctgtttgcactaataccggttcaatagatgtacgaacaacaaaggtatggactccagaaacactgcgacttgaagttaatatgaagaagtcaggaaaaggagtttggaccggtaacgtttccttgcccgagtctggccgctttaagaatataaatgtttccggctcaactgttgttgttccctataatggacagtgcaagaaagaggccggagttacaaatgaatgccgttccagtatagatgaatcagtcagtctgatggccagaacctttcctgttagtataactaaatatccatcaataacgagtttgtgtagtggtgggcagaatacacactgcaccactacatataacaacggtacaggaagcattaatgccacattttcaataagtgatactttttcgcaggggcaaagtataaccgttgtaaaaaaatctagacttgatgactcttccggaaattcatcattcaaactggtgttgacccttggtattgaagtagagaaaacgtcttatcagccagaaattgtctggaatgaaaactgcccagtcgataaaggtaatgcggtcaaagtccgggaatggtgtagccagcccggtgccaccaggaccgtccagtacaacggccagcctttcaacatgtacagcgattgctggcaacattctgaggagtgggttgtttcctctgcagataccaatacctgcagccagtgggaaaacgatgcgaactgtacggtagggacacgtgcatgtactgcttatatcgggagctattgtgtgaaggaaaatatcagctaccagtgtcagcataccgtgaaaagtgagggatggctgtgtggtgacagcttctactgtgcggatggaaaatgtgccgctatgcaggaaaaccagaatggagatttcagccaggctgtatctgcgttagccgctatcgccgccgccggcaaagatgttgctgaaatggacccatcgaaagtatcagcttttaccgggaaaggtatgtcctgccgaaaagctgcagctggattcagcaactgttgtaaaggcggcggctggggaagcgacgtaggtctggctcactgtaacagtgaggaaaaagcgatcggtaaggctaaagaaaaactgctgacaattgatgtcggggagtactgctcacgtaaggtgttaggtgtttgtcttcagaaaaagcgcacctattgtgtatttgactcaaagctcgctcgtatcgttcaggaacaaggcaggggtggacaacttcatatctcttttggcagcgccagtagcccgaattgccgtggcgtaaccgttgcggaaatgcaacatatcgactggaaagtgattgactacagtgacttctattccgagctggaagataacatgacgttacccgattcaggttcactgaccgatcgtatcagagaacaaattcaaagccagatgaatggagtaaatcagtga

SEQ ID NO: 136278 - DNA, 429 bp, Enterobacter cloacae
atggaaaaaaagaaactgtgttgtgctgtaatattcataatgctgcctctgtttgccagcgccgaaggatcaccatcttatgacgatgtccaaaatgaaaaagcatactttctttcctcatctataccggaaaaaacgctggtagcgttaatgcagtcagcggaaaaaaatcaggttccggtatatttcagagggcttgtctctgacagcatggagaaaacagcaaaatacattcaatatttatcctctaaatatggcgtctcaggtgttcagattgatcccgtgcgtttctcggagtatcaaattaataatgtaccagcctacgtggaaaaatgtggagcgaagtttgatgtggtattcgggaacgtatcaattgaaaatagtcagatgatgattaagaaaagaggggattgtaaaacaccatcctaa

SEQ ID NO: 136279 - DNA, 999 bp, Enterobacter cloacae
atgaaactgaaaagcactgtaatttctttactgactgccggcctttttgcaacagctggcgcaagggcggctgatcctacctgtgacgggcgctgggtcaatcccattaccgatatctgctggaaatgtatgtttcctatgagtatcggcagtgtacaggttgcccgtggtgacttaccggatacgccgaacccgtcatcaccgatccagctctgcccggcacctccgcctatatttgagcgaccggggctggccattggattttgggaaccttttgcaatgacagatgtgacgcgggctcctggctgtatggtcaatatgggcggttttaccattccgatcccctttgctggcactggagccggcactaaaactgcaaatgaccatccgggcacattctataacgtccactggtataaatatcctttggtatcctggttaaacattattacctctgtcgcctgtatgcagggcggtgaatacgatatcgcatatatgtcagagctcgacccaatgtggaaagatgaccagcttgctctgtttaccaacccggaagctctggttttcgctaacccggtcgcacagatggcgtgtgctgctgatgctgtggctgcagaagccggtaagccactcgatccgctcttctggtgtgccggtggccacggcagcatgtatcccttcacaggtaatctggtgaatgaaagctctggtctgaacagtgcagctctcctgagtgaaaggatgaactttaaactccatcgccagggtatgatttttgattcagtgggtgaagatagagctgtctgctacgaatacccgtcagcaatcattccgaagtctcggtaccggtatcaaatggtcaacactattcctgatgccaaccagtgccacccgctgggtcgcagtgtaatgagatggcaaactggtaaagaaatgccgaattccaaaaaaaactatgggtatctgatatggaaaaaaagaaactgtgttgtgctgtaa

SEQ ID NO: 136280 - DNA, 633 bp, Enterobacter cloacae
atgaagctaaattatgtggccggtcttggcttcctactcctcccattttccgccctcagttccaacctgggaacttacggagacgtatggggtatagctgagacagattttctgacagttgtgcagcagaagctgggcgattacatcaaagaaaacggtgaagagaaactgcaggaggaaatgaaagcgcgggtacaggaacacgccatgcggccagcgccggtggaaggcgttcatcgcggcaaggaaacacatgtgaaactgttcgatccggctttcgaagttacgcgtgaccttgctgatcagaacggaactgttttcgcccgtaaagggcaacgtatcagcccgttcgatgttatccccgtatttaatgaaactctctatttcattgacggtgacgataaagaacagctggcctggatgcagcagcagaaaccgcaaactccgatccataaagtgatattgattaacggaaatatcaaagataccgccgatgtactgcactcacgaatctactttgaccagggtggaacgctcatacaaaaattcggcatccgtcaggtgccggcaattgtggatcaggctccgggtgaacagttattgcgtatcactgaagtgggattgaaaggatga

SEQ ID NO: 136281 - DNA, 378 bp, Enterobacter cloacae
atgtcttcgttgataagtgatgtgaaagaatctgagctgattaaatataccctagtgataatcgtttcttgcttgataaccgttattgtttcgtttgtcttatggtctgcatggctaaaaccccctgttattgttagtttcgatattaaatccacaactaataaatttcttttgcaaagcgcgaagctgacgttaaacgatgagcaacgtaaggaacttgttcaacgctttaatagagcattaacagatactctggcggactatgccgcagcgaacaatgtcgttgtcattgttcaacccgcagctgtctccggcattcaggatgtcacacctcagatacgaaccgagctttccaaagctatgtcccgtaaccagtaa

SEQ ID NO: 136282 - DNA, 2622 bp, Enterobacter cloacae
atgaaatttgatttttcaaactttaaatttgatcctctgaatgtgattgaaactgtaaacagtattatgggggagcgagacactacaaaagagacacaaaaaaaactggatgatttagattatccacatatcaaagatttattgccttttgaagattatgacagttcttcacaactatttatcaacaagggttcaataggattcattattgaatcccaaccattaatcggtggcaatgaagcgcttgtaaaaagtctggattctttactgcaggataaagtacctcgcggtactccactgcaggttatcatggtcagtacccgagcaattactgaacagatcaaatcggggctcaaagatttttcctggaaaggatacagggctgatgagtgtaatgatattaccatgcgttattacactcatgcagcgaaagaaggtttccccaatggattgggagaaccgctaactcttcgtgattaccgtttattttttacctggtctcaaaaggtaaaacgcgttaatgaaagcgaatttttgaaagtccgtgatgtccgtcgaaatttgcttgctgctcttaatacagctgatatccacagccatgtagtggggattgaggaatttttgagtgtcatgagagaagtgctgaatcatgacaccgagagaatggattcctggcacgttccctacgaccctgaatccagtctggcttcgcagatggtagatagaaccactgcctgggaagtaaaaacaggtcacatccgggtaaaaggtgtcaaccacaaacagcaaccattctccagcagaatggtcagtatgaaccttgataagaaccctgcgattcactatctctggcagaatggtaatatcgtgactgatctgcttaacccgtccaaagggatacattgtccgtttgttttcactatgcttctcatcacagaggaacagcttaaaagccagggtgaagcaaacagcaagtttctagcactcgatagtcgtgtcaatacctcatatgcgaaatttataccagctaccagacggcagcacgcagaatggaaagaggcacgtgataatttgttgtcgaatgaagaggcgattaccagttatttttacgggatcacgtttttctgtgctgatgatgatgatgtgatggcacaggagacagaacgaacaaagaatgcgtttgaacaacaggggctaaaggtagttcgcgctgattttatgcaaatacgtaatatacttgctgctattccttttaccgcgactaacgataagctatggacagactttaagcgtactggcgctgttcaacgcggatacagttttaatgcggctaacctgatgccaattattgccgacaataaattaagtccttcaggaatcttgttaccaagttatcgtaaccagatcgcttttctggatgtttatgataagaatcttccaaatacaaactttaactggtttatgggagctacatctggagccggaaagtcagtattatctcagtctatctgccgctctgtacttgatatgggcggtcgcgtaagtattaccgatatcggggattcttataaaaaatactgtaaaagtgtcggtggtatttacattaacggggaaaacctccggtttaatccttttgctaatgttactgacataagtcaggccgcagaacgtatccgagatcagttatgtatccttgccagtcctaatggtctgttggacgatgtacatgagtctcttattctggaggccataactgaatcctggcctcattatgagcaggatatgaggattgatcatgtcgttgattatatgaagaaaaagcaaactgaaatttcaaaaatgcactctgcacaaattggtggaagaatagatgaaattgtaacgttgctaaataaatatactactcgtggtctttatggcgaattctttaacagcagtaagccgaccctcagtatggatgagcaattcgtggtcacggagttaggtgacttaaggaaaagaggggatttattatcagctgttctattcactctcatgatctggaacgaaaatatgatgtacagtacatctcgtgacctaagaaaaatgagtgtcatagatgaaggctggaaattgttaggtggttcgagtaaaaagattcgtgattttattgaggaaggataccgtactgcacgtcgccataatggttcatatggcactattactcagtctattcgtgacaaaaatttgagcacagcttcactggcagcttatgacaacagttcgtttaaattcaccgggatgcaggacgctaagtctctgtcaacactaaaacaggaggaacccaatctttataatgaacttgagtggacattgatagaaaaactcccccctgctaaaaaagcgaaattcagtgcttttcttgtcagtgtaggtgcatacagtagttttcaccgtctgatgcttgatccgctttcagataaactcttttcatcgaaaggtgaagattttgcctacagtgaaaaacgactgaaagagaatgccgacattaaggatattatctttgaaatggtcgagaatgatgctgagaacaattttgaaaaacgagattttctcaattatcttcgtgaaatgtcaatctaa

SEQ ID NO: 136283 - DNA, 531 bp, Enterobacter cloacae
atgaaaaccaggaaaatagctgtcgcaatgatgactgttttgttaagcggttgtgcaggaatgaattctgatttcgaatttgataagcctgctaaagatagtgggatctggatggctgaagctgatgatatgactgtttcaaaatcctctgtaaatggtgagaggaacacccatatcagcctcgaaggatatcgattacttaatacaggaaatatcagactggatgttcagccggcaatgacgtcgggctattctggctcggttcccggttatccgatagctgtcactccatcacgtaccggtactgtattcaaccattcagcaagttcttccgtttcaggttatacccggaattcaggaataaactgtaatgccccacgttgctacccagaaccctcttctgcattcaggacaccggataatctggtcagggtctggatagctccatatgtatcaccagatgataacgcacatatgggagagattgtttattcagtcactaaaaaatcagaatggaatgggataatgtag

SEQ ID NO: 136284 - DNA, 390 bp, Enterobacter cloacae
atgaagatgagtgaaacatcgcttaaatggttagatgctatttatcttttagtttactggttaattatgtctcttattgttacctttttaaggtctgacggcattttagaaatgtcatctgagtcatataccacgctaatgataggaatgccgtttagtgctgtctactctctctatttgattactgactcttctgaaaaactgcccactattacagcaagtatgcttttagctgcaatagtgtttgggtgtgcttatgttttgtttttgataattagaatgtttacaagcgacttaacgctggctgacactacatgtaatgcttttatcgtatatattcttctttgtatgtgtgtcattccggcatttctagataaagaatccaggtaa

SEQ ID NO: 136285 - DNA, 1332 bp, Enterobacter cloacae
atgaatattaataaacagatcctgaataaacaaaggaaactgcttattattattgtcagcgcaatagcgctggctgttaccgctttatgggcgatcaataaaaaagcctctacagcaaataccaaagagtccgaagcattaaagtcggacattcccgaaccggaaccagacttaaccggtgcagtgaccaataccttcaatagtgcagttgatgggaatgtcattctcgatgctcagatgcaacaacaggaagcagccaaaactttaaacggtgttcaggatcagcttaaggagcttaaacagagccttggtgatatgagtagtgaaaatgccgaactaaagcagcagctgacggctatgcaacaaaaaatggcagagcagtccgcggcaccggcgcctcaaggcggaatgagcactggtcagtatcagccccccaggacagaataccgtctaaatgcacccagtgtgaaaaccggtcaggttgacaacgctacttttgattacacgaaagttgatcagcggaagaaaaaggcgacggacagtttctacgtacctaccggtactttttctaatgctattgtggttgaaggtgcagatgccagcgcgtcagttcgtgggtccgaaaatctggttcctatgcagttcaaactcactggtcttgctcatatgccggggaatcagcgtctggataaactggctaactgttttgtgactgcggccgtatatggggacatttcaagcgagcgagcattacctcagttacaaagactgtcctgcattattaatgggaaacatatcgaccaggaagtaaaagggcatgttgctttttacggaaagaacggtatcaaaggtgtacctgttatgcgtaacggtaaaatcctgggcctggcgtttggcgctggagctctatctggtcttggacagagtgtctcacaggtcggtcagacggttgcaggagtcggggcgacaaccagtatatccggaggtgatgtagcgcgcagctctattggaggcggtgtcagtacggcagctaataaactggctgattactacattgagcgtgccgaacaataccacccaattatacctattggcgccggtaacagagttgaggttgtgtttatcgagggatttaaagcagaaactctggaagataaagaactcgcggaatcacagaaggaatctccgcaaactactgctgataatactgataacaaatcaatgagtgccacagggaacagtgggttaccgcctgagttactcggaaaacttggtgatgctgatcatcttaaattgggagattttgtaacccctgcatcatcagcaaattaa

SEQ ID NO: 136286 - DNA, 759 bp, Enterobacter cloacae
atgatggactttgctataacgcctttgtggaggtacccgttgaaaattaaactggcattgctcatatcggcatctctcatatccggatatgtttctgccgattcgatcaccgttaattccttcgccaccatttctaccggggtaagtaacaataatcccaacagcatcactgtacctgatgaccgaatcacttccctgcagtcaacgcagggagtgcttacagcacgtgaggccacagcaaacggaagcgttgtgttttcaaccttagcaactaaacctttcacgatgtttgttcagacggagtccggctttagttttaccgttaacgcaacccctcgtaagcaacagggcatgtcgctggtcgtgaacaataaagaggtaaaagggacagaagatgctacgacctgggaaggatcacaaaatacttatagtgctcttataaccggtctaatttcacgatttatcaacaacgataaaccccagggattcgtatttagtaagaatactgacgttcagttatcaccttcagtacaaagttattttaacgttcgcccggtaacagcatggcgaggcgataaattgaggattatcagactagagctgacatctcgttcttcttcccggcttgagctgaatgaaagatggttctggcaagccggtgtaatggcggtgtctttctggccacggctggatgccatttcacctggaggtaaggtctcagccattattctcttgcgtgagaatggaggggaacaatga

SEQ ID NO: 136287 - DNA, 576 bp, Enterobacter cloacae
atggaatacagattaaaagcatccaataaccgcagtttagccattagcatagtaatattgcttctaatagctattctcgcattgggtgtatgttttcggcttataaaggttaatcagcaactgactgaggacttagttaataaccgacaaattattattcaaccactgggggcaaataaggaatttgcattcagtggagccaaaggtgatgctcgctaccttcggttaatcgcgctgagttttctaaatttaaggctgaatgtcagtaaagaaacagttcaggctaaccatgatctcctgcttgcctatgcctgtgaagggcagcgtaaagtcatgctgcccgtactggcagaggagaagaaacgtatcacattaacggagggcagttcagtcttttacccccaggttctgcgtgtggccgccgatacggggcttgtagatattaccggggaccttgttttcacatatggcatgaaatcatcggacccactgccaaagcactaccagatcagaatggacacccgtaatgatggactttgctataacgcctttgtggaggtacccgttgaaaattaa

SEQ ID NO: 136288 - DNA, 297 bp, Enterobacter cloacae
atggaacaacgtaaccgatatcaatttcccggtacgttttccgatcagaagcgctacgtggggctgccactggatgaactggtcatttatgttccagttgcgttgttagcgattttcgttaacatgtggatattcagccccacccttgctgcagctgttatcgggattcgaatactgaaaaagggcaaggggtcttcctttctgctcaaccttgcctactggttcctccctactacgcttatgcgtttttttatttcagttctgccggaaagctataaacgtcactggattgcctga

SEQ ID NO: 136289 - DNA, 306 bp, Enterobacter cloacae
atgaacggaaagattcgcacgttctttagtaacccgagaaattttggtgctgcagctttggctgtaatgttcgttgcgcttatgatgacgccctcattacatgcgcatgcagtggatctgttcaaaaacggtaaaactactgtcaaagatacattcggctctggttctaccgttgtctggattttgtatgtcctcgaaatcctggcagcaattttctcttatgtgaaaacgaaaaacctggctgtatttggcggtatcgccgcaatcatggtttttgtcaacgtggtcttcggcctggttccgtaa

SEQ ID NO: 136290 - DNA, 306 bp, Enterobacter cloacae
atgaacggaaagattcgcacgttctttaataacccgcgcaatttgggtgcggtagctatggctgtaatgttcggtgcgcttatgatgacgccatcattacatgcgcatgcagtagacttattcaaaggcggtaagactactgtcaatgatacattcggctctaattctaccgttgtctggattttgtatgttctcgaaatcctggcagcaatcttctcttatgtaaaaacgaaaaacctggctgtgtttggcggtatcgccgcaatcatggttttcgtgaacgtggtcttcggcctggtaccgtaa

SEQ ID NO: 136291 - DNA, 846 bp, Enterobacter cloacae
atgagtgcatctaaatcgacaccaattgaacttaagattagtgagatgttaagcaacatcatgaatgaaaggggtatttcaaagaacaaacatactactcatatagctaatgtactcggtataaccatcacccatgcaaaccgtaaaatgaaaggctttgcgtcatgggaaaactcacagctggaaaaagtcgctaagtctttaggtgtaagcctcagtgatttatttaaaatggttgaggacagctatgaggagaaacacgccggaaaatatattttcaacaaggaagaaatggagggagagataaccttttcccctgatacagaaagaacatattcagctgttaaaattaacgatcaatggcatatttttaaaacagatgatattgaaggcaatgacatttatgaagaatcgcggcaaggtgttttaagattttccgttgaaagttcagcaagagacaagtctaagccacgtatcgctcttctggatgacgataaggagattctgacaacaactgctgaactcctgaagaaaggcccatataaaattgacaccttcaccagtagtgaagatctgatagcaagaattcaatcaagcccatacgatggatatatactggactgggtggtgaatgataaatctgcatatgatgtttgtaagaaaatccgcgaatccaaaaaaccacatgcaatgattatcatcttaacaggacaaacaggagattttatagatcaggaaattgcagaagcgtttaatgacttcgacattctaggcttttataacaaaccgttgcgaatcgctactattcaggtcaatatagacaaatattttagaaaccgaacatga

SEQ ID NO: 136292 - DNA, 984 bp, Enterobacter cloacae
atgaaaactgaacttgtagaaaacaatggaagtcttcttgaaaaccatacacatatcacttcttcatttgatctttcaaaaggatcaaatgagggagtgataaccaaactcgcattagataatgtgctaaaccattctgtaaagggattcaggaaaaattatctaattgagaaaaacctaaacattatcaatgggatgggcgattctataattggaataaatgcactggattgcataaaaaagataaataaaaacatacagattacgcttatacgaccagccacctgccactcttacgtagaggaaatatatagtattgccagcaatctaatagatagattggaatatatgccctatgatataaagcacctaagacgcgatgcggtaaacattgatatcggtaatcaactatactggcacgattttaacaaccttgaaatgcatgattttttcctgaaaaatcttggggttgactttgaattaattcctgataactggaaatgcaatcactggttacaagacagcttcccaaaaaaaacaaacaataaaaatcaatatgtgcttttctgtccgaaagcaagtactagtttgcgttctatcccggaaaaattccactatcaaattattgataatttatatacatcttttaacttacctgtccatggatttagtcccatcaaacatccgatgtacaaggacattagtaagacgtgctcaaatacagctgattttataaaagcaatagctcatgctcaacatgtttatacatgtgattcctctgccttacatgttgcttccggttacgatattcctactacctgtatatttacagcaataaatcccgttcttagaagcaggtattataaaaactgtaaatctatctatataggtgatgaaattactcagaatctgcatgagtcggaagaccctgcaattattgagcatgtagtttcacgatttgaggctttttatgaaaaaatttaa

SEQ ID NO: 136293 - DNA, 504 bp, Enterobacter cloacae
atgaaaaaatttaaattaactcatttgattggaatggttctgcttttttggtccgcttcgccagctgtccaggcggtacagcctgattacaaatacggcgatctccgtgttactgaccaaaatgcacacagagaggttatcatcgacaaagcgacttttgattccctccctgtctcagaaattgttacatcaacaccctggcaaaaaaagtcgacattttcaggagttagcttcagcgacatactcaagtatgcaggcatgaaaggttctcgtcttaaagtgcacgccttgaacgactactgggtagaaatcccaatgagtgatgtagtgaactacaacatactactggccagtaaaattgatggtaaagcctttagcattcgtgatttcggtccttactttgtcatctacccggttgacgaaagacgagaagaactaaacagcccggtcaagttcagtaagtttgtttggcaggttgacagcattacggtggttgacaaatga

SEQ ID NO: 136294 - DNA, 351 bp, Enterobacter cloacae
gtggcgcggcgtcagcttaaccccctgttccggcaccaggctcaggaacgggttgtgcttcggcttcggcgtataatgatggacatgctccagcacctgctcatagctgtgcggaccggtgatctccagcaccttcggatgcacttcgcggatctgatcctctttcgcgccgagacagccggtgacgattaccttgccgttctctttcaacgcttcaccgatcgcttccagcgattcctgcacagcgctatcaataaagccgcaggtgttaacgatcaccatatcggcgttgtcgtaggtcggtacgacgtcataaccttcggtgcgcagttcggtcaggatacgctctga

SEQ ID NO: 136295 - DNA, 1242 bp, Enterobacter cloacae
atgacgtccggtaaaagaaactaccttctgttgagtcttttcgatttcctctacctgttcgcctggtcgtcgaccatggctttcttcgttatctggaccacccagcatcttggcatcagcgccacgaagaccgggctgctttactcggtcaacgcctttatcgccctgctgatgcagcctttcttcggctttatctctgacaagttcggcctgaaaaaacggcttatctggctgctggtcgccctgctcctgccggtgggccccttctttatctacgtttacgcgccgctgctggtgcacaacttttggtttggcgccttgctgggagggatctatctggggatcatctttaactccggctgcggagtaatcgactcttatatcgataagatttcccggcgctatcagttcgaatatggtcgtgtgcggatgtggggctcgttaggctgggcagcggcggcctggattgtgggtaaatatatcgacagcaatcctaatctggccttctggctcgccagcctcgccattgtcatcgccgccatctgctttatgctaaccaaaattgaattaaccgacgccgatgtggcgcgaagcgaatcgctgaaggtctctcatgcccttgagctggcgaagaatggtcagttctggatgctgctgctctttaccctgttcgtcacgcagatttacgacacctacgatcagcagtttgcccagtacttctcgctacagttcccgacgccggaggaaggcaaccgctggtacgggatcctcgcgtctattcaggtctgcggtgaaaccctgttcctctgcctgatgccatggtttgttaaccggaccggcgccaaatgggcgctgatcatcgccgggctgatcatgtcggtacgtattgtcggctcagccgtgcccctcggcccggtgtggattggtgcggtgaaaatgatgcatgctctggagaagccgttgattctggtatcggtctttaaattcatcgccgccaacttcgaccacaagctctcttcgacggtctatttgctggtgctgttcgtcgcctcgatcgccaccgccatttactctccgctggcaggctatctgtacgataccattggcttcgccaacacctatctgattctcggcagcgtcgccgggctctttaccctgatctctattttcacgttgcaggataagcgcgagccgaaaaaaaccggcgccacgccctccgcagccattaacccggcgcaataa

SEQ ID NO: 136296 - DNA, 384 bp, Enterobacter cloacae
atgaccgttgacagactataccgccaccttctgcagaagcttattaacgccaatatcgatattgacgcctatctgcaactgcgaaaggccaaaggctacatgtcagtcagcgaaaatgaccatctgcgtgataacttgtttgagctttgccgtgaaatgcgtgcgcaggcgccgcgcctgcagaatgccatttcaccggaggagagggatgtccttcgcctggccggcgaatcggtcgccgccgctgcactatgcctgatgagcgggcatcatgattgtccgctatacatcgctgttaacgtagagaagctagaacgctgtctgacaggattgacctcaaatattcataaattgaataaattggcgccaatcactcatgcctga

SEQ ID NO: 136297 - DNA, 1110 bp, Enterobacter cloacae
atgcgtccgatcccactgctgttgatattgagcgccttagcgctaccagccctgagccaggccgcggtgcgggtggaggtattgcaaaaccggctggcccagccgtggggcatggcctttctgcctgacgatcagggcatactgatcaccctgcgcggcggcgagctcaagcgctggcagccgggtaaaggtctgtcggcgccgatagccggcgtgccgcaggtatgggccaacggccagggtggcctactggacgtggcgctggccccggatttcgcccagtcgcggcgggtgtggctgagctatgcggaaagcgacgccagcggtaaggcgggcaccgcggtgggctatgggcggttgagcgaggatgccacgcagctgacgaactttaccgtggtctttcgccagcagccgaagctctccgtcggcaatcattttggcggcaggctggtgttcgacggcaaaggatatttgtttatcgggctgggcgaaaataatcagcgcgccaccgcccaggatctcagcaagctgcaggggaaagtggtccgcctgacggagaccggaggtgtaccgccggataacccttttgtcggccgggctgacgccaggccggagatctgggcttacggcatccgtaatccgcagggcatggcgatgaatccctggagcgaggcgctgtggctgaacgagcatggcccgcgcggcggagatgaaattaatattccgcaggcggggaaaaattacggctggccgctggcgacgcacggtattaactacagcggcctgcccattccggaagcaaaaggcaaaacggttccggggaccgaacctcccctgtatgtctggccggtctctcccggggtgagcgggatggccttttattcggcgccgacctttccccagtggcagcataagctatttatcggcgcgctgaaggagacatcgctgattgtcctggcggtggacggtaatcaggtccgcgaggaggggagattactggaggcgcgcggaaaacgcatccgcgatgttcgcgtgggacccgacggctatctgtacgttttaaccgacgagtctaacggcgagctattgcggttgagtcccgaggcttag

SEQ ID NO: 136298 - DNA, 627 bp, Enterobacter cloacae
atgattacactgtggggacgtaataactcgaccaacgtgaagaaagtacgctgggtgctggaggagctggatctgccttatcagcagatcctcgccgggctggagtttggtctcaatcatgacccggaatatctggcgatgaacccgaacgggctggtgccgttgttaaaggacgatgccaccggggtggtattgtgggaatcaaatacgattattcgctacctggcggcccagtatggcgttgaccgtctgtggctggccgcgccggcgcagcgcgcgcaaggggaaaagtggatggattggtccaacggcaccctctctcccgcccatcgcccggtattaatgggcctggtgagaacgccgccggagcagcgcgacccggcggccatcgccgcggggatcagcgcctgcgaagcgctgttcgccatgctggacgacgaactggccaaaacgccgtggctctccggcgagcagttcggccttggcgatattgccgtcgctcccttcgtctacaatctgttgtcgatcctcgacagctggcaaccgcggccccatctgcagcgctggtatcagcagattagccaacgtcctgcctggcgcgaagtagtgcagatcccggtgacctga

SEQ ID NO: 136299 - DNA, 1212 bp, Enterobacter cloacae
gtggctcttatgatgcatgacgctttttcccttcgcggcctcgcggcaggttgcgcgctgttatttcttgtcgcacctgcggtgcaggctgcggaacaactccccgacgccccttcaattgacgctcgcgcctggatcctgatggactatgccagcgggaaggtgctcagcgaaggcaatgccgatgaaaaactcgacccggccagtctgacgaagatcatgaccagctacgtggtagggcaggcaataaaagcgggaaaaatcaaactgaccgatatggtgaccgttgggcgcgatgcttgggcgaccggcaacccggcgctgcgcggctcatcggtgatgttcctcaagcctggcatgcaggtttccgtagaagatctgaacaaaggggtcatcattcagtccggtaacgacgccagcattgcgattgctgactacgtagcgggcagccaggacgctttcgttagcctgatgaacggctacgccaaaaaaatggggctgaccaacaccacctttatgaccgtccacggccttgacgcgccggggcagttcagcaccgcccgcgatatggcgctgctgaccaaagcgatgatccacgacgtaccggaagagtacgcggtacataaagagaaagagttcactttcaataaaattcgccagccgaaccgcaaccgcctgctgtggagcagtaacctcaacgccgatggcgtgaaaaccgggaccaccgccggggctggctataacctcgtctcctcggccactcagggtgatatgcgtttgatcgccgtggtgctggggaccaaaaccgaccgcattcgctttaacgagtcagaaaaactgctgacctggggcttccgcttctttgaaaccgtgacgccgattaaaccagatgccaccttcgttacccagcgcgtgtggtttggcgatagcaatgaagcgaaactgggggctggcgaggcgggctctatcactttgccgaagggccagctgaaaaacctgaaagccagctataccttaaatcagccgcagcttaccgcgccgctggagaaggggcaggtggtcgggactatcgactttaagctaaatgataaaaccattgaacagcgtccgctgattgtcatggagtcggtaaaagagggcggcttcttcagccggatgatcgacttcgtgctgatgaaactgcacggctggttcggcagctggttctcctga

SEQ ID NO: 136300 - DNA, 759 bp, Enterobacter cloacae
atggaaactcgccgtgacgaacgtatcagtcagctcattcaggcacttaaacgcagcgataagctgcatctgaaagaagccgcttccctgcttggggtgtcggaaatgaccattcgtcgcgacctcaatggccacagcggcccggttgtgctgctcggcggatacattgtgctggagccgcgcagcgccacccattacctgctcagcgatcaaaaaacccggctggtcgaggaaaaacgccgtgccgctcgccatgcggccgcgctgctggaggcccatcagatggccttcttcgactgcgggaccaccacgccgtggattattgacgccattgacgatgccctgcccttcaccggcgtctgctactccctgaacacctttctggccctgcaggagaaaccccagtgccgcgcggtcctgtgcggtggggagtttcatgccagcaacgcgatttttatgccgctgagtcttgaggataccctcagccatctgagccctgatatcgccttttactcggcggcggggatcgactgcgagcagggggcgacctgctataacctggaagagctgccggttaagcactgggcgatgcgtcacgcgcgctatcacgtgctggtggtcgaccacagcaagtttggcaaagtgcgtccggcgcgcatgggggcgttagcgaaatttgacgtgatcgccagcgatatctgcccggatgatgagctggtcgcgctggcgaaggcgcagcagatttccctactgtattga

SEQ ID NO: 136301 - DNA, 594 bp, Enterobacter cloacae
atgctggaaaatattaactatgcgctgttcgccctgctcaacgcgacgcctgcctcgccgcagtgggccattgagatggcgatcttcatcgctaaagatctgattctgatcgtacctctgctggtggtgacattgtggctgtgggggcctgcccagcggcagatggtgtttaagctgatgctggcgctgacgatcagcctgaccgtgtcgtgggcgatcggccacctctatccgcacgatcggccgtttgtcgccggcgtaggctataacttcctgcaccacgcggcggacgactccttccccagcgaccatggcaccgtcagctttacctttgccctggccttcctgttctggcatcgcctgtggtccggcgccctgctgatggccattgccgccgccatcgcctggtcccgtgtctatctcggcgtgcactggccgctggatatggtcggcgggctgctggccgggatgtgcggctgccttggcgcggcgctgatctggcatacgttcggcccggcgctataccatcagctgcagcggctgtatcgtctctgcttctccttgccaatccgcaaaggttgggtgcgcggctaa

SEQ ID NO: 136302 - DNA, 1233 bp, Enterobacter cloacae
atgcaaaattattcgctttcaggccgccgcctcggaaggcaggcgctgttgttcccgttatgtctggtgctgtacgagttttccacttatatcggcaacgatatgattcagccgggcatgttagccgtggtgcaggaatttcaggtgggcaacgaatgggtacctacctcaatgactgcctatctggcaggcggcatgtttttacagtggctgctggggccgctgtcggatcgtattggccgccgtccggtgatgttgaccggcgtagtatggttcatcgtcacctgcctggcgacgctgctggcgcagaccattgagcagtttaccctgctgcgcttcctgcaggggatcagcctgtgctttatcggcgcggtgggctatgcggcgatacaggagtcctttgaggaggcggtgtgtatcaaaatcaccgccctgatggctaacgtggcgctgatagccccgctgctggggccgctggtgggcgccgcctgggtgcatatcctgccgtgggagatgatgtttgtcctgttcgccgtgctggcggccatctcgttcttcggcctgcagcgggcgatgccggagaccgcgacgcggctgggcgaaaagctgtcggtgaaagagctgggccgcgactatcggctggtgctgaagaacctgcgcttcgtcgccggcgcgctggccaccggctttgtcagcctgccgctgctggcgtggattgcccagtcgccggtgattattatcagcggcgaacaggccaccagctatgagtacggcatgctgcaggtgccgattttcggggcgctgattgccggcaacctggtgctggcgcgcctgactgcgcgccggaccgtgcgctcgctgattatcatgggcggttggccgatcatgtttggcctgatcctctctgcggcggcgaccgtggtctcttcccacgcttatctgtggatgacggccggtctgagcttctacgccttcgggattggcctcgcgaacgccggcctggtgcgtttaaccctgttcgccagcgagatgagtaaaggcacggtctcggcggcgatgggaatgctgcagatgctgatcttcaccgtcggcatcgagctcagcaaacatgcttacgagctgggcggcaacgggctgttcagcctgtttaacctgctgggtggggtactatggctggggctgatgatttactttctgaaagataaaagcgtcggcaattcgcagcaggggtag

SEQ ID NO: 136303 - DNA, 813 bp, Enterobacter cloacae
atgagcatcaaactgattgcggtggatatggacggcacctttttaagcgatgccaaaacttacaaccggccgcgcttcctcgcccagtaccagcgaatgcgcgaacagaatattcgcttcgtggtcgccagcggcaaccaatattatcagctgatctcctttttcccggagatcgcccatcagatcgccttcgtggcggaaaacggcggctgggtggtgagcggcaatgaagacgtcttcaactgccaactgccggttcaccacttcaacgccgtggtcgaccatctgcagacgttgccgaatatcgaaatcatcgcctgcgggaagcgcagcgcctacaccctcaatcgctacaacgacgcgctgaagacggtggcggcgaagtattatcaccgccttgaactggtggatgattttaaccatctcgatgacaccatcctcaaatttggtctcaacgtgccagacagcctgatcccggaaattcagccgaagctgcacgcggcgctgggggacatggtcaccgcggtggccaccggctacggcagcatcgacttaattatcccgggtgtgcacaaagccaacgggctgcgcattttgcagcagcgctggggcattgaggatcacgaggtggtggcgttcggcgacagcggcaacgatatcgaaatgctgcagcacgccgggtttggctttgccatggccaacgcccgggaagacgtcaaagccgtcgcccgctatcaggcgccgcataacaacgaagaaggtgtcctgcagattattgataaggtgttggatcgcgaagcgccgttcgcctga

SEQ ID NO: 136304 - DNA, 1203 bp, Enterobacter cloacae
atgacgacgcaatcctcgcgcagagcgctgcagcttcggctgtgggcgctgtttatgttctttttcatccccggcttgttaatggcctcctgggccacccgcacgccggcgatccgcgatctgttggcgctatccaccgcagagatgggcgtggtgctgtttggtctgtcggtggggtcgatgagcggtattctctgctcggcgtggctggtgaagcgctttggtacgcgcaaggtcatccgcaccaccatgtccttcgccgtgcttggcatgctggtgctcagcctggcgctgtgggtcacttccgccccgctgttcgccttcggtctggctatcttcggcgccagcttcggctccgcagaggtcgctatcaacgtcgaaggcgcggcgatcgagcgggagatgaataaaacggtgctgccgatgatgcatggcttctacagctttggcaccctgttcggcgccggggtgggcatggcagtgaccggattcggtctgccggccgccccgcacatcctggcggctgcgctggtggctatcctgcccatcgccattgctatccgcgccattcccgacggcaccggtaaaaatgccgccgaagtcgcccacggtgaggcgaaaggtctgccggtgtggcgcgacgcgcagctgctgctgatcggcgtcattgtcctggcgatggcctttgccgaaggctcggccaacgactggctgccgctgctgatggtggatggccacggctttagccccacctccggctccctgatttatgccggtttcaccctcggcatgacgctgggccgctttaccggcggctggtttatcgatcgctacagccgggtggcggtggtccgcggcagcgcagtgatgggcgccctcggcataggcctgatcatcttcgtcgataacccctgggtggcgggcatctcggtgctgctgtggggcattggcgcctcgctcggcttcccgctgaccatctccgccgccagcgataccgggccggacgcgcccaagcgcgtcagcgtggtggcgatcaccggctatctcgctttcctcgtcgggccgccgctgctgggtttcctcggcgaacacttcggcctgcgcagcgccatgatggtggtgctgggtctggtgatggtggcggcgctggtcgcccgcgcggtggctaagccacaatctgaacccgttatggagaacagctaa

SEQ ID NO: 136305 - DNA, 564 bp, Enterobacter cloacae
atggcccgtagaccaaacgatccgcagcgccgcgagcgcatcctgcaggcgacgctggataccatcgcggcgcacggcatccatgcggtgacgcaccgtaaaatcgccacctgcgcgaatgtgccgctgggatcgctgacctactatttcagcggcattgaggcgttaattgaggaggcgttcagcctgtttaccgccgagatgtcggcgcagtatcagcaaggcttcgtcggggtaacgaaccgggaacaagcctgcgatgccatcgcggatctgatcttcagcgcccaggtgaccacggcgcgcaatatggagctgatgtaccagctgtacgcgttctgcagcagtcagccggcgctgaaggcggtgatgcagaactggatgcggcgcagccagcagacgctggagcagtggttcgcccccgataccgcccgcggtctcgacgcctttattgaagggatgaccttgcactttgtcaccgaccgcgcgccgctgtcgaaggcggcaatccgcatgatggtcgggcagctggcgggggagagggcgcaggaagaggggcgctga

SEQ ID NO: 136306 - DNA, 1686 bp, Enterobacter cloacae
gtgaatataaacgtcgcagatttgttaaacgggaattacatcctgttattattcgttgtacttgcattaggactatgcctgggaaaactgcgtctcggctcagtacaacttggtaattccattggcgttttagtcgtttctctattattaggccagcagcatttcgcgattaacaccgatgcccttaatctcggctttatgctgtttatattttgcgttggcgtagaagccgggcccaactttttttctatttttttccgcgacgggaaaaactacctgatgctggcgctggtgatggtcggcagcgcgatgctgatcgccatgatgctgggtaaagtgttcggctgggatatcgggctcaccgccggtatgctggcaggcgccatgacctccaccccggtgctggtgggcgcgggcgacaccctgcgccatttcggcctgcccagcgatcagctggcgcagtcgcttgaccatctgagcctcggctatgccctgacctatctggttggtctggtgagcctgatcgtcggcgcccgctatatgcccaagctgcagcatcaggatctgcagaccagcgcccagcaaatcgcccgcgagcgcggcctcgataccgattccaaacgtaaagtctacctgccggtgatccgcgcctaccgcgtcggcccggagctggtggcctgggcggatggcaaaaatctgcgcgaactgggtatttaccgccagaccggctgctatattgaacgcattcgtcgcaacggtattctggccaacccggacggcgacgcggtgctgcagatgggtgacgatattgcgctggtgggctacccggacgcccacgcccgcctcgacccgagcttccgcaacggtaaagaggtgttcgaccgcgatctgctcgacatgcgcatcgtcactgaagagattgtggtcaaaaaccacaacgccgtcggccgccgcctggcgcagctcaagcttaccgaccacggctgcttcttaaaccgggttattcgcagccagatcgagatgcctatcgacgataacgtcgtactgaacaaaggcgacgtgctgcaggtcagcggcgacgcccgccgcgtaaaaaccgtggccgaccgcatcggctttatctccattcacagccaggtgaccgatctgctggccttctgcgccttctttatcgttggcctgatgatcggcatgatcaccttccagttcagctccttcagcttcggcatcggcaacgccgccggcctgctgttcgccggcatcatgcttggcttcctgcgcgccaaccacccaaccttcggctatatcccgcagggggcgctgaacatggtgaaagagtttggtctgatggtgtttatggccggggtcggtctcagcgccggggccgggatcaataacgggctgggcgccgtcggcggccagatgctggcggcagggcttatcgtcagcctggtgccggtggtgatctgcttcctgttcggcgcctacgtgctgcgcatgaaccgggcgatgctgttcggcgccatgatgggagcccgcacctgcgccccggcgatggagatcatcagcgataccgcgcgcagcaatattccagcgctcggctacgcagggacctacgccatcgccaacgtgctgcttacccttgccgggacgctcatcgtgatcatctggccagggctacaataa

SEQ ID NO: 136307 - DNA, 384 bp, Enterobacter cloacae
gtgaaatctgagcgtagttgggccggcattatctgtggcttcgttctgttcattgtggtgtgcttatcgttgttgttacatatgaaaggggcatttcgcgccagcggcaacccggagctgggcctgctcttctttttgctgccaggggcggcggcgagctgtctctctcccggacggcgggtgctgcgtcctttgctcggcgcgatactggcggcgccggtctgcatggtgacgatgcggctgttcttcgtgacccaccggacgttctggcaggagatggcgtgggtgttgagcgccgtgttctggtgcgcgcttggggcattgtgctttttgtttatctgcgcctggcttgatacctggcgcagtcattcatcgagcaaataa

SEQ ID NO: 136308 - DNA, 264 bp, Enterobacter cloacae
atgtttaccgttatttttggtcgtccaggctgcccttactgcgttcgcgctaaagaactggcagaaaaactgaccaacgagcgtgatgatttcaactaccgctacgtggatattcatgccgaaggcatcagcaaagctgacctggaaaaaaccgttggcaaaccggttgaaaccgtgccgcagattttcgtcgaccagaaacacatcggcggctgcaccgattttgaagcctgggcaaaagagaatctcggcctgtttgcctga

SEQ ID NO: 136309 - DNA, 288 bp, Enterobacter cloacae
atgcgaaaatttgccccattgccgaaaagcattctgctggttgagatcctcgggatggggctgttaaccctcgcctggctctcccttaaccagtatgtccagctgcctgcgcccattgccagcccgaccgcggcgctggtgatgctctttgccgggatcgtgctgatgatccccgccgccctcgtcgtgatgtggcggatggcgcagatcgtggccccgcagttaacgcactctccaaagcctgaatccttgtctgacagagaaaaacgtaatgacgccgaccattga

SEQ ID NO: 136310 - DNA, 723 bp, Enterobacter cloacae
atgacgccgaccattgagctgctgcgcagccaccgttccatccgccacttcaccgatgcccccgtgagcgacgaacagcgcgcagagattatcgccagcgcgcaagcggcatctacctcgagttttttacagtgcacctccatcatccgtattactgacccggcgctgcgtgaacgtctggtcccgctgaccggcggccagcagcacgtcgcccaggcggcggagttttgggtcttctgcgccgactttaatcgccacctgcagatctgcccgcaggcgcagctggggctggcggaacagctgctgatcggcgttgtcgatacggcgctgctggcgcaaaacgcgctgaccgccgccgagtccctcgggctagggggcgtctatatcggcgggttgcgcaacagcattgaggccgtcacagagctgctggagctgccgcagcacgtcctgccgctgttcggtctttgccttggctggccggcggataacccggatatcaagccgcggatgccggcggccatgctggtgcatgagaaccgctatcagccgctggataacgcgctgctggcggagtatgacgaacagctggcgcactattatctgtcgcgcggcagcaacgcccgccgcgatacctggagcgaccatatccggcgcactatcgtgaaagagagtcgtccgtttattcttgactatctgcataagcaggggtgggcaacgcgctga

SEQ ID NO: 136311 - DNA, 903 bp, Enterobacter cloacae
atgaaaattgccatattatcccgggatggaacgctttattcatgtcggcgcctgcgcgaagcagcgcaacagcgcggtcatcagatcgagatcctcgatccgctttcctgttatatgaacgtcagcccggtggcctcgtcgatccactacaaagggcgtcagctgccgcactttgatgcggtgatcccgcgcattggctcggcgatcacctactatggcaccgcggccctgcgccagtttgagctcctgggaagctatccgctgaatgagtcggtcgccatcacccgcgctcgcgataagctgcgctcgctgcagctgctggcgcgccagggcatcgatctgccattgaccggcatcgctcactccccggatgacaccagcgatctgatcgccatggtgggtggcgcgccgctggtggtgaagctggtggagggcacccaggggatcggcgtggtgctggcggagacccgccaggcggcggagagcgtgatcgacgcctttcgcggactgaacgctcatattctggtgcaggaatacattgccgaagcgaaagggtgcgatatccgctgcctggtggtcggcaatgaggtggtggcggcgatcgagcggcgggcgaaagagggggatttccgctctaacctgcaccgcggcggcatggccacggtggcgcagattagcgacgaggagcgggccattgccatcaaggcaacgcaaactctcgggctggacgccgccggtgtcgatattttacgcgccgcccgcgggccgctggtgatggaggtgaatgcctcgccggggctggaaggggtggaaaccaccaccggcgtggatgtcgccggcaagatgatcgcctggatcgagcgccaggcgacgccggaattctgtttgaaaataggcggctaa

SEQ ID NO: 136312 - DNA, 480 bp, Enterobacter cloacae
atggattcactggtcgttccaggtctggatacgctacgtcgctggctggacgaaatcggcatcagcttttttgagtgcgattcctgtcaggcattgcacctgccgcatatgcagaatttcgacggtatttttgatgccaaaattgacctggtggacaacgtggtgctcttttccgccctggcggaggtgaagccgtctgccctgctggcgctgtcggcggatctctcggccatcaacgccagctcgttaaccgtgaaggcgtttatcgacattcaggacgataatttgcccaagctggtggtttgccagtcgctgtctatcggcccaggggtgaccatggagcagttcgcctggttcttccgccaaagcgaagagcagatctcgatggtaatcctcgaagccggcgcaaatcagctgctgtacaaaggcgaagaagaagagcctgcggcggaaaacgtgcaataccattttcttcactaa

SEQ ID NO: 136313 - DNA, 1113 bp, Enterobacter cloacae
atgaccgcctttggtaaaaaatggttaacaggtctggttacgggtgcgctgatggccgtctctgccggttcgctcgccgccgaacaaaaaaccctgcatgtttataactggtctgattatatcgcgccggacacggtagcgaatttcgaaaaagagaccgggattaaagtggtgtatgacgtttttgattccaacgaagtgctggaaggcaaattaatggcgggtagcaccggtttcgacctggtggtgccgtcggcaagcttcctcgaacgccagctggcggcgggcgtgttccagccgctggataaaagtaagctgcccaactggaagaaccttgaccccgaagtgctgaagctggtcgccaagcatgacccggagaataaatacgccatgccttacctgtgggcgacgacgggcattggctacaacgtggataaggtgaaagccgttctcggcaaagatgcgccggtggacagctgggatctggtgctgaagccggagaacctcgaaaaactgaaaagctgcggcgtctccttcctcgacgcgccggaagagattttcgccaccgtgctgaactacctcggcaaagatccgaacagcagcaaagcggatgattacaccggcccggcgaccgatctgctgctgaagctgcggccgaacattcgctacttccactcttcgcaatatattaacgaccttgccaatggcgacatctgcgtggcgatcggctgggcaggggacgtctggcaggcggccaaccgcgcgaaagaggcgaagaacggcgtcaatgtctcctactttattccgaaggaaggcgcgctggcgttctttgacgtctttgccatgccggccgacgcgaagaataaagatgaagcctatcagttccttaactatctgatgcgtccggacgtcatcgccaaaatcagcgaccaggtgttctacgccaacggcaacaaggcttccacgccgctggtcagcgagactatccgtaacaacccggcgatttatccgccagcggatgtgttcgccaaactgttcacgctgaaggtgcaggatccgaagattgaccgcgtgcgcacccgcgcgtggaccaaagtgaagagcggcaaataa

SEQ ID NO: 136314 - DNA, 1167 bp, Enterobacter cloacae
atggtgatcgtttttttgccggagagcacccgattgaacgacgtaatgccccgcccacaggcgaaagcccccaaagcgctgaccccgctactggaaatccgtaacttaaccaagtcgtttgatggccagcatgcggtcgacgacgtcagtctcactatctacaaaggcgaaatttttgctctgctgggcgcgtcaggctgcgggaaatcgacgctgctacgcatgctggcgggctttgaacaaccgaccgccgggcagattatgctcgacggcgtggatctggcgcgcgtgccgccctatcagcggcctattaatatgatgttccagtcctatgccctgtttccccatatgaccgttgagcagaatattgccttcggcctgaagcaggaccgcctgcctaaggcggaaatcaccgcccgggtgcaggagatgctggccctggtacatatgcaggagtttgccaaacgtaagccgcaccaactctcaggcggccagcggcagcgcgtcgcgttggcgcgcagcctggcgaaacggcccaagctgctgctgcttgatgaaccaatgggggcgctggataaaaagctgcgcgatcgcatgcagctcgaggtggtggatattcttgagcgcgttggcgtgacctgcgtgatggtgacccacgatcaggaagaggcgatgaccatggcgggccgtatcgccatcatgaatcgcggcaagtttgtgcagattggcgaaccggaagagatttacgagcacccgaccacccgctacagcgccgagtttatcggctcggtgaacgtctttgaagggctggtgaaggagcgtctggaagacggtctggtgctaagctcgccgggactgatgcatccgctgaaggtcgaccccgacgcctcggtggtggacaacgtgccggtctgggtggcgctgcgtccggagaagatcatgctgtgcgatgaaccgccggcggacggctacaattttgccgtcggcgaggtgattcatatcgcctatctgggggatctctctatctatcatgtgcgcctgcaaagcgggcagatgatcagtgcccagctgcagaatgaacaccgccatcggaaagggacgcccacctggggcgatgaggtgcgtttatgctgggatgctgacagctgcgttgtgctgacggtgtga

SEQ ID NO: 136315 - DNA, 954 bp, Enterobacter cloacae
atgaataccgttgaatccccgtcaggggcgaaaaaaccgggcggcttcgcgctgtgggcggcgcgcctgcagatggcgcatggccgcaagctggtgattgcgctgccctatctgtggctgatcctgttgtttatgctaccgttcctgatcgtgttcaagataagtcttgccgagatggcgcgggcgatccctccctacaccgagctgatggagtgggcggacggccagctgacgctgacgcttaactttgccaacttcctacagttgactgacgatccgctctattttgaagcttatctccagtcgctgcaggtggcgggtatctcgacgatctgctgcctgctgctgggctatccgctggcctgggcggtggcgcacagcaagccgtcgacgcgtaatattctgctgctgttggtgatcctcccgtcgtggacctcgtttttgatccgcgtctatgcctggatggggctgctgaagagcaacggggtgttgaataacttcctgctgtggttaggggttatcgatcagccgctggagatcctgcacaccaacctggcggtgtacatcggtatcgtgtatgcctatctgccgtttatggtgctgcctatctacaccgcgctgacccgcatcgactattcgctggtggaggcctcgctggatctcggcgcccggccgctgaagaccttcttccaggtgatcgtcccgctcaccaaaggcggcattatcgccggctccatgctggtgtttatcccggcggtaggcgagttcgtgatcccggaactgctgggcgggccggacagcatcatgattggccgcgtgctgtggcaggagttctttaacaaccgcgactggccggtcgcctcggcggtggcgattgtcatgctgctgttgctgatcgtgccgatcatgtggttccacaagcaccagcaaaaacagatgggagagcagggatga

SEQ ID NO: 136316 - DNA, 846 bp, Enterobacter cloacae
atgaacgacttgccggtagtacgctcgccgtggcgcattctgatcctcgtgctcgggttcaccttcctctacgccccgatgctgatgctggtgatctactcgttcaacagctcgaagctggtaacggtctgggccggatggtcgacgcgctggtatagcgaactgttccacgatgatgcgatgatgagcgcggtaggattgagcctgaccatcgccgcctgcgcggcgacggcggcggcgatcctcggtaccatcgccgcggtggtgatggtgcgctttgggcgttttcgcggctccaacggcttcgcgtttatgatcaccgcgccgctggtcatgccggacgtgatcaccggtctctcgctgctgctgctgttcgtggcgctgggacatgccatcggctggccgtcggaccgcggcatgttgaccatctggctggcgcatgtcaccttctgtaccgcctacgtggcggtggtgatctcctcgcgcctgcgcgagctggaccactctattgaagaggcggcgatggatcttggcgccgcgccgctgaaggtcttcttcgtcatcacgctgccgatgattatgccagcggtgatctccggctggctgctggccttcacgctgtcgctggatgacctggtgatcgccagctttgtctccggtcccggggccacgaccttgccgatgctggtcttctccagcgtgcgcatgggggtcaacccggagatcaacgccctggcgacgctcatcctcggcgtggtcggtattgttggttttatcgcctggtatttgatggcccgcgcagaaaagcagcgagtgcgcgatatccagcgtgcaagacaaggctga

SEQ ID NO: 136317 - DNA, 159 bp, Enterobacter cloacae
atgggattctggagaatcgttttcactatcattctgccgccgctgggtgtgctgctgggaaaaggcttcggctgggcgtttattctcaatatcattttgaccctgctgggctatattcctggcctgatccacgccttttgggtgcagacccgcgattaa

SEQ ID NO: 136318 - DNA, 393 bp, Enterobacter cloacae
atggaactgctggtcaggctgggtcatttttttgagcaagcgcgttctgacgccgactatgccaccttcgccaatgaactgcgtcggcatcaggtctcctactacatctattttgtttccaccggcaatatgaatttcgtaatggcaaacgacgaggtggtctcggtaaaaagcgcccgcgggctgctgcgcgttcgcgctgaggccagccattgtctgaccagggccgccgttatccgccactttgcccgggccattaactttgaacagtactgccgggatctcgccagcgccggggtgtttaagtggatcgtcgatctggaagaggagacccggcactactggtcgaaggataatacgctgttgtataaagagtgcctgatgcccccctga

SEQ ID NO: 136319 - DNA, 234 bp, Enterobacter cloacae
atgaaaaacatcatccctgattatcgcctggatatggtcggcgaaccctgcccgtatccggcggtcgctaccctggaggccatgccttccctgcaaaaaggcgagatcctagaagtggtcagcgactgtccgcagtcgatcaataacattccgcttgatgcaaggaaccacggctacacggtgctggatattcaacaggatggcccaaccattcgctatttgattcagaagtag

SEQ ID NO: 136320 - DNA, 1209 bp, Enterobacter cloacae
atgacatggcaatccttcaaacaggcctggcttatccggttctggtctcctgtcccggcggtcattgccgcgggcattctctctacctactattttggcatcaccggcaccttctgggcggtgaccggcgaattcacccgctggggtggtcagctgctgcagctgctgggcgtccacagcgaacagtggggctattaccagctgatacatctcgaagggtcgccgctgacccgcatcgatggcaggatgatcatcggcatgttcggcggctgcctggccgccgcgctgtgggcgaataacgtcaaactgcgcttgccacgcagccggatccgcattgcgcaggccgtggcgggcggcatcatcgccgggttcggcgcacggctggcgatgggctgcaacctggcggccttcttcaccggcattccgcagttctccctgcacgcctggctgtttgccatcgccaccgccatcggctcctggtttggcgcccgcttcacgctgctgcccctttttcgcatcccggtaaaaatgcaaaaagtgtccgccgcctcgcccttaacccaaaaaccgcagcaggcgcgccgccgcttccgcctggggatggtggtctttttcgccatgatcggctggggcctgctcaccgccgcagaccacccggcgctcggcctggcgatgctgtttggcattggctttggtctgcttatcgagcgcgcgcagatctgctttacctccgcctttcgcgatatgtggatcaccggccggacggtgatggcgaaggcgattatcttcggcatggcggcgagcgccatcggtatcttcagctatgtgcaattggggatggcgccgaaaattatgtgggccggtcctaatgcggcgattggcgggctactatttggctttggcatcgtgctggccggcggctgtgagaccggctggatgtaccgggcggtggagggccaggttcactactggtgggttgggctgggcaacgtcatcggctcaacgctgctcgcctggtgctgggacgatatcgccgccccgctcgccacccactggcagaaagtcaacctgctgaacgccttcggtccctttggcggactactggccacctatctactgctgctgatcgccctgctgctggtgatcgcctgggagagacattttttccgccgccaggcggcggtccggaccgtgaaggagagcgcatga

SEQ ID NO: 136321 - DNA, 354 bp, Enterobacter cloacae
gtgttagccactctcctcgttgcgctggtcgctattattcatctcgccatcctggtgctggagatgtttctctgggaagcccccgccgggcgccgggcctttaacctcagcgccgatttcgcccggcagacccgggtgctggcggccaaccagggcttgtataacggctttctggccgccggcctggcatgggggctgtggctgggggcgccgggggtacaggtggttatctttttcctggcctgcgtgctagccgccgggattttcggcgcgctgaccgccagccgcaaaattctctatattcaggcgctgcccgcgctgctggcgctggttgccgtgctgacgcaagcgtag

SEQ ID NO: 136322 - DNA, 519 bp, Enterobacter cloacae
atggtaaataaattatggattttgttatcagcgctactaatggttgccatgccgtcggcgcaggccggggaattaaacctctattcgatgaataccggttcctatgtctatcatatgacgggtaaccacggacaatataacgaacatttcaataacaactttttctcggtggagcgcaagttttctcaggattcaaaatacagcgtgctggtcggaacgatgaaaaacagctttgacgatcgctgcctgactctcggcgtgcgccgcgactggctgaaaaacgataccggctgggtactgaaaggggtgtatgcctataccggggaatttttctttgatgccttcagccactgtggggattccggcacctaccgcaccgccaaaaaaatcaccggcatcggtttttcgccctacctctatcatggcctgcaatataatttcaccgattatttcggtgtggaaggcgggattattgtgccggcgatctttgtgatgagtgttcagtggagctttcgctag

SEQ ID NO: 136323 - DNA, 204 bp, Enterobacter cloacae
atgaaaacctatgaccgtaatcgtaacgctattgctaccggcagcatggtaatgatcgccggtaacgggacgacgggcgtgattaaagctatccatggcgaggggaaaaccgctgagcagctgcgccgggcggactgcgttgaaatcgacggctgcgagggccgcttctgcccgttggatctgatccgtctcggcttccattaa

SEQ ID NO: 136324 - DNA, 876 bp, Enterobacter cloacae
atgagtcaagacgtcaccgcgaagatgttaaagcccgattttgatagtgaagtttccggcctggtgcatggctatttgtttcatgaacagcgccccccgcagccgatcgcctctggcgaggtctgcgcccgctatcaggcgctcgccgatgacaaggcgtttatctggttacacctgaatcttaatcatgccaccgccgagaaatggttaaccagccactttccggtggccgattttttcttcgaggagatccgcagcggctcgcacaccacccgcattgagcgacagggggaaaatctgttcgctgtgcttaacgatgtgctgtttcgtccgcaggataccagcgcggaaaccgccacgctgtggctctactgtagccccaggctggtggtgacggcgcgcttcaaaccgttgcggtttatcgaatggatgctgccgcgcttgcagacgctcagggtgaacacgtctactgagctgctggcctttctgctggaggagcaggaggaggtgctggagcaggtcgtccgccaggccagccgccatgttgaccttattgaagagcgtcttctgagcaatcacgtgcagcgcaaccgggccgatctggcgcggctacggcggatgcttttacgcttccagcggctgctggcgccggagccggcggcgatgttccggctgcttaaccggccgccggcgtggatggatcgcgcggtggtgcaggcgtttcgtcagttcaccgaagagtttagcgtggtgcttaacgatctgtcgggcctgatcgagcgcatcagtctgctgcaggaggagatcggcgcccgccagctggagcagagcaatcgcaccctctataccctgacggtgatcaccgtcagggtatag

SEQ ID NO: 136325 - DNA, 876 bp, Enterobacter cloacae; identical to SEQ ID NO: 136324

SEQ ID NO: 136326 - DNA, 204 bp, Enterobacter cloacae; identical to SEQ ID NO: 136323

SEQ ID NO: 136327 - DNA, 519 bp, Enterobacter cloacae; identical to SEQ ID NO: 136322

SEQ ID NO: 136328 - DNA, 354 bp, Enterobacter cloacae; identical to SEQ ID NO: 136321

SEQ ID NO: 136329 - DNA, 1209 bp, Enterobacter cloacae; identical to SEQ ID NO: 136320

SEQ ID NO: 136330 - DNA, 234 bp, Enterobacter cloacae; identical to SEQ ID NO: 136319

SEQ ID NO: 136331 - DNA, 393 bp, Enterobacter cloacae; identical to SEQ ID NO: 136318

SEQ ID NO: 136332 - DNA, 159 bp, Enterobacter cloacae; identical to SEQ ID NO: 136317

SEQ ID NO: 136333 - DNA, 675 bp, Enterobacter cloacae
  misc_feature (654)..(663): n is a, c, g, or t
atgagtaaacttgggattaatggatttggtcgtatcggacgtctggtgttacgtcgtttattagaagtcgacagcagcctggaagtggtggctatcaacgacctcacttcgccaaaggtgctggcctacctgttgaagcatgattcaaactacggccccttcccgtggagcgtcgactttaccgaagatgcgctgatcgtcaacggcaaaaccattacggtgtatgccgcaaaagaggcgcagcatattccatggcaggcggcaggcgccgaggtgattgtggagtgtaccgggttctacacctcggccgagaaatcgcaagcccatctccaggccggcgcgcgcaaagtgctgatttccgcccccgccggcgagatgaaaaccatcgtctacaacgtcaacgatgacaccctgaccccggatgacaccatcatctccgtggcctcctgcaccaccaactgcctggcgccgatggccaaagttctgcaggatgccttcggcatcaccgtaggcaccatgaccaccatccacgcctataccggcacccagtcgctggtggacgggccgcgcggaaaagatctgcgcgcctccagggcggcggcggaaaacgttatcccgcacactaccggcgcggcaaaagccattggcctggtnnnnnnnnnntccctgccctga

SEQ ID NO: 136334 - DNA, 264 bp, Enterobacter cloacae
gtgctggagaaaaaggtgactgcggatgaggtcaatcaggcgatgaggcaggcggctgagggcaatgaatcctttggttacactgaagaggagatcgtctcttccgatatcatcggcagccatttcggttcaatctacgatgctacccagctggagattgtagaggccggcggcgtacagctggtgaaaaccgtcgcctggtacgataacgaatacggctttgtcacccaactgatccgcgtgctggagaaatttgcccgctaa

SEQ ID NO: 136335 - DNA, 1440 bp, Enterobacter cloacae
atgacagcacccgttcaacacccgatgtatattgatggccagttcgtttccggtcgcggcgacggctggatcgacgtgcttaacccggcgaccgaagcgctgctgtcgcggatcccggacgggactgccgaagaggcgcggctggcgattgacgccgcagagcgcgcccagcccggctgggaagcgctgccggccattgagcgtgcgggctggctgcgcaaaattgccgccggtatccgccagcgtgccgacgagatcgccgggctgattgtcgctgaaggcggcaagatccagcagctggcggcggtggaggttgcgttcaccgcggactatctcgactatatggcagaatgggcgcgccgttacgaaggtgagatcgtgcagagcgatcgcccgggggagaatatccttgtctttaaacgcgcgctgggggtgaccaccgggatcctgccgtggaacttcccgttctttcttatcgcccgcaagctggcgccggccctgatcactggaaataccattgtcattaagcccagcgaatttacgcccaataatgccatcgcctttgccgagattgtccatcaggttgggttgccgaaaggggtctttaaccttgtgcttggccgcggagaaaccgttggccaggagctggccggcaatccgaaggtggcgatggtcagcatgaccggcagcgtggcggcgggagaaaaaattatggccgctgcggcgaaaaatatcaccaaagtgtgcctcgagctcggcggcaaagcgcctgccattgtaatggacgatgcggatctggagctggcggtgaaagcggtagtggactcgcgggtgattaacaccgggcaggtgtgtaactgcgtcgagcgggtctatgttcagcagggaatatacgaccgcttcgtcaaccgactcggtgaggcgatgaaggccgtccagtttggcgacccggcgacgcgagatgacatcgcgatggggccgctgatcaacgcggcggcgcgggaccaggtggcgggcaaagtggcgaaggcggtggcgcagggggcgcgggtggcgctgggcggtcagccgctggagggcaaaggctatttttatccgccgaccctgctgctggatgtacgtcaggagatggacattatccatgaggaaaccttcggtccggtgctgccggtggtggccttttcgaccctcgatgaggcgctggcgatggccaatgacagcgattatggcctgacctcctcaatctatacccgcgatctgaacgtggcgatgaaagcgattaagggactgaagtttggcgaaacctatatcaaccgtgagaactttgaggcgatgcaggggttccacgccggctggcgtaagtcggggatcggcggcgcagatggccgccacggcctgaatgagtacctgcagacccaggtggtctatctgcaggcctga

SEQ ID NO: 136336 - DNA, 693 bp, Enterobacter cloacae
atggcagaacaatttcctccgctgtcggcagcgacgctggcggcggctaaccaggtcggcgcctggctggcgcaggacgatctggcgacgctgcccgcgctgccgcaggtggacgtggtagtgctggccggcaacgccgtgatcccaaccatcgacgccgcctgccgtctggcggcggcgcaggcggtcccgctgctgatcagcggcggcgtgggacattctacgggctatctctacgagacggtgcgccaggatccccgttaccgtacgttgccggtggatggccgcccggaagcgcatgttctggccgacattgctcatgactactggcacatcccccattcgcggctggtggtggaggaccagtcaaccaactgcggtgagaacgcccgttttacccggaccacgctggagagccgggggctcgcccatcgtcgcgggatcgtcattcaggacccgactatgcagcggcgaaccatggctaccttcgcggggctctggccggtcacccgctacctggcgctgctgctgggcgagttgccgcgcctgcaggatacccctgaagggtacggtccgcggggaaaagacttcatcagccatgtcaccttcccgccggagatcctcgacgcctggcgacagctgcgggaggacgcccagcttgccggggcgctgcaggcccgcaccctcggctga

SEQ ID NO: 136337 - DNA, 1326 bp, Enterobacter cloacae
atgagcaatccacaagacaacactgcatccattctgcagaaaaacaagaaggtactgatcgcgagcctgacaggcagcgccatcgaatggttcgattattttctctatggcaccgccgccgcgctggtgttcaacaaaatcttctttccgatggtcgacccggttatcggcctgatcctctcctggctctccttctcgctgacgttttttatccgccccatcggcggcgtgattttcgcccatatcggcgatcgcatcggccgcaagaagacgctggtgctgaccctgtcgctgatggggagcgccacggtggcgatcggcctgctgcccacctacgagatggtgggcctctgggcgccggccctgctgattactctgcgcattattcagggtatgggtatcggcggcgaatggggcggcgcgctgctgctggcctatgaatacgcgccggaaaagcggaaaggctttttcggcagcattccccaggccggggtgaccatcggcatgttgatggcgacatttatcgtctcgctgatgacgctgttcgatgaggcgcagtttctcgcctggggctggcgcataccgttcctgctcagctccgtcctcgtttttctcggcctgtggatccgtaaagatatcgacgaaacgcccgcctttaagcaggtgaaaaaatccggccaggtggcgaaggccccgctgcgcgatacgctcaagcaccactggcgggaagtgctgatcgccgccggcctgaaagtggtggagaccgcccccttctatatcttctccacctttgtagtcagctacgccaccaccaccctgagctatcagaagtcgcaggcgctggaatccgtgaccctgggcgcgctggtggccaccgtgatgatcccgctgatggggctgctgtcagacaaggtgggtcggcaaaagatgtacaccctgagcgtggtgctgctggggctgtttatcgtcccgtggttcctgctgctcgacaccggcaccggctggggcatcatgctggcgacgatcgttgccttcggcatcctgtgggcgccggtaaccgcggtgctcggcaccctgtgctctgagattttcagcgccaatgtgcgctataccgggatcaccctcggctaccagttgggcgccgcgctggccgggggcaccgcgccgcttatcgccaccggtctgctggcaaaatatgacggggactggcggccggtggccgtttatctgggcgttacggtggtgatttcgctgctggcgatattctgcgccagccggatgaagtccgcgttgggcacggccccctcccgggcggaaagcgcctga

SEQ ID NO: 136338 - DNA, 1431 bp, Enterobacter cloacae
atgactgaacatcaacatcaggcgtcacctgccgccggaggtgaaggcgcgtcacagcttaagcgcgggctcagcgcccgccatatccagatgattgccctcggcggcgccatcggcaccgggctgtttatgggggcggggcgcaacatcgccgtcgccggcacctcgatcctggttatctatgtgctggtcgggttctttacctatatggtgatgcgggcgatgggggagctgctgctcacccgccatgactaccgctcgtttgccgactttgtcggcgagtatctcgggccgcaggccagcttttacctcggctggacctactggctaagctgggtggtgacctgtatcgccgacgtggtggtctgcgggagctatatgcagtactggttcccggaactgtcggcgtggatgccggccctcagcatgctggcgatcctgttcctgcttaacctgctgtcggtgaaaatgtttggcgaggcggagttctggttcgccctgatcaaggtgatcaccattatcgccctgatcggcaccggcggctggatgattgccaccggctggacctccccggacggcgtgacggcctccctcagccatctcaccgacccgacggcctttatgccccacggcatcaccggctttttcgccggcttccagatagcgatcttctcctttaccggcattgagctgctgggcaccatgacggcggagacccgcgatccgcagcgcattttgcccaaggcgatcaatgctctgccgctgcggattatcatcttctatctgctgtcgatggtggtgatcatcgctgtcgcctcgtggcctggggtgtcggcggagaccagccccttcgtgacgctgtttgccaaggccgggctgcctgccgccgcggcggtgattaactttgtggcgctgacctcggcgatgtcctcggccaacagcggggtcttctccagcacccgcatgctgtacggcctgtcggtggagaagcatgcgcactggcagtttcgtatcctgtcgcgcagtacccgcattccggtgcgcagcctgctgttctcctgcttctgcatgctgatcggcacgctgttgctgtttctggtgccgaacgtgatgaccctgttcaccatcgtctcgacccttgcggcgattatggtggtgttcagctgggggatgatcctcgtggcctatctggtttaccgccgtcagcgtccggacctgcacgccgggtcgatctttaagatgcccgccggggtggtgatgagctgggtgagcctgctgttcttcgcgttcgctatcttcatcatgatctttgacccggacacgctgctggcgctgttggcttctccgctgtggtttatcgcgctgtggggcttctggaagctgaagcagcggcgcgaggggcagcttcagctggacaaccagagcgcctga

SEQ ID NO: 136339 - DNA, 996 bp, Enterobacter cloacae
atggagcacctggttaacgatttactgcactgccgcctgcaggcgtggacctttccggcgggcatcgaggcccgctggctgggcgagggcattttacagctgctgccgacggcgccgtggcgccaggcgacgatcctctccgccggcgtgcatggcaatgagaccgcgccgattgaactgctgctgcagctaacccacgatctgagccaggggcggcagccgctcacgcaggcgctgctgatcgtctttggtaatctgccggcgatccgcgccgcgcgccgctatctgcataacgacctgaatcgcctgttcggcggccgccatctggcggtcaccccgggaaatgagtcgcggcgggcttttgcgctggagcaggcggtgcaggctttttatcgcgccgccgatgcggcggggccggtcaaccgtggtcatctcgatatgcacaccgccattcgcggatcgctgtatcgccagtttgcgctgctcccggcccacgccggggatttttcgcccgatttctatcagctgctgcaggccagcgggatggacgccgtcgtgcgccataccgaagcgggcggcaccttcacccatttcacctgcgaaaagttcgccgcgcaaagcgccaccctggagctggggaaagtgatgccgttcggcgccaacgatctcagcctgttcgccgccgccgacgcggcgatccgggcctggatcgctgacgcgccgctgccgccgcgcgacaaagcgccggtggactacttcctggtcgaggagagcatcatcaagcgcgagggggaatttacgcttaatctcgcggcagacgttgaaaacttcaccgcgctcccggcagggtatgagatcgcccgccaggcagagaaacgttgggtggtgcaggcccgggccccctatatcctctttcccaacgccggggtcgccaccggccagcgcgccgggctgttgctccgcgccgctgcccttcgtctcccgcaaccagcctga

SEQ ID NO: 136340 - DNA, 1341 bp, Enterobacter cloacae
atgtctggttttgaagcaaactttgatggcctggtcggcccgacgcaccactacgccggactctccgtcggcaatgaagcctcgcaaaataaccgcgatggtctctctaaccctaaaaaggcggcgctgcaggggctgtataaaatgaaagccctggccgatcgcggcttcgtgcagggcattctgccgccgcagccgcggccgaatctgcgtctgctgcgtgaagtgggtttccagggcagcgatgagcaggttatccggcaggcggcccacgcggcgccgcagctgctctccgccttcagctccgcctcgtcgatgtggaccgccaacgcggcgaccgtctcaccgtcggcggacagcgccgatggcaaagtccatttcaccgtcgccaacctgaacaataagctgcaccgtatgcaggaggcgcccaccacctcggcgatccttggcgccacgttcgccgatccgcgctactttgcccaccatgcggcgctgccgcagcatggcgacctcggcgatgaaggggcggccaaccataaccgcttctgccgggaatatgaccggcagggggtgcagtttttcgtctatggtcgacgcgccagcggcggtatcgccccggtgaagtatccggcgcggcagaccctcgaggccagcgaagcggtggcccgcctgcatcagctggatccgcgctacacggtgtttgcccagcaagcgccgcaggctatcgatcgcggcgtgtttcataacgacgtcatcgcggtcagcaatcgccatgtgctgttccaccatcagcaggcgtttgtcgatcaggctacagtgctggccacgctgcgggctaaaagcgacagtctggatatcccgttcaccagcgtggaagtgccggacgagcgggtttcgctcgacgacgccgtggcctcatacctgttcaacagccagctgctgagcaaaccagacggcaagatgctgatcgtggtgccggaggagtgccgccagcgggaaaacgtctggcgctatctcagcgatctcgccgccgatagcgcatcgccgatcgatgaagtggcggtctttgacctgcgggaaagcatgcgcaacggcggcggcccggcctgtctgcggctgcgagtggtgctcaacgaggcggagcgccaggcggtcaacgcccatagcctgatgaacgacgaacgttatcagcagctgacggcatgggtggaaaaacactatcgcgaccggctgcatgcccgcgatctggcggacccgcagctgctgcgcgaggtttatcaggcgctggatgagctgacgcagatcctgcgcctcggcgcggtctatgattttcagcgttaa

SEQ ID NO: 136341 - DNA, 1047 bp, Enterobacter cloacae
atggcggtctttggcccctacaacttcccgggccacctgcccaacggacatatcattccggcgctgatcgccgggaacaccattgtgtttaaacccagcgagctgacgccggctaccgctgaaatgaccgtccagctgtggcagcaggcgggcatccccgacggggcgatcaacctgctgcagggcggaaaagccaccggccaggcgctgctggaaaatcgtgatatcgacggcgtgctgttcaccggcagcgcggcggccggtttccacttccatcgctacttcggcggccagccggagaagatgctggccctcgagatgggcggcaacaacgcactgatcgtcgccgacgcggccgatatcgatgcggcgctgcatgtgattatccagtcggcgtttatctctgccgggcagcgctgcacctgcgcgcgccggctgatcgtgccgcgcggcgagcagggggatgcgctgctgcagcggctggtagaggccagcgcgcagatccgcgccggcaagtgggatgatcagccggcgccgtttatgggcggggtgatctctctcgacgctgcgcagaacatgctggcggcgcagcaaaaactggaggggctcggcggcaaggtgctgctgcgcatgcgccagcctgacccgcgctccacggtgctgaccccggggatcgtcgacgtcaccggtattgaggtgccggatgaagagtactttggcccgctgctgacgattatccgttacgacggcttcccggaggcgattcgcctcgccaatcagacccgctatggcctggccgtcgggctgatctccagcgatgcggcgcagtttgatcagctggcggacgaggcgcgagccgggatcgtcaactggaacaagccgctgaccggcgcatcgagtaaagcgccgtttggcggggtgggcgcctccggcaaccatcgcgcggcagcgtggtatgccgccgataactgtgcctggccgatggcctctctggtcagcgatacgctgacgcttccggcgacggtatcgccgggcctgccattctga

SEQ ID NO: 136342 - DNA, 408 bp, Enterobacter cloacae
  misc_feature (349)..(358): n is a, c, g, or t
atggcggtaaaagcacagtttatagccgggcagtggctgccaggcagcggcgcaacgatgagcaaactggccccggaggatcagtcgctgctgtggcaggcggccagcgcgggggctgacgacgtccaggcggcctgcgccgcggcgcgcgcggcgttttatccctggtcgcaccggccgctggccgagcgtattgacgtcgtacagcgttttgccgcgctgctggagacgcataaagaggcgctggcgaccctgatttcccgcgagaccagcaagccgctgtgggagacccgcaccgaagtgcaggcgatgatcggcaaggccgcgatctccatcgaagcctatcacnnnnnnnnnngacgctgccggacggtaaagcgctgctgcgccacaaaccgcacggcgtga

SEQ ID NO: 136343 - DNA, 1023 bp, Enterobacter cloacae
atgctatttcgtcccgtacgggaaaacgatctcgacgacatcgtccgcctcgccgcgcgggcgggggtcggcatgacctccttaccgcatgacgtcgggcgtctggcggcccggatccggcgcagtatcgagaccttcgccggcgaactgccgcgcagccagcagggtttcctgtttgtgctggaggacaccgcgctggcgcgggtggtgggggtgagcgccattgaggtcgcagtgggcctggacgagccgttttacaattttcgcattcagaaaacggtgcgcgcctcgaaagcgctgggagtctataagccccaggagctgcttaatctcagctatgaccacaccgggcatagtgagctatgtacgctgtttctcgacccggcgtatcagcgcaaccgcaatggtctgctgctctccaaggcgcgctttttatttatcgccgcctttcgcgagtggttctccccgcacctgtttgccgaactgcgcggctgcagcgatgagcagggacagtcgccgttctgggatgcgctgggccatcatttcttcgacatcccgttcgccgatgccgaccggctgaccggcaccggcatgaaaacctttattgccgaactgatgccggcgtacccgatctatatctcactgctgccggaagcggcccgcggggtcatcggtcaggtgcatcccaataccgccccggcgcgggcgatcctcgagaaagagggtttcagctggcgcggctcggtggatattttcgatgccggtccggtgctggaggcggacaccgatcagatccgcgccgtgcgcgacagccagcgcctgcctgtccggcagctgatgggcgacctgccggcgccgaccctcgtcgccaacggtcaattcgacaactttcgggcgctgctggtggcccacgaagagcaggtctcgcttgacagcgccgcgctggacgcgctgcaggtcagtgaaaccgaccgcgtttatacggtaaccctgaatccagaggacaacagatcatggcggtaa

SEQ ID NO: 136344 - DNA, 1206 bp, Enterobacter cloacae
atgtcaggctgtatgactcgcgaagattttgacgcttacctggttccctgttttgctcccgcgccgtttattccggtcagagcggcgggctcccgcgtctgggaccagcaggggaaagagtatatcgatatggcgggcggcatcgcagtgaacgccctgggccatgctcacccggcgctggctcaggccctgcaggatcaactggcgaaactgtggcatatcggcaatggctataccaacgagccggtgctgcagctggcgaaaaccctcgtgaagtcgacctttgccgacaaggtgtttttctgcaactccggcgccgaagccaacgaggcggcccttaagttagcgcggaaatatgcccacgataagtttggcggtgaaaaaagcgaaatcatcgccttcaaccacgccttccacggccgcacgctgttcaccgtctccgttggcggccagccgaaatattccagcgattatgctccgctgccgcagggcattacccatctgccctataacgatatcgaggcggtcaccgcggcgatctcctcgcgcacctgcgcggtgatcgtcgagccgattatcggcgaaggcggggtgatcccggcggacccggcgttcctgcaggcgctgcgtaccctctgcgatcgccatcatgccaccctgatattcgatgaggtgcagaccggcgccgggcgtaccggccatctctacgcctaccagcattacaacgtcgtcccggacattctcaccagcgccaaagggctggggggcggcttcccgatcggcgcgatgctggcgaaagaggcctgggcgcaggtcttccagccaggcacccatggcaccaccttcggcggcaacccgctggcggcaaccgtcgctaacgccgtgctggcccatctcgatgcgccgctgctggcgggcgttggcgagcgccatgcgctgatcgttgaccagttgaatgcgatctctgcccgttacgatgcgttcagcgccgtgcgcggcaccggtctgctgatcggcgctgagctggcggggccgctgcgcggcaaggccaaaacgttgaccaacctggcggcggaagaggggctgatcgccctgattgccggcccggacgtgctgcgcttcgcgccggcgctcaatatcccgctggcggatattgcggaagccttcgtgcgccttgatcgcgccgttgctcgcttaacccgctaa

SEQ ID NO: 136345 - DNA, 795 bp, Enterobacter cloacae
gtgagttacgaaattaaaattgggcaaagaagcattgctatcactgataacgtttctgaagtggttgcgcctaatgagcagatggcgattctttttaaagggatggcgaatatttttggtgatctgcgggccgtggcaatgttagctgaggcggaagccgatgccgtagaggttatccgcaatgatccggatttaaacgaagcagcaaaaaaccgccgggccagagatgcggcaaatagagacacactcacggctttcactagaagtacggcgatgatcagcgaacaagctgaaaatattctcaattatcttaagaccaaactggccccagttgctccgttggccgagggtgatgttgtcggatttatgcgagatagtgagctacggaatgtatttcgctcgctggatggagctgcgaaagaaaagctgatggtagcaatgtatgccgggaatcagactgatttatgtgacgccctgctacgaggtaacgccatttgctcaggcgtaacagattctcagctggagcgactgacttttgcccgtatcgccacagataacggagccgttatcaaatctgtttctaacctggtaaaagccattaaccgcaacctgcagcaaatcatcgctgttcgcacatggtatgcaaatctggtatttggaagcaatgacgaccctcgcgatgtggctcctcgagtctccgggctggcgaatctgtccgagtacattgatggtatggaaaaaattaattcccgacagggtaaagcagatgatgaagatgggaaacaggccgcctga

SEQ ID NO: 136346 - DNA, 174 bp, Enterobacter cloacae; identical to SEQ ID NO: 39930

SEQ ID NO: 136347 - DNA, 165 bp, Enterobacter cloacae
atgttttataagcaatttatagcctttatgaacaccatgtataccttgagggcaaattctttaaaacgcatccattcatttcacgttgtgcatcccctcgatttcattaccatcatttcattacttgcaatgattgttgtgattgttgcgttttttatcatgtga

SEQ ID NO: 136348 - DNA, 591 bp, Enterobacter cloacae; identical to SEQ ID NO: 39921

SEQ ID NO: 136349 - DNA, 1254 bp, Enterobacter cloacae
atgctggaacaaatgggcattgccgccaaagcggcctcctggcagctagcgttactctccagccgggaaaagaatcaggtactggaaaagatcgccgattatctggaagcgcagaccgacgatattctgcgcgccaacgcggaagatttagccgaagctcgcgccaatggcctgagtgaagcgatgctcgatcgcctcgcgctgaccccggcgcgtctgagcggcatcgccagcgatgtgcgccaggtgtgcaatctggccgatccggtcggccaggtgatcgacggcgggctgctggacagcggtctgcgtattgaacgtcgccgcgtcccgctgggggtgattggcgtgatttatgaagcgcgtcctaacgtgacggtcgacgtcgcctccctgtgtctgaaaaccggcaacgcggcgatcctgcgcggcgggaaagagacctggcgcaccaacgccgccacggtgaaggtgatccagcaggcgctgcaggagtgcggtctgccggccgccgcggtacaggctatcgagagcccggatcgcgcgctggtgggcgaaatgctgaagatggataaatacatcgatatgctgatccctcgcggcggcgcgggcctgcacaagctgtgccgtgagcagtcaacgatcccggtgatcaccggtgggattggcgtgtgccatatcttcgtggatgaaaccgccgagatcgcccccgcgctgaagatcatcgtcaacgccaagacccagcggccgagcacctgcaataccgtggaaacgctgctggtgcaccgcaacatcgccgataccttcctgccggcgttgagcaagcagatggccgagagcggcgtcaccctgcacgccgccccttccgccctccccgcgctgcaaaacggcccagcgaaggtcgagccggtgaaagcggagcagtatgacgacgagtatctgtcgctggatctgaacgtcaaagtggtggctgatatggacgaggctatcgcccatatccgcgaacatggcacccagcactccgacgccatcctgacccgcaccctgcgtaacgccaaccgctttatcaatgaagtggactcttccgcggtatatgtgaacgcctccacgcgcttcaccgacggcggccagttcggcctcggcgcggaagtggcggtcagcacccagaagctgcacgcccgcggcccgatggggctggaagcgttaaccacctataaatggattggtttcggcgacgataccattcgtgcgtaa

SEQ ID NO: 136350 - DNA, 1104 bp, Enterobacter cloacae
atgagtgaaagccagacgctggtggtaaaactgggcaccagtgttttaacaggcgggtcccgtcgcctgaaccgcgcccatatcgtcgagcttgtgcgccagtgcgcacagttgcacgccatgggacaccgtattgtcatcgtgacctccggggccattgccgccgggcgcgagcaccttggttacccggaactgcccgccaccatcgcctccaagcagctgctggcggcggtgggacaaagccgtctgatccagctgtgggaacagctgttttctatctatggcattcacgttggccagatgctgctgacccgcgccgacatggaagacagagaacggttcctcaacgcccgcgacactctgcgcgcgctgctggataacagcatcgtcccggtcattaacgaaaacgacgccgtcgccaccgcggaaatcaaagtgggcgataacgacaatctctccgcgctggccgcgatcctcgccggggcggataagctgctgctgttaaccgaccagccaggcctgttcaccgccgacccgcgcagcaacccgcaggcggagctgattaaagacgtctacggcatcgacgacgcgctgcgcgccatcgccggcgatagcgtctccggactcggcaccggcggcatgggcaccaagctgcaggccgcggacgtcgcctgccgggcggggattgataccatcatcgccgccgggaaccgtccggacgtcatcggccatgccatggcaggcctgccggtaggtacctgcttccacgcccaggagtctccgctggagaaccgtaagcgctggatcttcggcgcgccgccggcgggggaaatcaccgtcgatgcgggcgcgacccaggcgatcctcgaaagaggcagctcgctattgccaaaagggatcaaaatcgtcagcggcaacttctcccgcggcgaagtgatccgcatccgcaatagcgaaggacgcgacatcgctcacggcgtcagccgctacaacagcgatgcgctgcgccttatcgccggccagcactcgcagcaaatcgatgccattctgggctatgaatacggcccggtggccgtccaccgcgatgatatgatcatccgttaa

SEQ ID NO: 136351 - DNA, 1053 bp, Enterobacter cloacae
atgaaaaagagtactctggcattaatgatgatgggctttgtggcttcaacagcgacgcaggcagcggaagtttataataagaacgcgaacaagctggatgtgtacggcaagatcaaagccatgcactatttcagcgactatgacagcaaggatggcgatcagacctacgtgcgtttcggtattaaaggcgaaacgcagattaacgacgacctgaccggctatggccgttgggaatctgaattctccggtaacaaaaccgagagcgactccagccagaaaacccgtctggcgttcgccggcgtgaagctgaagaactacggctccttcgattacggtcgtaaccttggcgccctgtacgacgtggaagcctggaccgatatgttcccggaattcggcggcgattcctctgcccagaccgataactttatgaccaagcgcgccagcggcctggcgacctaccgcaacaccgacttcttcggtctggtggatggcctggatctgaccctgcagtaccagggtaaaaacgaaggccgtgaagcgaagaaacagaacggcgacggcgtcggcacctcgttaagctatgatttcggcggcagcgacttcgccgtcagcgcagcctacaccagctccgaccgtaccaacgatcagaacctgctggcccgcggccagggttcgaaagcggaagcctgggcgaccggcctgaaatatgacgccaacaatatctacctggcgaccatgtactctgaaacccgcaaaatgaccccgatcagcggcggctttgccaacaaagcgcagaactttgaagcggtggcgcagtatcagttcgacttcggtctgcgtccgtccctcggctatgtgctgtcgaaagggaaggatatcgaaggggtggggagtgaggatctggttaactacattgacgtgggcctgacctactacttcaacaaaaacatgaacgccttcgtggattacaaaatcaaccagctgaaaagcgataacaaactcggcatcaacgatgacgacatcgtcgcgctgggtatgacctaccagttctga

SEQ ID NO: 136352 - DNA, 462 bp, Enterobacter cloacae
atgaccattgacggcggatcggacgatctgatcccggtggtagcggccctgcatgatcagatgcacacctggcagggaaccccctatgaatggggcggtactgaacaaagcggcgtcgactgctcgggtttcgtctggcgcacgctgaaggatcgctttaacctgccgatggagcggatcaccacccgcgagctgctgcacatgggcgtgcgggtcaataagcgggatttacgtcccggcgatctggtgttcttccgcacccgggccgggatgcacgttggcttttacgataccgatcataatttccttcacgcctcgagcagccagggcgtgatgcgctcttcgttggacaacccttactgggaatcggcgttctatcaggcgcgtcgtctgccgaaggagtataacgcgcagatcaccatgaacagcgacaccctgcatctggcgaagaatcgccgctaa

SEQ ID NO: 136353 - DNA, 870 bp, Enterobacter cloacae
atgcacgttcgctattctctgctcgcctcgcaggcgacaacggccctttttgtgctgctgtggggcagcgcggccatcttcacccgctggggactggataacgcctcgccgatggcgctgctggtctttcgttttctggttgccctggtcgcgctggcgccgctggctatcgtccgtcggcgctggctgcccgcgccgggcacccgcctgcaaacagcggccaccggtctgatgctgattggcggctattcggtctgttacttcgaggcgatggccaacggcgtgacgccgggacttatcgccaccatcatggggatccagcccatccttacgctttgcgtggtggagcgccgcctgcaggggcggcggctgtcaggactgctgcttgccctggcggggctggtgctgctggtgtggcgcagcctggcggcctcgccgatggcgacggcggggatcctgtttgcgctggcggcgctgctgctgatgacctttggcgcgctgtggcaaaagcgcagccgtcaggcgccggcggatgtcctgccgctgcagtatgccgttagtctggggctgtgcctgctgattgccccggtcagcggcttccggtttaccgttaacgccgggttgattattccggtgctgtttctcggactgctgatttcggtggtcgcccagctactgctgtaccgtctgctgagcgcgggaaatatcgtcaatgtcaccagcctcttttatctggtgccagcgatcacggcgctgctggattatctgctgctgggcaaccggctgccggcggcggcgatgatcggtatgatggcgatcgtcggcgggatcgtgctggtgttccgcacagcgaaggtccgcgccggctga

SEQ ID NO: 136354 - DNA, 666 bp, Enterobacter cloacae
atgggcaacacgctgacgatttttgatctcgataacaccctgatacagggcgatagcagtacggtctggagccagtttatggttcgcgaagggctggcgacgcagaaggggtatcttgcccgcgaggcgcggctaatggcggattatgaccggggagagatgaatatcgccgattatgtggccctgatccaggcgccgctggccggaataccgaagtcggacgttggcgcgctggtggcccgctgcgtgcgcgaggcgatcctgctccgggtctatccgcaggcgtgggagctcattcgtcgtctgcgggccgagggagagcagatgctgattatctccgcctcggttagcctgctggtgcaggcggtggccgccgcgctggagatcgatcaggcgctgggtattgacgtggcgatggtcgacggcggctacagcggtgaaatcaccgggatccccagctatcagcaggggaaggtggcgcgtctggcgcagtggcgcgaggcgcatccgcagtatgacggcgaggtgacgttctataccgattccattaacgatctgccgctgtgcctgcatgcggatcgcgtgcggctggtcaatccctgtccgcagctgcaggcggccggtgccggatacggctggccggtgctgagctggcggctggaatag

SEQ ID NO: 136355 - DNA, 792 bp, Enterobacter cloacae
atgacttcagaagccgtatttatccaggtcggcgcgctggccgatggttttgcgccgcacggtaacctgctggctaccgccagcctgcccgcaggcgaaaactttaccttttatgtcgccgggagcgagccgcagcagctggttatcgaagatgagcagacgctaagctggaacggcaagcgcgccccctggcgggcgaccgccctgcgcccggacattctgtttatcgacttccttgacccggagcgggataacgccagcattagcgcggtatgcaacctgacgcagcgcaatgccacgctggtatacggccagctaccggacgaagccgccgcgcggctggacgccttcagccgggtagaacaagggttgccgctgaccgccgtcgaggcccgtttcgtcttcgcccgactggatgcccagccggggacgttgccgggctttaccaccgcgctggtcggcatgcgcaatcagtacacctacagcccgaccgagcgctatgagcacatctatctcaacgacaatttttacgcctggcagtgtctggacggcgtggaaaaggggctggcggatgtcgatcgctgccattacgtgcaggtggctgaggatctctatttgttcgtctggcgggagaaaatcatccccacgctgggggtgatcctcatcgatctgcagcagatgcgcactgacggcaagatcatgggctatcagggcagcgatttcggcgccctcagcaatttcccggtcggcgccagcgcgaagatcctcaacgtcacccgccatcaggaatag

SEQ ID NO: 136356 - DNA, 777 bp, Enterobacter cloacae
atggcgagagtcgtggtgataaccggcggtggaaccggaattggcgccgcctgcgcgcggctgatgcgcgccgcgggcgaccgggtgtttattaccggacggcgcgaagcgccgctgcaggctgtcgccgatgagaccggcgccacggcgctggtgggcgatgccgccgacggcgaggtgtggcgccagcggctgctaccggccatcctcgaccagaccggcgggattgatgccctcatctgcagcgccggcgggatgggcaacagccccgccgccgagaccagcgaccgccaatggcgcgaggcgctggacggcaatctcaccagcgccttcgccagcgttcgcgcctgtctgccttcgctgattgcccgccgcggcaatgtgctgtttgtcgcctccatcgcctctctggccgccgggccgcaggcctgtggctatgtcaccgccaaacacgcgttaattggcctgatgcgctccatcgcccgcgattacggcccacagggcgtccgcgccaatgcgatttgtcccggctgggtcaccactccgatggcggatgaagagatgatcccactgatgcaggaacacgggctgtcgcttaccgaagcctatcaacgggtgtgccgcgacgttccgctacgccgccccgccagccccgaggagatagcccaggcctgtcagtttctctgctctccgcaggccgccatcatcagcggcgcgacgctggtcgccgacggcggggccagtatcgtcgatgttcccactctggcgtttgcctaa

SEQ ID NO: 136357 - DNA, 1734 bp, Enterobacter cloacae
gtgaacaaaaaagccatggccgcggcggtcagcatgatcctcgccggtggcgcgcacgccgcgcagcaggagcgtccaaacgtcatcgtgattatcgccgatgatatgggctactcggacatcagcccctttggcggcgagatccccacccccaatctgcaggcgatggccgagcagggaatgcgcatgagccagtattacacctcgccgatgtcggccccggcgcgctcaatgctgctcaccggcaacagtaaccagcaggctgggatgggcggcatgtggtggtacgacagcaccattggcaaggagggctacgagctgcggctgaccgaccgcgtcaccaccatggccgagcgctttaaagacgcggggtataacaccctgatggccggtaaatggcacctcggttttgttcccggcgccacgccgaaagatcgcggctttaatcacgccttcgcctttatgggcggcggcaccagccactttaacgacgcgataccgctggggaccgttgaagccttccacacctactacacccgcgacggcgagcgcgtctccctaccggatgatttttactccagcgaagcctacgcccgccagatgaacagctggattaaagcgacgccgaaggaacagccggtcttcgcctggctggccttcaccgcccctcatgatcccctgcaggcgccggacgagtggattaagcgcttcaaaggccagtatgagcagggttacgccgaggtctatcgccagcgcatcgcccgcctgaaagcgctgggaattatccatgacgataccccgctgccgcatctcgagctggataaagagtgggaggcgctaacgccagagcagcagaaatatacggcgaaagtgatgcaggtgtatgcggcgatgatcgccaatatggacgcgcaaatcggcaccctgatggagacgctgaaacaaaccgggcgcgataaaaataccctgctggtctttttaaccgataacggcgccaacccggcgcagggtttctactacgaatctaccccggaattctggaagcagttcgataacagctatgacaacgtcggccgcaaaggatcatttgtctcctacggcccgcactgggccaacgtcagcaacgccccctacgccaattatcacaaaaccaccagcgcccagggcggcatcaataccgactttatgatctccggtcccgggatcacccgccacggtaaaatcgacgcctcgacgatggcggtgtatgacgtggcgccgacgctatatgagttcgccggcatcgatccgaacaagtcgctggcgaagaaaccggtgttgccgatgatcggcgtcagctttaagcgctatctcaccggcgaagtacaggagccgccgcgcggcaactacggggttgaactgcatcatcaggcggcctgggtcgatggcgaatggaagctgcgacggctggtgccgcgcggcctcaccgccggcgacgcgccgtggcagctgtttaatctgcacgacgacccgctggagacgcatgatgtcgcggccgaacatcccgatcgggtcaaagccatgagcgaggcctacgaggcatttgctaagcgcaccatggttaccaaagcgcagggcaaaatgatcgactacgtcggtatcgatagcaaaaccgggcgctatctggcggtcgaccccgccaccatgaagccggtgcctgcgccgcaggcgatccctgtgagcgagatccattaa

SEQ ID NO: 136358 - DNA, 1188 bp, Enterobacter cloacae
atgctgaatatcgccgccctgcgccagcagcaaattccgctggccgctgagccgcgctcgccggtgccgtttcatattctgatgaagccgattggccccgcctgcaatctcgcctgccgctattgctattacccgcaggacgaaacgccggtcaacaagatggaggatgcgcggctggagcagtttatccgccgctatattgccgcccagcccgccggcgcgcgggaaatcaactttgtctggcaggggggcgagccgctgctggccggcctgagcttctacaaaaaagcgctcgccctgcaggcgcgctatgcccccgacggcgtgactatcagcaacagcctgcagaccaacgggacgctgatcaacgacgcatggtgccgactgttccgcgaacatggctttattatcgggttgagcctcgaaggcaacgaagcgctgcaggactaccatcgtccggataaacgcggccggtcgacctggtcggcggcgctgcgcggcattgacctgctccatcagcatcaagtggactttaatctgctggtggtggtgcataacgagatggcggcccacgcggcggcgatttatgaccggctggtcagcctcggcgcgcgctatctgcagtttcagccgctgatgagcgaaggcgcggccctgcgcgaaggataccagctcagcgccgataactggggacgttttatggtcggcatctggcggcagtggcggaagcgctgcgatagggggcgggtgttcgttatcaatatcgaacaggcgtgggcgcagtatttcactcataccagcggcagctgcgtgcacagcccccgctgcggcagcaacctggtgatggagcccgacggacagctctacgcctgcgaccacctgatcaacgccgaacatcggctgggccgcctcgatgagcagacgctcgccgccgcggtcgacgcctcggtgcaactgcctttcggtcagcagaaaagtctgcgccgcgaatgccagacttgctcggtaaaaatggtctgccagggcggctgcccggcgcatctcaacgccgcaggcaacaaccgcctctgcggcggctactaccgcttctttagcgacatcctcgcgccagtacgccccttttcccgcgaccttaatggcctgaaggcctggcgggccgcgtttgttgggactgcgcatactgcgtag

SEQ ID NO: 136359 - DNA, 684 bp, Enterobacter cloacae
atgtctgctttgttaaaagccagccgtaatgatgcgataatagcccgttgtttacagactatttcccagttaattccactaacttcagcggtgttttatcgagtaaataatcgtttaaaacccgaaaactatatattgcataatatttccgataatacgcaccaacaatatctggaaaacttccagccgctggatccgctgctgccgtcgcactttagccaccagaacaccaccgtggcggcgatgacgccgcggctctgcgaccgcaaccggcattactatcatgaatttatgttgccgaataacgtgcgcgacatgaccgagatctttatccgccgcgagcggcggatcgtcgccggtatctcgctgatgcgcgacgtgcctttctccagcgaagagcgccagcgggcccaggcggtgctgccgctggtagagctggccattcgcgactgcctgcaggaagaagatgatctgcccgccatcctgacggcgaaagagcgggaaatcgtcggcatggtgcgcgaaggcgccagcaataagctgattgcccgccagctggatatctcgctctcgacggtaaaaacgcacctgcgcaatattttcgccaagaccgaagtggtcaatcgtaccgaactggtttcccgaacctggatgccggccgctcagcgtacgctgcatctgtaa

SEQ ID NO: 136360 - DNA, 1173 bp, Enterobacter cloacae
atgtcgagtacacctctcactgaaaatgcgctttcccggcccgccgggctggtggtgtccctgcgtttgctggcggcgatcgtgatttttgccgctattgcgccgggtattctgatgaccgcgccggcggtggcggcgcagctggccagggaatggcagctaaaacccgggcagatcggctggctgttctcagcggagctgggggcgatgagcctggcgacgctcccggcgtggtggtggatgagccgcctcgactggcggcgggttgccctgacggccgggatggtgtttctggccgccaacctcgcctcggcggtggtcacccagtatgagacgctgctggcggcgcgctttatcgcctcgctggcgggcggcacgttgatgattttgtgcatcagctgcgcggccggaacgccgaacccgtcgcgggtctacgccttctgggtgctcgggcaactgctgttagggatgcttggcctgctggcgctgcccggcctgttcgcgacctttggcctgaaggtggtgtatctgatcctcgccgccatcatgctctgctgtttgccgctggtatccgctttccctccgcgctttcaaccgctttcagtctcccgccagcagccgtcgacggcgctgtggcgtcaggcgctggcggtgctggcggtgctcactttctatatcagccttagcgccgtgtggacctttatcggcaccatcggcagcgcggcggggctgagcccgacgcaggtcggtctggtgctggcggcggcgacggtttgcggcattatcggcgccggcggcgcggccctgcgcggcacccggcgggccgatcgtttaccggtgtggctgggctacggcctgttgatcgtcagcgttgggctgctgatcggccagccgctgctggtgcgttacgccatcgcggcgctgctgtttaagttcacctggaccttcgtgctgccctttattctcgcccgcgtggccgggctcgataacagcggtcggctaatgaacagcatcaatctggtgatcggcggcggcatggcggctggcccggcgcttgcgggggccttactgcaacacttcgccagcgccgacccgctgctggcggcggcaggcgtctgcgcgctgctgtcactgattttaattgtggcggcgtccgccgccgggaaggcttag

SEQ ID NO: 136361 - DNA, 498 bp, Enterobacter cloacae
atgctgaaaacggacatgattgacaaactcaatgaacagatgaatcttgaactctattcttctcttctttatcagcagatgagcgcctggtgcagttaccacagttttgaaggcgccgcggccttcctgcgtcgccatgctcaggaagagatgacccatatgcagcgcctgttcgactatctaaccgacaccggcagcctgccgcggatcaacgctatcgcctccccgtttgccgaatatgcctcactcgacgagctgttccgccagacctacgagcatgagcagctgatcacgcaaaaaataaatgaactggcgcacgcggccatgaccagccaggattacccgacctttaatttcctgcagtggtatgttgctgaacagcatgaagaagagaaattatttaaatcggtgatcgataaactgaccctcgctggaaaaagcggcgaaggtctgtactttatcgataaagagctggctaccctcgacgcgcagaattaa

SEQ ID NO: 136362 - DNA, 240 bp, Enterobacter cloacae
atgtcttctattcatggtcatgaagttttacagatgatgctcgcctcgggtgaatcctggacggtcgcctcgctggaggccgccattcgccgccgctttggcgaagaggcgcggtttcacacctgttcagcagagaatctaagcgccgcacagctggtggcgtttttagagaaaaaaggcaaatttattgccagagaggaaggttttactaccgcagaaaataagatctgccgacattaa

SEQ ID NO: 136363 - DNA, 1143 bp, Enterobacter cloacae
atgccattggccgccgcaggcgtcggctttaccgtcacgttgggtttacttttcaccttgtgggcattgatgtgctataccgcccttttgctgctggaagtctaccagcatgtccctgccgatatggggctcggttctctggcggcgcgctatctgggccgttatgggcagtgggttaccggattctgcatgctgtttctgctgtacgccctcacggcagcctatatcagtggcgccggtgaattactcgcttccagcctcaaccagtggctggactggcagctaccactggccgcaggcgtactgatcttcaccctcctcggcggggcggtagtgtgcattggcactgcgctggtggatctgttcaatcgcttcctgtttagcgccaaaatcgtcttcctggtgattatgctggccctgctgacgccgcacattcatcaggtgaaccttctgacgctgccggttgagcaaggcctggccctgtcggccattccggtgattttcacctcctttggttttcacggcagcgtcccgagcatcgtcagctatctggggggggatattcgcaaattgcgccgggtatttatcatcggcagctttattcctctggtggcctatattttctggcagctggcgacgctgggcagtatcgacgccccggcctttaccgccatgctggcaaataacgctggtctgaatggcctgctggaggcgatccgcgaagtggtggcgtcaccgcatgtggagctggccgttcacctgtttgccgaccttgcgctggcgacgtcattcctcggcgtctcgctcggcctgtttgattatctggcggatatgtttcagcgtaaaaacagcgtcggcgggcgtctgcagagcggggtaatcaccttcctgccgccgctggcgttcgccctgttctatccccgcggtttcgtcatggccctcggctacgccggggtggcattagccgtgctggcgctgataatgccggccctgctggtcatgaagagtcgccgagagcatccgcaggctacctggcgggtcgccggcggcgcaccgacgctatggctggttctgctgtgcgggatcggcatcgtggctattcagttcagcatcgctgccgggttgttgcccgcggtgggataa

SEQ ID NO: 136364 - DNA, 669 bp, Enterobacter cloacae
atgaataccggacctttgaacgaaaacgaactggaatggctggatgacactctggcgaaatacgccgccgaaggcgccattctggatgtctctgaactggatggcctgctgacggcgatcctctctgcgccgaccgacatcgaacccgctcagtggctgctggcgatttggggcggggcggataatgtcccgcgctgggccaacgatcgcgagcgcgatcgctttgtcaatctgacgctgcagcatatgagcgatatcgccgaacggctggagtcttatcccgatcagttcgaaccgctgttcggcacccgcgaagcggaaggtcaggagctgaccatagttgaggagtggtgctttggctatctgcgcggcgtggcgctgagcgactggtcgacgttgcccgctgaactccagccggagctggacgctatcgcgctccacggcagcgaagaacagtttagcgcgctggataatctgacggcggatgaatttatcgccagcatcgagcgtatcacgccggcggcgctggcgctttaccagtactggatagcgaatccgcagccggtggaggccccgcagccaataagaaatgaagcgaaagtcggacgcaacgatccctgcccatgcggcagcggtaaaaagtataagcagtgttgcttagcgaaatga

SEQ ID NO: 136365 - DNA, 882 bp, Enterobacter cloacae
atgttcagtggactttgcgcatttcctttgacacctttgcatcagcaagattttgatgaaaaagcgtttattcgtattctcgcccgtcttaccgatgccggagtcgactctctgggcatcttaggttcaaccggtagctacgcttatctcagccgtgagcagcgcagacgagtggtgcaggtggcgaaggcgcatgcggggtcgatcccgatgatggtcggcgtcggcgccattgcgactaacgaggtgctacgcctggtggaggatgctcaggaggcaggggcggatgcgttattactgccgatgatgtcctatcagccgctttccgcggaggagatctttgccttttacgaagaagtttgccggcatgtctcggtgccggtttgcctgtatgacaatccccgcactacccacgtaatgctggcggatgagctgcaggggcgcatcgccgccttgccggccattgcctcgattaaaattcccggcctgcccgcgccacaggcgagcgaacgtgtagcggccctgcgtcagcatcttccctctcgcgttacgcttggcgtcagcggcgatgcgtgggccactgccgggttgcaggccggctgcgaagcctggtattcggtctgcggcggactctttccccgctgctcactggcgctggtaagagcgatacgtagcggcgatgtggcgcagactgcggcactgaatgagcagctggcccccctatggcgatgctttgatcgctatggtggtagcctgcgagtgatagccagcgccgcagcgatgctcggactctgcgatccagactcgcttccccgtcctttgctttcgttaggggaggaggcctgtcgtgaggtggcgtcggcgctgcgcggcctggcctga

SEQ ID NO: 136366 - DNA, 549 bp, Enterobacter cloacae
atgcaatttaatatccctacgttgcttactctgtttcgcgtcatcctgatcccgttttttgtgctggcgttttatctgccctttagctgggcgccgtttgcctgcgcgctgatcttctttgttgccgcggtaaccgactggtttgatggtttcctcgctcgtcgctggaatcagagcacccgttttggcgccttcctcgacccggttgccgataaagtcatggtggctatcgccatggtgctggttgccgaacactatcacacctggtgggtcacgctaccggcggcgaccatgattgcccgtgagatcattatctccgcgctgcgtgagtggatggcggagctggggaaacgcagcagcgtggcggtctcatggattggcaaagtgaaaacgacctcccagatgaccgccctggtatggatgctgtggcgtccttatccgtgggtggagtgggccgggatcgcgcttttcctcgtggcggcggtgctgacgctgtggtcgatgctgcagtatttgaacgcggcgcgcggcgatttgcttgatcagtga

SEQ ID NO: 136367 - DNA, 1833 bp, Enterobacter cloacae
gtgagtgatgtttttgacgcaaaagctttcctgaaaacggtgaccagccagcccggtgtgtatcggatgtatgatgctggcggaaccgtcatctatgttggcaaagccaaagatctgaaaaagcggctcagtagctacttccgcagcaaccttgcgtcgcgtaaaacggaagcgctggtagcgctgatcgcgcaaatcgacgtgaccgtcacccacaccgagacggaagcgctgctgcttgagcataactatattaagctgtaccagccacgttacaacgtgctgttacgcgacgataaatcgtatccttttatttttctcagcggcgatactcatccgcgtctggcgatgcatcgcggcgccaaacatgcgaagggcgaatattttggtccttttcccaacggctatgccgtgcgcgagaccctggcgctgctgcagaaaatctttcccatccgtcagtgtgaaaacagcgtctaccgcaatcgctcccgcccctgtctgcagtatcagattggtcgctgcctggggccgtgcgtggccgggctggtcagcgaagaagagtatgctcagcaggtagagtatgtgcggctgtttctcgccggcaaggatgaccaggtgctgacccagctcatcgcgcggatggagaaggcgagccagaacctggagttcgaagaggccgcgcgcatccgcgaccagattcaggccgtccgccgcgtgacggagaaacagtttgtctccaacaccggtgacgacctcgacgtgatcggcgtcgccttcgatgccggcatggcctgcgtgcatgtgctgtttatccgtcagggcaaagtgctgggcagccgaagctacttcccgaaagtgccgggcggcaccgagctgggagaggtcgtggagacctttgtcggccagttctacctgcagggcagccaaatgcgcacgctgccgggggagattttgctcgactttaaccttggggataagacgctgctggccgactcgctgtcggagctggcgggtcgtcgaatcaatgtgcagactaagccgcgcggcgacagagcgcgttatcttaagctggcgcggaccaacgccgcgacagcgttaacgaccaaattgtctcagcaatcgaccattcatcagcgtttgcaggcgctggccagcgtactggagctgccggccgtcaagcgaatggagtgttttgacatcagccacaccatgggcgaacagaccgtagcatcctgtgtggtgtttgacggcaatggcccactgcgcgcggagtatcggcgctacaacatcaccggcattacccctggcgatgactatgcggcgatgaatcaggtcctgcgccgtcgctatggtaaagcgattgatgacaacaagatcccggatgtgatcctgatagacggcggcaagggacagctggcccaggcgaaagccgtgtttgctgaactggacgtcccctgggataaacatcatccgctgctgctgggcgtggcgaaaggtagcgatcgaaaagcgggtctggaaacgttattctttgagccggaaggggaagggtttagcctgccgccggattcgccggccctgcatgtgatccagcatattcgcgatgaatcgcacgatcatgcgatctccgggcatcgcaaaaaacgggcgaaagtgaagagcaccagctcgcttgagactatcgagggggtggggccgaagcgtcgtcagatgctgctgaagtatatgggtgggctgcaggggctacagcaggccagcgtcgaagaaattgctaaagtaccgggcatctctcacgctctggcagaaaagatcttctactcgttgaaacattag

SEQ ID NO: 136368 - DNA, 657 bp, Enterobacter cloacae
ttgatcaacgttcttcttgttgatgaccacgaactggtgcgcgcagggatacgacgcattctggaagatataaaagggattaaagtcgctggcgaagcctgctgcggcgaggacgccgtcaagtggtgccgggctaattccgcagatgtcgtcctgatggacatgaacatgcctgggatcggtggtcttgaagcgacgcgcaaaatcgcgcgctccgtggcgggcaccaaagtgatcatgttgaccgtgcataccgagaatcctttacctgccaaggtcatgcaggcgggcgcggcaggctatctcagtaaaggcgccgcgccgcaggaagtggtgaatgccatccgctgcgtcgcgtccgggcagcgctatattgcctccgatattgcccagcaaatggcgttaagtcagattgaacccgaaaagacagaatcgccgtttgccagtttgtctgaacgcgaattgcagattatgctgatgatcaccaaaggtcagaaggtgaatgagatctcagagcagctaaatctgagtcctaaaacggttaacagctaccgctatcggatgttcagtaaattaaacattcatggcgatgtcgagctgacccacctggcaattcgccatggcctgtgtaatgcggagtcgttagcaagccagtga

SEQ ID NO: 136369 - DNA, 225 bp, Enterobacter cloacae
atgagcacaccagatttttccactgcagaaaataagcaggaactggcgcaggaagtctcctgcctgaaagcgatgattacgctgatgctgcaggcgatgggccaggcggatgcggggcgcgtgattattaaaatggaaaagcagatttcacagatggaagatgaggctcaggccgccgtattctccagcaccgttaagcagattaaacaagcctatcggcagtaa

SEQ ID NO: 136370 - DNA, 723 bp, Enterobacter cloacae
atgagggacaatgattttttcagctggcggcgggatatgctgcaccaatttcagtccatggccaccggcgaggaggtttataatctcctgcaacgtgaaaccgaagcgctggaatatgattactacacgctttgtgtgcgccacccggtgcctttcacccgcccccgcgttacgttccagtcgacttacccccgcgcatggatgtcgcactatcaggcagaaaattatttcgcgatagatcctgtgttacggccggagaattttatgcgtggccatctgccatggaacgacagcctgtttcgtgatgcgccggcactgtgggacggggcgcgtgaccatggtctgcaaaagggcgtgacgcagtgcctgacgttgccaaaccatgctcagggatttctctctgtctccgcgaacaatcgtctgccgggcggttaccctgaagatgagcttgagctgcgtctgcgaacgctgactgaactaagcttgctgacgctgctgcgtctggaagatgagatggtgatgccgccggagatgaagttcagccgccgcgaactggaaatcctcaaatggacggcggaaggaaagacttcggcggaggtggcgatgattctctcgatttcggaaaatacggtgaatttccatcagaagaatatgcagcggaaatttaatgcgccgaataaaacgcaaattgcctgctacgccgtggcgactgggctaatctga

SEQ ID NO: 136371 - DNA, 753 bp, Enterobacter cloacae
atgagtgcgatagaagtgaaaagcctggtaaaaaaattccatggccagacggtgctccatggtatcgacctggaggtacagaaaggggaagtggtggcgatcatcggccccagcggctcgggcaaaaccaccctgctgcgtagcatcaacctgctggagcaaccggagagcggcactatccgcgtcggcgatgtgacgatcgacgccggtcgcagcctcgggccgcagaaagggctcattcgccagctgcgccagcacgtcggctttgtcttccagaactttaatctgtttccccaccgtacggtgctggagaacattattgaagggccggtcatcgtaaaaggtgaagataagcaggagtccatggcgcgggcgcgcgaactgctggcgaaggtggggctcagcggaaaagagaatagctatccgcgccgtctctccggcgggcagcagcagcgagtggctattgcccgcgcgctggctatgcgtccggacgtgatcctgtttgatgaacccacctcggccctcgatcctgagctggtgggggaggtgctcaccaccatccgtcagctggcgcaggaaaaacgcaccatggtgatcgtgacccatgaaatgagtttcgcccgcgacgtagccgatcgggcgatatttatggatcagggacgcattgtcgaacaaggcgaggcaaaagcgttgttcgcttcgccccagcagccgcgtacccgtcagttccttgaaaaattcctgatgcagtaa

SEQ ID NO: 136372 - DNA, 669 bp, Enterobacter cloacae
atgcaagaaagtatccaactggtcattgattccgccccttttctgctgaaaggggccgtctttacgctgcagctgagcattggcgggatgtttttcggcctggtgctgggctttatcctggcgctgatgcgcatgtcgccagtctggccggtaaaatggctggcgcgcatgtatatctccattttccgcggcacgccgcttatcgcccagctgtttatgatctactacggcttgccgcagttcggcattgagcttgacccgatcccggcggcgatgatcggcctgtcgttgaatactgcggcctatgcggcggaaacgctgcgcgcggccatcgcctcgattgataaagggcaatgggaagcggcggccagtatcggtatgacgccctggcagacgatgcgtcgggccattttaccccaggcggcgcgggtcgctttgccgccgctgtcgaacagttttatcagcctggtaaaagatacctcgctggcggcaacgatccaggtgccggagctgttccgtcaggcgcagctaatcacctcgcgaaccctggaggtcttcaccatgtatctggcggcctccctgatctactgggtaatggcgacagtgctctcctcgctgcagaattattttgaaaaccagctgaaccgccaggagcgtgatccgaaatga

SEQ ID NO: 136373 - DNA, 987 bp, Enterobacter cloacae
atgtcactgcaaaacttaacccgctttccgcgcctggaattgatcggcgcgccgacgccgctggagtatctcccgcgtctgtccgatcaccttgggcgcgaaatttttattaaacgtgatgatacgacgccgctggcgatggggggcaacaaactgcgtaagctggagtttctcgccgccgatgcgctgcgcgagggcgcggataccttaatcaccgccggcgcgatccagtctaaccatgtgcgtcagacggcggcagtcgctgcgaaactgggactgcattgcgtggcgctactggaaaatcccatcggcacccgggcggagaactatctgagcaatggcaaccgtctgctgctggatctctttaacacccaggttgagatgtgtgatgccctgaccgatccctccgcccagctcgatgagctggcgacccgcattgaggcgcaggggtatcgtccgtatgttattccggtcggcggctccaatgccctcggcgcgttaggctatgtggaaagcgcactggaaatcagccagcagtgcgaagacgcggtggcgatctcgtcagtcgtggtcgcctccggcagcgccggcacccatgccggattggcggtcggccttgaacagctgatgccgcaggcggaactgattggggtgaccgtgtcgcgctcggtcgctgaccagttgccgaaagtggaggcgctgcagcaggccgtggccaacagtctcgagctacaggcgaaggctgaaattatactgtgggatgactactttgccccaggatacggtacgccaaacgaagatgggatggccgccgtgaagctgctggcgcagctggaaggtattttgctcgacccggtctataccggtaaagcgatggccgggcttatcgacggcatcacgcagaagcgctttaaggatgaagggccgatactgttcgtccacactggcggatcgccggcgctgtttgcctatcatcctcacctctaa

SEQ ID NO: 136374 - DNA, 768 bp, Enterobacter cloacae
atgggcgcgatggccgttgttttgatggctggcgtcagcgtgaaaacttttgcggcggaaaacctgctcaatcagattaaagagcgcggcaccctacgcgtgggcctcgaaggcacctaccctccctttagtttccagggggatgacggcaagctgaccgggtttgaagtggaattcgctaacgaactggcgaaacatcttggcgtgaaggccgatctcaaaccgaccaagtgggacggtatgctggcctcgctggactccaagcgtatcgacgtggtgattaaccaggtcactatctctgaagaacgtaagaagaaatacgatttctccaccccatataccgtctccggcgtgcaggcgctggtgaagaagggtaacgaaggcgtgattaaaaccgcggcggatctgaaaggcaagaaagtgggcgtcggactgggcactaactatgaagagtggctgcgtcagaatgtccagggcgtggacgtccgtacctatgatgacgatcccaccaaataccaggatctgcgtgtaggccgtattgacgccattctggtagaccgtctggcggcgttggatctggtgaagaaaaccaacaatacgctggcggtaaccggcgaagccttctctcgtcaggaagctggcgttgcgctgcgtaaaggcaacgacgacctgctgaaagcggtagatggcgcgattgcagacatgcagaaagatggcagcctgaaggcgctgtccgagaaatggtttggcgctgacgtgacgaaataa

SEQ ID NO: 136375 - DNA, 1488 bp, Enterobacter cloacae
atgaaaaaccccaccttattgcaatgttttcactggtactaccccaccggcggcgagctgtggcctgaggtcgaagcgctggcgcccagcctgaatgaaatcggcatcaatatggtctggttgccacccgcctacaaaggcgcctcgggcggttactccgtcggctatgatacctacgatctctttgacctcggcgagtttgatcaaaaagggtctgtcgccaccaaatatggcgacaaagcgcagttgctggcggcgatcaacgccctgaaggagcacaatatcgccgtgctgctggatgtggtggtaaaccataaaatgggcgctgatgaaaaagagtctctgcgcgttcagcgcgtcgatgagcaggatcgtacgcaaattgacgaggagatcattgagtgcgaggcatggacgcgctacaccttcccggtgcgcgccggacagtattcgcagtttgtctgggactacaaatgttttagcggcattgaccacatcgagaacccgacggaagacggtgtgtttaaaatcgtcaacgattacaccggcgaaggctggaatgaacaggtcgatgatgagctcggcaactttgactatctgatgggcgccaatatcgatttccgcaatcatgcagtgaccgaggagatcaaatactgggcgcgctgggtaatggagcagaccggctgcgacggttttcgtcttgacgcggtcaagcatatccccgcctggttttataaagcgtggatcgagcatgttcaggaggtggccccgcagccgctgtttattgtagcggaatactggtcccatgaagtggagaagctccagcagtatatcgacctggtcgagggcaaaacgatgctgtttgatgccccactgcagatgaaatttcatgaagcgtcgcgccagggccgcgattatgacatgagccagattttcagcgggacgctggtggaagccgaccctttccatgccgtcactctggtcaccaatcatgatacgcagccgctgcaggccctcgaggcgccggttgaaccctggttcaagcccctcgcctatgcgctgatcctgctgcgggagaatggcgtgccctcggtcttttatgccgatctcttcggcgcttcctatgaggataccggcggcgacggagagacatatgccattgagatgcccgttatcgaacaactccacgagctgatcgacgcccgtcagcgttttgcccatggcgtgcaaaccctttggttcgatcatcctaactgcatcgcctttagtcgtagcggtactgacgacgatccaggctgcgtggtgatcatgtccaatggcgatgagggcgaaaagacgctgacgctgggcgaaaactatggctacaaacgctggcgggattttctcggtaaccgggaagagattgtcgaaaccgatggcgaaggctgcgcgacctttacttgtaacggggggagcgtgagcgtgtgggtattagaggaggtgctgtag

SEQ ID NO: 136376 - DNA, 432 bp, Enterobacter cloacae
atgacaaagttattttttgctggcatggtggtggcgctggccggttgcgtacaggttgatcgttatgaggacgtcgttaaagcgccggcgccggctggccttgcaggtttctggcaaacgaaagggccgcagagcgcgatgatgagtcctgacgccattgccagcctgattgtcaccaaagaaggggacaccttcgactgccgccagtggcagcgcgtgattgcgcagccggggaaactgatgaatcgtgacagtgagatttacaacgtgaccgcttccctggacatctatcctgtcgagcgcgagggcaacacgatctcctacgatcggatgacgttgtcccgtgttgaacgtctcactccggagtgcgagaaggcgtgggccaaagcgcgagcgacggggcccgtcagcgcgccggcctccacgcgctga

SEQ ID NO: 136377 - DNA, 624 bp, Enterobacter cloacae
atgtcaacgatgattatggatttgtgcagctatacccggttgggattgacgggatatctgaccagtcggggaattaaaaaacaggaaatcgttgaggtcaacagtgctgcggatctgcagaaacactgtacgtcgtgttgcccggcggtggtgtttctgaatgaagactgtttcgtgcatgatgatgaaagtaatggcattattcgccagatcattacgcaaaacccggcgacgctgtttgttatctttatgtcgctggcgaacatccattttgaccgctatttgcgggtacggaagaatctgctaatcagttcaaaatcgataaccccaaaagaccttgatgttattctggttaattatcttaaatacaaaaacaccagtgtagggcagttaactttaccgacattgtcactgagtaaaacagaatcaaatatgctgcaaatgtggatggccgggcatggtacttcgcaaatctcaacgcaaatgaacatcaaagcgaagacggtatcgtcgcataaaggcaatattaaaaagaaaatacaaacgcataataagcaggtgatttatcatatcgttcggctgaccgaaaacatcacctccggtattcaggtaaatatgcgctga

SEQ ID NO: 136378 - DNA, 192 bp, Enterobacter cloacae
atgcaggtgaacgatcgtgtcacggtgaagaccgacggtggcccacgtcgatcgggggtagtgctggcgattgagtcgtttagtgaaggaacgatgtatctggtttcactggaagactatcctctggggatctggttttttattgaaataggccacccggatgggattttcgtggaaaaagaggtctcgtaa

SEQ ID NO: 136379 - DNA, 225 bp, Enterobacter cloacae
atgatgaagcaccaattaacaggccagaccggggacgaccttgatgtcaacgtagatgccctgctggcggcaattaatgagatcagcgaaagcgaagtccatcgcacgctggacgacccgcagcgcgccagcatcgatggccgcgggtcacatacctggcgtgagctggcggaggcattcgaactcgatattcacgatttcagcgccagtgaagccaaccgttag

SEQ ID NO: 136380 - DNA, 1680 bp, Enterobacter cloacae
atggataagccactgcggttgaagttaaaaaagtgctaccacctggctcgcccggcgcatgtggttaacgcttgttttatcgcagtgctatttttctccacgctgctgatctggcgtgaaatcaatgtcctggaagaggcctacgtggccaaccagcgtaacaatctggctaacgtcgctcatgaaatggatgggctgttgcagttcaacatcgacagaatgatgttttttcgccatgggatgcaggcggcgctcgaacagccgcttgatatcgatgtattgcttaaggccagccaacgctatctgagccagcgccatcagcaggcctggcgggtggcgctaccgaatcgtcgtacgctgccggtgtttggcatctcaggcagcgtcgctggccacaaccctatcctgctggtggacgatccgctggcggctgatgaactaatggcgacgctcgagctgggttatctgctaaatctgacgcagcacgatcgcgatttcgccgagcggatgcagtatatctctcgtagcggcttttttacctcgaccctgccgctgcgggatgagtcgcaggtgataacgcactattcccaagccctcggcgctccgtggtttacccgccagacccaacgaaataatccggggcgaggcgttatctggcaaacctttcctgacgatgacccgcagctggaagagcaggtggtcaccgcttcgataccgttggattttgccggttactggcgcggcgtgctggcgatggatttctcagtcagtgaaatcaaagcgtttttggttagcgccatgcaggggggacaagagggagagtaccaactttatgatagccatttgaacctgctggcttcttccgcgccggggaatgtcctgaccctgctgtccccgcgcgagcaggagctgctgagccgcgcgtttgtccatgataaccagggagggctgcgtctgctgacgcgctatatcagctgggccaaactgcgcaattttgacggcgtgctgctgcggatccacactctgcgggaaggcgtccgcgggaactttggcaccatcaccatcgccctgaccctgatgtgggtcctcttcaccttgatgctgttgctctcctggctggtgatccgccgcatggtccgcaacatgagcgttctgcaaacctcgctggagtggcaggcatggcacgatgccttgactcgcctgctcaatcgcggggctctgtttgaacaggcgatggcggtagccagcgactgccagcgcagcggacggccgctggcggtgatccagctcgatctggatcattttaagcacatcaacgatcgctatggtcatcaggcgggggacagggtgctgtcgatggtggccagtacgctgtccagcgcggttcggcagggcgatctgctgggcagagtgggcggagaagagttttgtatcgtgatgccgaataccaccctgcaggaagcggcggcggtggcggagcgattgcgccagcgtatccagggacgggaagtctttttgcataacaacgtgacgctgcgggttagcgcctcgttaggggtgagcgccagcgaagagcggggggagtatcagtttgaagcgctgcagtcggtggccgatgggcgactctatctggccaagcaaaatgggcgtaaccaggtctgttttcgcagcgcagcgtga

SEQ ID NO: 136381 - DNA, 768 bp, Enterobacter cloacae
gtgcgggcgaatcgcgagttgcccgtggtctggggagtggcgaaagggtcgttcgttaacaaagtgatcctcgtgccactggctttgttgatcagcgccttcatcccctgggcgattacgccattgttgatgctgggcggcgcgtttctctgtttcgaaggggtggagaaggtactgcacagtctggaagcgcggaaacacaaagaggatcctgaacggcggcagcagcgtctcgccgcgctggcggagcgcgatccgctggcctttgagcgtgacaaagtaaaaggcgcgattcgcaccgattttattttgtccgcggaaattgtcgccattaccctcggcatcgtggcggaagctccgctgcttaaccagatccttattctctcggggattgcgattctggtcactatcggggtgtatggcctggtgggggtgatcgtcaagctggacgacatgggttactggctggcggaaaaacgtagtgcgctggcgcagtggctgggtaaagggctcctggccgtcgctccccgcctgatgaaggtgttgtctatcgtcgggacgctggccatgttcctcgtcggcggggggattgtcgttcacggtattgcgccgctgcatcatgccatcgagcactggagcgcggggttgggtggggtgatggcctccacgctgccggtcgtcgccaacctggtgctgggttttatcatcggcgcggtggtgctggcgggcgttaaggcggtgagcagcctgcgtggcgctggaaagtag

SEQ ID NO: 136382 - DNA, 912 bp, Enterobacter cloacae
atgtctacccgtcagcttttaccgctcatcggggcgctgtttgcgctgtatatcatctggggctctacctatttcgctatcgccgtcggggtcgccagctggccgccgctaatgatggccggcattcgttttctcgctgccggcgtgctgttgctggggtggctactggccaccggccataagctaccggcgcgtcgtccgctgcttaacgctgcgctgatcggcgtgttgctgcttgcggttggcaacggcttcgtgacgctggctgaacatcagcacgttccgtcagggatcgcggcggtgatggtcgccaccgtaccgctgttcaccttatgcttcagccgctttttcggcatcgccacccgtaaactggagtggctgggcattgccattggccttgcgggtatcgtgatgctcaacagcggaggcaacctgaacggcaacccctggggcgcactgctgatcctgattggttccctaagctgggccttcggctcggtttacggttcgcgaatcgtactgccgaccggcatgatggcgggggcaatcgagatgctcgccgccgggatcgtcctgctggtggcctcatggctgagcggtgaaaccttaacccgcgtcccttcctggtccgggatcgccgccctggcctatctggccatctttggctcgctgatcgccattaacgcctacatgtttttaatccgcaatgtcaccccggcggttgccaccagctacgcctatgttaatccggtggtcgcggtgctcctcggtactgggttcggcggcgagagcctgtcgctcattgagtggctggcgctggcggtgattattttcgccgtagtgctggtgacgctggggaaatatctcttccccgtccgcagcgaggctactccttgtaaggcgtcgaagtag

SEQ ID NO: 136383 - DNA, 498 bp, Enterobacter cloacae
atgatggcggatgttcacgataaagcgacgcgcagtaaaaatatgcgggcgatcgccacgcgcgatacggcgatcgaaaagcggatagcggcgctgctgaccggggcgggattcacctttgtcgcccaggatcgcgcgctgccgggacgtcccgatttcactttacccgactaccgttgcgttatctttactcacggctgtttctggcatcaccatgactgctatctgtttaaggtgccggccacccgcacggcattctggctggacaaaatcgccggtaacgtggcgcgcgacgcccgcgaccggcaaaagctggccgaagagggctggcgggtattaatcatctgggaatgcgccctgcgcgggcgccttaggctgagtgatgcggcgctcaccgagcgtctggaagagtggatctgcggcgccggacacgacgcgcagatcgatacgcaggggatccgcgaactgacgactacttcgacgccttacaaggagtag

SEQ ID NO: 136384 - DNA, 1401 bp, Enterobacter cloacae
ttgtcgttggctgaacaggccggggaagacgctgaggcgctgctgcgtcagctgatgacgatctacgatgtaaaaacgctggttgccgaactggtgagcgtcggcgaacagcactggagcgcggcgatcctcaagcgcgtggcggcgcttggccgcgcggcggagcgtttgcgcccgcaggaagttgctcatctggcgacgctcctgccttcgccgccggcccatcatccgcactatgggttccgttttatcgatctgtttgccggtattggtgggatccgcagtggttttgaagccatcggcgggcagtgcgttttcaccagcgagtggaacaagcacgcggtacgcacctataaggccaactggtactgtgatccgcagcagcaccgttttaatgaagatatccgcgatattaccctcagccaacgctctgacgttagcgacgaggaggcggcgcggcatattcgcgaatctatccctcagcatgatgtgctgctggctggcttcccctgccagcctttctcgcttgccggcgtctctaagaaaaatgcgatgggccgtgcgcatggctttgcctgcgaaacccagggaacgctgttttttgacgtggtgagaattatcgcggctcgtcagccagcgatttttgtgctggagaatgtcaaaaacctcaaaagccacgatcaggggcgcaccttccgtatcatcatgcagacgctggatgagctgggatatgaagtagctgacgcggggcataccgggccggatgacccgaaggtgattgacgggcgccatttcttgcctcagcaccgggagcgcatcgtgctggtgggtttccgtcgcgatctgcagctgcatgctggatttacgctgcgcgacatcgcggcgcagtacccggcggtgcggccaacatttggcgagctactggagccgacggtcgatgcgaaatttattcttacgccggtgctgtggaaatatctttatcgttatgcccgcaagcatcaggcgcggggtaatggctttggttatggcctggttgaccccgccaatccccacagcgtggcccggacgctttctgcccgctactataaagatggtgccgaaattctcgtcgatcgcggctgggaccggccgctcggtgagaagcattttgacgatccgctgaatcaacagcggcggcctcgccggttgacgccgcgcgaatgcgcccggctgatgggctttgaatccccgcagggggcgcgttttcgcatcccggtatcggatacgcaggcctatcgtcagtttggcaactcggtggtggttccggtcttcgccgcggtggcgaaactcctggcgccgcgcatcgctcaggcggtggcgcgccgcgaagcggatgataatgatggcggatgttcacgataa

SEQ ID NO: 136385 - DNA, 708 bp, Enterobacter cloacae
atggacctggttgactggcagcaacgatttgagcgctggatactgacgcaccatgcgcaggatgacgccgcacacgatctgtcccattttcgtcgcgtctgggcgaccgccactcagctggccgcgggggaggaagtcgaccggctggtactcctcacggcctgctattttcatgacatcgtcagcttgccaaaaaatcatccggagcgaagtcgatcctcgatgatggccgccgagaaaaccctcgccattctgcagtcggcctttgctgattttcctgcggatcgttacccggcggtcagccatgccatcgaggcgcacagcttcagcgcggcgatcccaccgcgcacgctggaggcgaaaatagttcaggatgccgatcgactcgagtcgctgggagccattggtctggcgagggtcttcgctgtcgccggcgctctgaataccatcttgtttgatgccgaagatccttttgctgatcggcgggcgctggatgaccgcaaatatgccctcgaccatttccagtgcaaacttctgcgcctgccggaaaccatgcaaactgacaaggggaaagcgatggcgcagcataatgcccgttttctcgtcgaatttatggctaagctcagcgcggagctgcagggggagccgctggcgctggataaagcggttttgcgccgctttgcaccgcaggcgtcaaccgaccggtga

SEQ ID NO: 136386 - DNA, 282 bp, Enterobacter cloacae
atggaagagcaggcaaaacgcagcccgggagggaaacttgcgctctgggcgttgtatgctttttgcggatattgtgtctgggtcattgtgcgttactggtgggtagtgggaaaaattcacagcgttcccggcgccagcgtggagggtgattttggaacaacggccgggaaatggcttggcgccctgttgggtatgctggtcctcggcggcattggctctattctcggcgcggtcgtctggtatacgcgtccatcccgcggcgagcaggatcatcagcgctaa

SEQ ID NO: 136387 - DNA, 588 bp, Enterobacter cloacae
atgagcaacgatctgttaagcaaggtgatcatcaacaccgtcgccgcttcagatgcccgcatgggcggcgcgccggtggtagcgatgtctaacttcggctcaggcaatcagggcattacagcaaccatgccggtagtggtggttgcagagcatctcggcgtcgatgaagagaccctggctcgcgctttgtctctctctcatctcaccgccatctcaattcattctcgttacacgcgcttatctgcgctatgcgcagcctcaaccgccgctatgggcgccgccgccggtatggcctggctgtttacccgcgacatcaacaccattaataccgcaattattaatatggtcagcgatattaccggcatgatttgtgatggcgcttccaacagctgcgcgatgaaagtctcgtcagtggtatccagcgcctttaaggcggtactaatggcaatgcaaaatagctgcgctggcgccaatgacggtattgtctgcgccgatgtcgagcagactattaataacctgtgccgtctggtgattaaaccaatgactctcaccgataaagaaattatcagcattatggtcgctaaataa

SEQ ID NO: 136388 - DNA, 741 bp, Enterobacter cloacae
atgaataaaaaagtcatcttccgcggcgccagcgctattatgcccctatgcatcggcgactttccattttcatttattgtcggcgcattaagcgttagcgcgggcatgagcgtctggcagagtacggcgtggtcggcgatcgtcattgccggctcggcgcaaatgctggcactgaatatgttaaaaaccggcgccacgctcggcgtgattattttcaccacattaattatcaatcttcgccacgtgctgtatagcgcctctatttccggcaccgtgcgcgaagcttcattctttaaaaaatgctttatgtcctatgcgctcaccgacgaggtgtatgccaccaccgtcaaagagatggaaggaaataaaaaggaaaaatatctgttttatggttcggcgatgattaccttctgggcgatttgggtgctggctgattttcttggcgcgctggtcggcgcctcgtttccccacattgagaaatacggtctcgatttcgccatggtcgccgcctttatcgccatcgtggtgccgcaaattaaaagccaggcctgcaccgtcgccgcggttgtagccgccgtttccggcgtgctgttagtggtcctaccctattcgctgggtatcgttgtcgcctcagtgcttggcgtcctcgccggcctgtgcgtcgacctgacggaagagcgcaagcagatggcaaaaaccgaatccgatgtgccgttagtggaggcgatggaaaatgagtaa

SEQ ID NO: 136389 - DNA, 321 bp, Enterobacter cloacae
atgagtaatagctattttatcgccctgacgctgggcatggccgcggtgacttttctcatccgtttctcgtttatcggcctggccggcaagttccagatgtccgagcgggtgaccaaaacgctacgcttcgtgccggtcaccgttctgccggccatcatcaccattcagatcctgagcgtgaattccagcatggagttcgacttaaaaaatccgaaggtgatcgccgccatcatctgcacgctcgccagcttccgtttaggcctggtgtgggtggtagtgagcggcgtcggctcgctggtgttgttaaattattttatgtaa

SEQ ID NO: 136390 - DNA, 381 bp, Enterobacter cloacae
atgattattaccaccgctgacgcgcctgctgctatcggcccgtacgtgcagggcgtcaatctcggcgcgatgaccatcacctccggtcagctgccgattaatccgctggacggcaccatgcccgaggacattgccgaacaggcgcggcaatcactggaaaatgtgaaagccatcgttgaagctgccggactcacggtcgggcagatcgttaaaactacggtgtttgtcaaagacctggcggattttgccgccatcaatgccgcctacgaggccttctttatcgaacaccaggcggcctttccggcgcgctcctgtgtggaggtagcaaggttaccgaaagatgccggcgtcgaaatcgaagcgatcgctttcgcccgctaa

SEQ ID NO: 136391 - DNA, 510 bp, Enterobacter cloacae
atgttaactattcgacaggcatgtcccgaggacgcgccccagcttagcgcgatgggctatgccagctatcatcaccactttgctcatctctggcgcgatgccgatgaactggcgttatttcttaagcaagaatatgccgaagatgcgctacgtcggagtcttgcggatgcgacccaacactggctcatcgccgaagccccctctcctgttggtttcgctaaatatagctatcagcagcgaatggctgacgacggcaagattggtacgctgctgcataagctctacctgatgccggggaagactggccaccgctacggcgagcatatttttcacgccgtcgagacgcgagcaaaaacggccggtgaaagttggctgtggctggaagtactcaccgcgaatcccgccgcgcgccgtttttacgaacgccaggggatgcagcacatcagagacacgattttccactccgccagccagcaaagcaccttacatattctggccaaacctatttga

SEQ ID NO: 136392 - DNA, 456 bp, Enterobacter cloacae
atgcctgagcttcgtgataccggcgtacgtaacgtcgtttgtggggaaaatgtcgttatttaccagcccgccaacctctatgattgccagctcggcgataacgtcttcgtcgggccgttcgttgagatccaggggaatacccgcatcggcgcgaacagtaaaattcagtcccatacctttatctgcgagtacgtcaccatcggccagcgctgctttatcggtcacggcgtgatgtttgccaacgacctgtttcgcgagggtaaaccaaacgccgaccgcgccagctgggggcggatcgagattggcgatgacgtgtcgatcggcagcggcgccacgattctggccgtcagcatctgcgatggggtggtgataggcgcgggcagcgtggtaacgaagtccattaccgagaaaggcgtgtgggcggggaatccggcgaggctgctgcggcggctataa

SEQ ID NO: 136393 - DNA, 1650 bp, Enterobacter cloacae
atgaaaaacatcaacccaacgcagacctctgcctggcaggcattacagaaacacttcgacgaaatgaaagatgtcactatcagcgagcttttcgccaaagatagcgaccgtttttctaaattttccgcgacgttcgacgatctgatgctggtggacttctccaaaaaccgcatcactgaagagacgctggctaaactgcaggatctggcgaaagagactgacctggcgggcgctatcaagtcgatgttctcaggtgagaagatcaaccgcaccgaagaccgcgcggtactgcacgtcgcgctgcgtaaccgcagcaatacgccgattgtggttgatggcaaagatgtgatgccggaagtgaacgctgtgctggagaagatgaaaaccttctccgaagcgattatctccggtagctggaaaggctacaccggcaaaccgatcaccgacgtggttaacatcggcatcggcggctccgacctcggtcctttcatggtgaccgaggcgctgcgtccgtataaaaaccacctcaacatgcactttgtctctaacgtcgatggcacccatatcgccgaagtgctgaagaacgtgaatccggaaacgactctgttcctggtggcgtccaagactttcactacccaggaaaccatgaccaacgcccacagcgcgcgcgactggttcctggcaaccgcgggcgacgacaagcacgtggcgaaacacttcgccgcgctttccaccaacgcgaaagcggttggcgagttcggcatcgacaccgccaacatgttcgaattctgggactgggttggcggccgttactccctgtggtcggcgattggtctgtccatcattctctccgtgggcttcgacaacttcgttgagctgctgtccggcgcgcatgcgatggataagcacttctccaccactccggcggagaaaaacctgccggtgctgctggcgctgatcggcatctggtacaacaacttcttcggtgcggaaaccgaagcgattctgccgtacgaccagtacatgcaccgctttgccgcttacttccagcagggcaacatggagtccaacggtaagtatgttgaccgtaacggccacgcggtagactaccagactggcccaatcatctggggtgagccgggcaccaacggtcagcacgcgttctaccagctgatccaccagggcaccaaaatggtaccgtgcgatttcatcgctccggctatcacccacaacccgctgtctgaccaccatcagaaactgctgtctaacttcttcgcccagaccgaggccctggcctttggtaaatcccgcgaagtggttgagcaggaatatcgcgatcagggtaaagacccggcgaccctggagcacgtggtgccgttcaaagtgttcgaaggtaaccgcccgactaactccatcctgctgcgtgagatcaccccgttcagcctcggggcgctgattgccctgtacgagcacaaaatcttcacccagggcgcgatcctcaacatcttcacctttgaccagtggggcgttgagctgggcaaacagctggctaaccgcatcctgccggagctgaaagacggcagcgaagttagcagccacgacagctctactaacggcctgattaaccgttataaagcctggcgcgcataa

SEQ ID NO: 136394 - DNA, 1350 bp, Enterobacter cloacae
atgacagatctagtcgtcgccaaatttggcggcaccagcgttgctgattttgacgcaatgaaccgcagcatcgatgtggcgctgctcgatgccaatacccgtattgttgtgctctccgcctctgccggcgtgaccaacattctggtggccttagcgggagggctggaacccaccgaacgtttttcccagctggacgctctgcgtcagatccagttcaatattctggagcgtttgcgttatcccaacgtgatccgcgaagagattgagcgcttgctggaaaatatcacgacgctggcggaagccgccgcgctcgcctcctcaaccgccctgaccgacgaactggtcagccatggcgaactgatgtccaccctgctgtttgtggaaattctgcgtgaacgcggtattcaggcgcagtggtttgacgcccgtaaagtgctgcgcactaacgatcgctttggccgcgccgaaccggacatcgccgccgtcgccgaactgacccagcagcagctggcgccgcgcctggcggaaggcctggtggtgacccagggctttatcggcagcgaagcgaaaggccgcaccaccaccctcggccgcggcggcagcgattataccgccgctctgctcggcgaagcgctgaatgccacccgcgtcgatatctggaccgatgtcccggggatctatactaccgacccgcgcgtcgcgccggcggcgaaacgcatcgacgtcatcgcctttgaagaggcagcggaaatggccacctttggcgccaaagtgctgcatccggcgaccctgctgcctgccgtgcgcagcgatatcccggtgtttgtcggctccagtaaagagcctaaagcgggcggtacgctggtgtgtaaaaccaccgagaacccgccgctgttccgcgcgctggcgctgcgtcgccggcaaacgctgctgacgctgcacagcctgaatatgctgcactcccgcggcttcctcgccgaagtgttcggtattctggcgcgccataacatctcagttgatttgatcaccacctccgaagtgagcgtggccctgaccatggacaccaccggctcgacctctgcgggcgataccctgctgacccaggcgctgctgaccgagctctcttcgctgtgccgcgtggaagtggaagaaaatctggcgctggtcgccctgattggcaatgagctgtcgaaagcctgcggcgtcggcaaagaggtctttggcgtcctcgagccgtttaacatccgcatgatctgctatggcgcctccagccacaacctgtgcttcctggtgccgggcgacgatgcggagaaggttgtgcagaagctgcatcataatttgtttgaataa

SEQ ID NO: 136395 - DNA, 927 bp, Enterobacter cloacae
  misc_feature (293)..(302): n is a, c, g, or t
atgctcgcaactctgacgcggctgttcccgttatgggcactgctgctctccgttctggcctattacactcccaccaccttcaccccaattggcccatgggtcaccaccctgctgatgctgatcatgttcggtatgggcgtgcatctgaagctggaggatttcaaacgcgtcctgtcgcgcccggcgccggtcgctgcggggatctttctccattatctggtgatgccgctcgccgcctggctgctggcgctgctgtttcatatgccgccggagctttccgccgggatggtgcnnnnnnnnnncgccagcgggaccgcctccaacgtgatgatctttcttgccaaaggggatgtggcgctgtcggtgaccatctcctcggtctccaccctcgtcggcgtcgtggcgacaccgctgctcacccgtctgtacgtcgacgcgcatattcaggtcgacgtcatgggcatgttgctcagcattctgcagattgtggtcattcccatcgcgctgggactgattgtccatcatctgctgccgaaggtggtgaaagcggtagagccgttcctgcccgccttctcgatggtgtgcattctggcgatcatcagcgcggtggtggcgggttccgccgcccatatcgcctccgtcggcctggtggtgattatcgcggtgatcctgcataacactattggtctgcttggcgggtactggggcggacgtctgtttggttttgatgaatccacctgccgtacgctggcgatcgaggtggggatgcagaactccggcctggcggccgcgctgggtaaaatttacttcggcccgctggcggcgctgccgggcgcgctgttctccgtctggcataacctgtccggttcgctgctggccgggtactggtcaggaaagcccatcgccaaaaaagccgacaagcgctga

SEQ ID NO: 136396 - DNA, 273 bp, Enterobacter cloacae
atggcactcccccgtattacacaaaaagagatgaccgagcgcgaacagcgcgaattgaaaacgctgcttgaccgcgcgcgtattgcgcatggccgcccgctgagcaatgcggaaacgaacagcgtgaaaaaggaatatatcgataagctgatggcgcagcgtgaagcggaagcgaagaaagcccgccaggtgaaaaaacagcaggcttataaaacggataaggaagcgaccttttcctggtcggcgaatacgccgacccgcggcaggcgttaa

SEQ ID NO: 136397 - DNA, 876 bp, Enterobacter cloacae
atgctgcccgactcatcaacccgattaaataaatacatcagcgaaagcggcatctgctcgcgtcgcgaagcggaccgctttattgaacaaggcaacgtctttatcaatggcaagcgcgccactattggcgatcaggtgaagcctggcgatttagtcaaagtgaacggacggttgattgagccgcgcgaagcggatgatctggtactgattgcgctgaataagccggtcggcattgtgagcaccaccgaagatggcgagcgcgacaacattgtcgatttcgtcaatcacagcaagcgtatctttcctatcggccgtctggataaagactcccaggggctgatcttcctcaccaaccatggcgatctggtgaacaagatcctgcgcgccggcaacgaccatgaaaaagagtatctggtcacggtcgataagccggtgaccgatgagttcattcgcggcatgggcgcgggggtaccgattctcggaaccgtgaccaaaaaatgtaaggtaaagaaagaagcgccgttcgttttccgcatcacccttgtgcaggggttaaaccgccagatccgtcgcatgtgcgagcactttggctatgaagtgacgaagcttgagcgtacgcggatcatgaacgtcagcctgacggggatcccactgggagagtggcgcgatctgaccgatgacgagctgatcgacctgttcaagctgattgaaaactcctcttccgaagcgaagccgaaagccaggccgaagcctaaagcggcgacccccgggatcaagcgcccggtagtgaaaatggaaaatagcaacgataagggccgcccggctggcaacgggaaacgtttcacccagccgggacgtaaaaagaaaggtcgttaa

SEQ ID NO: 136398 - DNA, 690 bp, Enterobacter cloacae
atggaactgctgttactcagtaactccacgctgccggggaaagcctggctggaacacgccctgccgctgatcgccggtcaggtcaaaggccgccgtaaggcggtattcatccccttcgctggcgtgacgcaatcctgggatgattatacggccaaagtggctgcggttatggcgcccatggcggtcagcgtaaccggtatccacagcgtcaacgaccctatcgccgccattgaaagcaccgagatggtgatcgtcggcggcgggaacaccttccagctgttgaaagagtgccgcagccgcggtctgttggtgccgattgtcgatgtcgtcaaacgcggggcgctgtatatcggctggagcgcaggttcaaacctcgcctgcccgaccattcgcaccaccaacgatatgccgattgtcgatccacagggatttgatgcgctggggctgttcccgctacagattaacccgcacttcaccaacgcgttgccgaccgggcatcagggcgaaacccgcgaacagcgtatccgcgaactgctggtcgtggcgccggaattaacggtgattggtttgccggaaggaaactggatccaggtcaccgatggtcacgcgacgctcggtggcccgaacccgacgctgttgttcaaagcgggggaagaagcgataaccctgcctgcgggccaccgcttctga

SEQ ID NO: 136399 - DNA, 1632 bp, Enterobacter cloacae
gtgttaactctgctacacctgttgtccgcggttgctctgctggtgtggggcacgcatatcgtgcgtaccggggtgatgcgcgtctatggcgctcgcctgcgtaccgttctcagtagcagcgtagagaaaaagccgctcgccttctgcgcgggtcttggcgtgactgcgctggtgcaaagcagtaacgccaccaccatgctggtgacctcatttgtcgcccaggatttagtgggtctgatgccagcgctggtgatggtgctgggggccgacgtcgggacggcgctgatggcgagggtgttgaccttcgacctgtcgtggctgtcgccgttgttgatatttatcggggtgattttcttcctcggccgcaagcagacccgcgctgggcagcttggacgggtggggattggtctggggctgatcctgttggccctcgagctgattgtccaggccgtacaccccataacccaggcgaacggtgtgcaggtgattttcgcctcgctgaccggcgatatcatgctggatgccttgattggcgccgtatttgcaatcattagctactccagcctggcggcggtgctgttaacggcgacgctgaccgcggcgggagcgatctctttcccggtggcgctgtgtctggtgattggcgccaacctgggatcggggctgctggcgatgcttaacaacagcgcggcgaacgcggcggcgcgccgggtggcgctgggcagcctgctgtttaagctggtggggagcctgattattctgccgttcgtccatccgctggccgcggcgatgcacaagctgccgttggccgagtccgagctggttatctacttccacgtcttttacaacctgctgcgctgcatcgcgatggtgccctttgccggaccgatggcgaagctgtgccagcgtctgatccgcgatgagcccgagctggataaccatctcaaacccaagcatctcgacccgtcggcgctggacaccccggcgctggcgctggccaatgccgcgcgtgagacgctgcgcattggtgacgcgatggagcagatgctggagagcctgcacaaggtgatgcatggcgaaccgcgtcaggagaaagagctgcgccgtatggcggatgatatcaacgtactttacaccgctattaagctctatctggcgcgaatgccaaaggatgagctggcggaagaggaatcccggcgctgggcggaaattattgagatgtcgttaaacctcgaacaggcgtccgatatcgtcgagcgaatgggcagcgagatcgccgataaatcgctggcggcgcggcgcgccttctcggtagaagggttaaaggagctggacgccctgtacgatctgctgctcagcaacctgcagctggcgatgtcggtcttcttctccagcgatgtgcccagcgcccgccgcctgcggcgcagcaaacaccggttccgcattcttaaccgccgctactcgcatgcgcacgttgaccgtttgcatcagcagaacgtgcagagcatcgaaaccagtacgttgcacctggcgctgctgggggatatgaagcgtctgaacagcctgttctgctcggtggcctacagcgtgatggagcagccggatgaagacgacgaacgggatgactactga

SEQ ID NO: 136400 - DNA, 831 bp, Enterobacter cloacae
atggccacaacccccattcccgcgaaacgcggcagaaaacccgcggctgccactgcccagcaggctggcggtcaggttcagtcgctgacccgcggcctgaaattactcgaatggattgccgagtcccacagcagcgtcgcgctgaccgaactggcgcagcaggcgggtctgcctaactccacgactcaccgtctgctgaccaccatgcaacagctgggcttcgtccgccaggttggcgagctgggtcactgggccgtcggggcgcatgctttcgtggtcggcagcagctttctacaaagccgcaatctgctggccattgtccacccgatcctgcgccagctgatggaagattccggtgaaacggtgaatctggcggtgctcgaccagagcgaccaccaggcgatcattatcgatcaggtgcagtgcacccagctgatgcggatgtcggcgccaatcggcggtaaactgccgatgcacgcttccggcgccgggaaggcgtttctcgcgcagctgagcgaagagcaggtcaccagtctgctgcaccgtaaagggctgcatgcctatacgcatgccacgctggtctccccgctgcatctgaaggaagatttagcccagacccgcaagcggggctactctttcgatgatgaggagcacgcgctcggcctgcgctgcgtcgccgcctgcatttacgatgaacatcgcgaaccgttcgcggcaatctccatctcaggccccatctcgcgtatgaccgatgatcgggtgactgagctgggcgcgctggtgatcaaggcggcgaaggaagtgacgctggcgtatggcggggttaaataa

SEQ ID NO: 136401 - DNA, 1785 bp, Enterobacter cloacae
atgacgcgtggtctggaattactgattgcccaaacgatattgcagggatttgacgcgcagtatgggcgttttcttgaagtcacttccggcgcgcagcagcgctttgaacaggctgactggcacgccgtgcagcaggcgatgaagcagcggatccatctctacgatcaccacgtgggcctggtagtagagcagctgcgctgcatcaccgaagggaaaagcaccgacgtcgattttcttctgcgggtgaaacagcagtacacccaacttttaccggattaccctcgctttgaaattgctgagagctttttcaattcggtctactgccgcctgtttgaccaccgctcgctgacccccgagcggctctttattttcagctcgcagcccgagcgaccctttcgtaccctcccgcgaccgctggcgaaagatttctttccggaacgcggttggtcgcacctgctgggtaaagtactgtccgatctgccgctgcggctaccgtggcaaaacaaagcgcgggatatcggctatatcattgccagtctgcaggaggcgctgggggaggaactgctcgccacctgtcatctgcaggtcgccaatgagctgttctaccgcaataaagccgcctggctggtgggcaaactggtcatgccgatggcgacgctgccttttttgctgccgatccaccgcagcgaagagggtgagctgtttgttgacacctgcctcacaacccatgccgaagcgagtatcgtttttggcttcgcgcgttcctattttatggtttatgcgccgttgcccggcgccctggtggaatggctgcgcgagatcttgccgggtaaaacgacggccgagctgtacatggcgattggctgtcagaagcatgccaaaaccgaaagctatcgcgaatatctacactacattactcgctgcgatgagcagtttattgaagcgccgggtattcgcgggatggtgatgctggtgtttaccctgccgggctttgaccgggtgtttaaggtgatcaaggaccgcttcgcgccgcagaaagagatgaccgccgcccatgtgcgggcttgctatcagctggtaaaggagcatgaccgcgtcgggcggatggcggacacccaggagtttgaaaatttcgtgctggataaacggcaaatcgcgccggcgctgctggcgctgctgcaggcggaagcggggaacaaactcaccgatctcggcgaccgcatcgtcatcagccatctctatattgaacggcgaatggtgccgctcaacctgtggctggagcaggttaacggccaggcattgcgtgatgcggtagaagagtatggcaatgctatccgccagctggccgccgccaacatctttcccggcgatatgttatttaaaaacttcggcgtcacccgccatggccgggtggtgttctacgactatgatgaaatctgctatatgacggaagtgaattttcgcgagatcccgccgccgcgctatccggaggatgagctggccagcgagccgtggtacagcgtttcgcctggcgatgtgtttccggaggagttccgccactggctgtgcgccgacccgcgcattgggccactgtttgaagagatgcatgccgacctgctgcgcgccgactactggcgcgcactgcagatgcggattaaaaacggccatgtggaagatgtctacgcctaccggcgcaagcagcgttttagcgtgcgctatggcgccgacagtagaccggataaggcgtttacgccgccatccggcaaggtgcgccgatctgcctga

SEQ ID NO: 136402 - DNA, 1320 bp, Enterobacter cloacae
atggagcatctgcacatgaaaacccgtacccaacaaatcgaagaattaaacaaagaatggacgaacccgcgctgggaaggcattacccgtccctacagcgcggaagaggtggtgaagttacgcggctcggtgaatccggaatgcacgctggcgcagcttggcgcggcgaaactgtggcgtctgctgcacggggaggcgaaaaaagggtacgtcaacagtctcggcgcgctgaccggcggccaggccttgcagcaggcgaaggcgggtatcgaagccatttatctctccggctggcaggtggcggcggatgctaacctggcgtccagcatgtatccggatcaatcgctgtatccggccaactcggtaccggcggtggtggatcggatcaacaacaccttccgccgcgccgatcagatccagtggtcagcgggaattgaaccgaacgatccgcgctttatcgactacttcctgccgatcgtggcggatgcggaggccggttttggcggcgtcctgaacgcctttgagctgatgaaatcgatgattgaagccggtgcagcggctgttcacttcgaagatcagctggcatcggtgaagaagtgcggccatatgggcggtaaagtgctggttccgactcaggaagcgattcagaagctggtggcggcgcgtctggcggccgacgtgatgggggtcccgacgctggtcatcgcccgtaccgatgccgacgccgcggatttaattacctcagactgcgatccgtacgatcgtgagtttattaccggggatcgcaccagcgaagggttcttccgcacccacgccgggatcgagcaggcgatcagccgcgggctggcctacgcgccgtatgcggatctggtgtggtgtgaaacgtcgaaaccggatctcgagcaggcgcgccgctttgccgaggctatccatgcgcgtttcccgggcaaactgctggcctataactgctcgccgtcgtttaactggaagaaaaatcttgatgataaaaccatcgccagcttccagcagcagctgtcggacatgggatacaaataccagtttattaccctcgcggggatccacagcatgtggttcaacatgttcgacctcgcccatgcctacgctcagggtgaggggatgcgccactatgttgagaaagtgcagcagccggaattcgccgccgggccggaaggctacaccttcgtctcgcatcagcaggaggtgggcaccggctacttcgacaaggtcaccaccattatccagggtggcacctcgtcggtaacggcgctgaccggctcgaccgaagaagagcagttttaa

SEQ ID NO: 136403 - DNA, 1602 bp, Enterobacter cloacae
atgacgcagcaggcgacaatcaccgatgaactggcctttagtcagccctatggcgagcaggagaagcagatcttaacgcctgaggcggtagaatttctgacggaactggtgagccgctttacgccggcgcgcaataagctgctggccgcgcgtttgcagcaacagcaggctattgacgacgggcagcttccggattttatttcggaaactgcttccattagaaatggcgactggactattcgcggtatcccggctgatttgcaggatcgccgcgtggaaatcaccggccccgtcgagcgcaagatggtcattaacgcgctgaatgccaacgtcaaagtctttatggcggactttgaggattcgctggcgcctgactggcgcaaagtcattgatggtcaaatcaacctgcgcgatgccgtgaacggaaccatcagctacaccaacgaggccggcaaaatctatcagttgcagcccaatcccgctgtgctggtatgccgtgtgcgcggcctgcacctgccggaaaagcatgtgacctggcgtaatgaggcgatccccggcagcctgttcgattttgcgctctatttctttcataactaccaggcgctgctggcgaaaggaagtggtccctacttctatctgccaaaaacacaggcctggcaggaggcggcatggtggaacgatgtcttcagttttacggaagatcgctttgacctgccgcggggcaccatcaaggccacgctgctgattgagacgctgccagcggtgttccagatggatgagatcctgcatgcgctgcgcgaccatattgttggcctgaactgcggccgctgggattacatcttcagttatatcaagacgctgaaaaaccatccggatcgcgtactgccggaccggcaggtggtgacgatggataaacccttcctcagcgcctactcacgcttgttgattaagacctgccacaaacgcggcgcgtttgcgatgggcggtatggcggcgtttatcccgagcaaagataccgaacgtaaccgccaggtgctgagtaaagtcaccgccgataaagagctggaggcaaacaacggtcacgatgggacctggatcgcccacccgggcctggcggataccgccatggcggtgtttgaccgcgtgctgggcgataagccgaatcagctctcggtcgcccggagcgaggatgcgccaattaccgctgaacaactgctggctccctgcgagggcgaacgcacggaagccggaatgcgcgccaacattcgcgtggcggtgcagtacatcgaagcgtggatctccggcaacggctgcgtaccgatttatggcctgatggaagacgccgcaacggccgagatctcgcgcacctctatctggcagtggatccatcatcagaaaaccctgaacgacggtaccccggtcactaaggcgctcttccgccagtggctggcggaagagctgatggtgattcaggaggagctgggagagcaccgcttcagccacggccgctttgacgatgcggcgcgactgatggagcagatcaccacctccgacaagctaattgattttctgacattgccgggctaccgcctgctggcctaa

SEQ ID NO: 136404 - DNA, 930 bp, Enterobacter cloacae
atgccaattcgggtgcaggacgagctgccagccgtcaatttcttgcgcaatgaaaacgtcttcgtaatgacgacaacacgtgcaacgactcaggaaatccgccccctgaaggtgttaatcctcaacctgatgccgaagaaaatcgagacggaaaaccagttcctgcgtctgctatcaaactctccgctgcaggtggatatccagttattacgtatcgatgcgcgcgagtcgcgtaatacccctgcggagcatctgaataacttttactgtaatttcgatgagatctgcgatcagaactttgacggcctgattgttaccggcgctcctttaggcctggttgagtttaacgatgttgcttactggccgcagatcaaacaggtgctggagtgggccaaggatcacgtcacttcgacgctgttcgtctgttgggcggttcaggccgcgctgaacattctgtacggcattcccaagcagacccgcgccgaaaagatttccggcgtctatgaacaccatattcttcatccgcacgccttactgacccgcggtttcgacgactctttcctggccccgcactcacgctatgctgattttccggccggacttattcgcgactataccgatctcgagatcctcgcggagacggaagagggcgatgcgtatttgttcgccagcaaagataagcgcatcgcctttgtcaccggccacccggagtacgatgccaataccctggcaagtgaatatttccgcgatgtggaagccggtttgaaccctgagatacctcataactatttcccacaaaacgacccgcagaacaaaccgcgcgccacctggcgcagccacggcaatctgctgttcgctaactggcttaactattacgtctaccagattacgccatacgatctgcgtcatatgaatccgacgctggaataa

SEQ ID NO: 136405 - DNA, 462 bp, Enterobacter cloacae
atggttattaacatccgccgttcccggcctgatgaaggggataaactgactgcgatctggtgtcggtcggtcgacgccacgcatgattttctgacaaaagcgtatcgaaaggagttggaggagatggtacgcgcatttttaccggaggctccgctgtgggtggcggttaatacggaagaccagccgatcgcctttatgctgctgaccggagatcatatggatgcgctgttcgtcgatccggatgtccgcggctgtggcgtggggaagttgctgattgagcatgcgctgtcgttaacgccgaagctgacgaccaatgtaaatgagcagaatgaacaagcggtcgggttttatcagaagatgggttttagggtgacagggcgctctgaaacggacgatctggggcaaccgtatccgttattgaatttgatgtatgagcagcaggctgaagcagactacgattga

SEQ ID NO: 136406 - DNA, 678 bp, Enterobacter cloacae
gtgctgaagttccgcgattcaaaaaaatacaaagaccgcctggcgtccgctcagaaagagacgggcgagaaagacgcgctggtggtgatgaaaggtacgctctacgcgatgccggtggttgccgccgcctttgaattctcctttatggggggatcgatgggttccgtcgtcggcgcacgctttgtacgcgcggtggagcaggcgctggaagataactgcccgctgatctgcttctccgcctccggtggcgcccgtatgcaggaagcgctgatgtcgctgatgcagatggcgaaaacctccgcggcgctggcgaaaatgcaggagcgcggactgccgtacatctccgtgctgaccgacccgaccatgggcggcgtatcggcgagctttgcgatgctgggcgatctgaacattgccgagccgaaagcgctgatcggctttgccggtcctcgcgttatcgagcagaccgtacgcgagaagctgccgccgggattccagcgcagtgagttcctgattgaaaaaggggcgatcgatatgatcgttcgccgtccggaaatgcgtctcaagctggccagccttctggcgaagctgatgaacctgccggcgccggttgccgtttcggaagcgcctcatgaaggcgtggtggtgccgccggcaccggatcaggaacctgaggcctga

SEQ ID NO: 136407 - DNA, 1269 bp, Enterobacter cloacae
atggaaaaagatcctattcctcaggccacgtcgcccctggctacgtggctttcttatctggaacatctgcacagtaaaaccatcgaccttgggctggcgcgcgtcagcgaggtcgccgggcagatggatatcgttaaaccggcgccgttcgtttttaccgttgcgggcaccaatggcaaaggcaccacctgccgcacgctggaaaccatcctgatggcggccggttataaagtgggggtctacagctctccgcatctggtgcgctacaccgaacgcgtgcgcattcagggggctgaactgccggaggcggcgcatacggcttcgtttgctgaaatcgaagcggcgcggggtgacatctcgctgacctattttgaatacggcacgctctcggcgctgtggctgtttaagcaggcgcaactggatgtggtgatccttgaggtcgggctcggcgggcgtctcgacgccaccaacatcgtggatgccgacgtcgcagtggtcaccagcatcgccctcgatcataccgactggctgggcccggatcgtgaaagtatcggccgggaaaaagcgggcatctttcgcgccggtaaaccggcggtggtgggggagccggatatgccgctcaccatcgcggaagtggctagcgagaagggtgcgctgctccagcgccgcggcgtcgactggcgctatgaggtggaaggcgaaacgtggtccttccgcgatacggcaggggcgttaagccacctgcctctgcctcaggtgccgttgcagaatgcggcgacggccgtggcggcgctgcgcgccagcgggcttgccgtggatgacgctatcctgcgcgcagggatccgcgatgcgatgctcccgggacgctttcagataattagcgacgccccgcgagtgatcctcgatgtggcgcacaacccgcacgcggcggcctatctcgccgggcgtctcaaaacgttagcgaaaacgggacgcgtgctggcggttattggtatgctgcatgataaggatatcgccggcacgttggccaatctggccccggaagtcgatgcctggtactgcgcgccgctggaaggcccgcgcggcgcgacggcagagcagctggtggaacatttgcgctgcggtacagtctatagcagcgtggcgcaggcgtggcgtgcggccatggctgacgctaaagtggaggataccgtgctggtgtgtggttcgtttcacaccgtagcgcaggttatggaagagatagacgcggggagaatcggtggcgagtaa

SEQ ID NO: 136408 - DNA, 690 bp, Enterobacter cloacae
gtggcgagtaagtttcagaaccgtttagtcgggacaatcgtgctggtggcgctgggggtgattatcctgccagggctgctggacgggcagaaaaagcattaccaggatgagtttgccgcgatcccgctggtaccgaaaccgggcgatcgcgatgaaccggatatgttgccggcggcaacccaggcgttgccttcgcaaccgccggaaggggcggcggaagaggtgcgggcgggcgatgccgccgcgccatcgttagatccatcgcgtattccggtgaacagcaacagcttcgatgacgttcaggagccggtggtggccgcgaaaccgcagcccaagccgcagccgaaaccgcagccgcaacagcaggccgcgacgccaacgccgccgccggctaagccacagcagcaacagccaccgcagcagcaggcggccctgccggcgccgaccggcaaagcctatgtggttcagctgggcgcgttgaagaacgccgataaggtgaatgagattgtcggtaaactgcgggcctcgggtttcaaagtctatacgtcgccttcgacgccggtacagggtaaaattacccgcatcctcgtcggcccggatgcgtcaaaagacaagctgaaaggccagctgggcgatctgcagcagatctccgggcttagcggggtggtgatgggcttcaccccgaactga

SEQ ID NO: 136409 - DNA, 489 bp, Enterobacter cloacae
atggtctggattgattacgccattatggcggtgctgggtctttcttgcctggtcagcctgatccgcggctttgttcgcgaagctttatcgttagtcacgtggggttgcgcgttttatgtcgccagccattactacgctgacctgtctgtctggtttacgggctttgaggatgaacgggttcgaaatgggattgctattgcggcgctgtttatcgtgacgctcatcgttggcgctatcgtgaactatgtgataggccagctggtggagaagaccggtttgtcaggaaccgacagggtattggggatctgcttcggcgcgctacgtggggtgctgatcatcgccgctatcctgttcttcctggacacctttaccgggatggcgaagagcgatgactggcatcagtcgcagtttattccctattttacccccgtcatcagatggttttttgaatacctgcaaagctcgtcaagtttcttgcctaaagtatag

SEQ ID NO: 136410 - DNA, 1518 bp, Enterobacter cloacae
atgtgcggtattgtcggtatcgccggtgttatgccggttaaccagtcgatttatgatgcgctaacggtgctccagcaccgtggacaggatgccgctggcatcatcaccattgatgccaacaactgcttccggttgcgtaaggctaacgggctggtaagcgacgtattcgaggcccgccacatgcagcgtatgcagggcaatatgggtattggccacgtgcgttatcctacggcgggcagctccagcgcctccgaggcgcagccgttttacgttaactcgccgtatggcatcacattggcgcataacggcaacctgaccaatgcgcacgagctgcgtaaaaagctgtttgaagaaaaacgccgccatatcaataccacctctgattccgaaatcctcctcaatattttcgccagtgagctggataacttccgtcactacccgctggaagcggacaacatcttcgcggcgattgcggcgaccaaccgcctgattcgcggcgcgtacgcgtgcgtggcgatgatcatcgggcatggcatggtggccttccgcgaccctaacggcattcgtccgctggtgctgggtaaacgtgacgttggcgacggtcgcaccgagtatatggtggcctcggagagcgtggcccttgatacgcttggttttgaattcctgcgcgatgtcgcgccgggcgaagcggtctatattaccgagaagggccagctctatacccgtcagtgtgccgataatccggtcagcaacccgtgcctgttcgagtacgtctattttgcccgtccggactcgtttatcgataaaatttccgtctacagcgcccgcgtcaacatggggactaagctgggcgaaaagattgcccgcgagtgggaagatctggatattgacgttgttattccgatcccggagacctcctgcgacatcgcgctggaaatcgcccgcattctcgacaaaccttatcgtcagggcttcgtgaagaaccgctacgtcggccggacgtttatcatgcccggtcagcagctgcgtcgtaaatctgttcgccgtaagctcaacgccaaccgtgcggaattccgcgataagaacgtgctgctggtcgatgattccattgtacgcggcaccacctcggagcagatcattgagatggcgcgtgaagcaggggcgaaaaaagtgtatctcgcctccgctgcgccggaaattcgtttcccgaacgtgtacggtatcgatatgccgaccgccaacgaactgatcgcccatggccgcgaagtggatgagatccgccagatcattggcgccgacggcctgattttccaggatctcaacgatctgatcgacgcggtgcgcgcggagaacccggatattcagcagtttgaatgctcggtgttcaacggcgtatatgtgacccgggatgtcgaccagcagtacctcgactatcttgactccctgcgtaacgatgatgccaaagcggtccagctgcagaacgaagtcgaaaacctcgagatgcacaacgaggggtaa

SEQ ID NO: 136411 - DNA, 1428 bp, Enterobacter cloacae
atggcatccaccaatgaagagctcgcttcagcacttaaaatgttctctcgttttttcgatctgatacatcaaccgctggccgtgattaatgaacgaggtgaatacgtgtattacaaccaggaaagcgcggatctggacgggtacagtattgaacaagcgatgggtaaacatatgctggatgtctaccccagtatgaaagaaaaccaaagtacaatgctttcttcactaaaagacggggttgagtatattggccattaccagatttactacaatgcccggggccaggcggtggattatcagcataccaccgccccgctctactccagcaagggcaatatggtcggtgtcatcgagatcggcaggaatatgtccggcgtccggcgattacaggaacaggttgttgagctcaaccatctgctttacgctcagggccatgaaaagcaccatgcaatcattactgaaaacgcggaaatgcttgccaatattgcaaaagctaaacgtctggcggtgagtaatattcccgtgacaattgttggcgaaacgggtactggcaaggagcttttttcccgtcttatccaccaatgcagtaagcgcgctaacaaacctttcattgccctgaattgtggagcactgccgccaaccctggtggaaagtacgctttttggcaccatgcgcggcgcttacactggcgcagagaacagtcagggctatctggagttggcgaacgggggaacacttttccttgatgaactgaacgcaatgccaatcgagatgcaaagtaagttgcttcgcttcttgcaagataaaacattctggaggctaggcggtcagcaacccatccattccgatgtgcggattattgccgcgatgaatgaggcccccgcgcgattaatccagcaagagcgactgcgcccggacctattttaccggcttaacgtcggaatgctcatgctgccaccactacgcactcgcccggaagatattcctctgttggctaattatttcattgataaatatcgcagtgaagttccgcaagatatccatggtctcagcgaggcggcacgcattgcgctactgagccatacctggccgggcaatgtcaggatgcttgaaaacgcgattgtccgcagcatgatcatgcaggagacagatggcatgctgaaaaagatcgtttttgaaaatgaagaactgagtttaggcggcccggaaaacccaacactgcactcctctctcccggcagcagaatcggataacgaaagttctctcgaggcgcgggtagcaagctatgaaagggggctaatagaaaccgcgctggatacttaccagggaaatattgcggcggcggcgcgcagtctcaacgtctcccgaacgacgctgaactataaggtacagaaatacggcattcgttttggtgtcgtacaccgttaa

SEQ ID NO: 136412 - DNA, 1398 bp, Enterobacter cloacae
atgactgactccattatcgaaaattacaatcaattacggcagaaagttgtcgaggacgatcgacgcttccagcagaaggacggccacctgtgttttgaaggtgtggatctcgatgctttagcgcgtaagtacccgacgccgttttatgttttctctgaaccagaaattattcgtaatatcaaagagatcgaacaggcatttgccgcacataaaaatacaaaaactttttttgcatcaaaaacctgttccgtcatgggggtactgaaagccattcgggatgctggaatctgcgccgaagcgaattcgcagtatgaagtccgtaaatgccttgagattggttttcgcggggatcagatcgtgttcaacggtgtggtgaagaagcccgccgacctggagtttgcaattgccaacgatctgtatttgatcaacgtcgatagcctgtatgaactggaccatatcgacgcgatctctcgtaagctgaagaaagtggctaacgtttgtgtgcgcgtagaacctaatgttccttcagccacacatgctgaactggtcactgctttccacgctaaatccggtctcgacctggaacaggcagaagagacctgtcgtcggatcctggagatgccttatgtccatctgcgcggattgcatatgcacgtaggtgatcaggtacctgaatcagaaccctttgccaaagccacgaaagttctggtggacgaatctcgtcgtctggaagaagtgttaggcattaagtttgatttgatcaacgtgggtggcggcattccggttccttataaatacgatgaagaaaacggcgacccgctcaaagacaatatgtatgccgggatcaccgcgcaggatttcgcggatgcagtgatccgcgaggtgcataaatggcgtactgacgttgaaatctgtattgagccagggcgcaaagtcactggctccgctgcggtattgctaacagaagtcgcctgtgaaaagcgtaaaacaaactatgaccttgatggcaatgtggagtgccacgttgaatggaagtttgttgatgcggggtacagcattctgtccgatagccagcatttcgactggttcttctatgtttacaatgcctcccgaatgaccgaggctcatgatgcatggatcaagcttgccggccctctgtgtgatggtggtgactatttccatatgggcgttaaaggagaagaattcctgatgccgaaatccaccgcgcccggcgatattgtcgcgtttcttgatgccggggcgtataccattgaaagccaaactgtctataacaaccgcccgcgttctgccgtggtgatgattgataaaaacggacatgaccgtttaattcgtcgggaagatagttacgaagatatggtcaagtacgacctttattaa

SEQ ID NO: 136413 - DNA, 1422 bp, Enterobacter cloacae
atgagtaacaatagttctggcttacttggtattaaagacattgtttttatgaatgtcattgccattcttagtttgcgacaaatacccaacgttgcgccttatggggcttctgcgatgctgttatgggtaattgccgcattttgtttgttctttcctctggcaatggtatgtggcgagctgtccaccggttggccgaaagacggtggtatttttgtctggattaaggaggcgtttgggaaacgtatcgcctggattgtggtggtttgtttcctgttttcatgtgtgctgtttttcccgctgatgctgcaattcggttttaccgctctgggatatatgattggtaatggtctggcagaaaataaggcattcatcggcattggttcggcagtcatcttctggctactgacgctaatgaatattcgcggtatggaatggacgaaaatcatcaacagcgtcagcgcctggtgtggtgtgtttattccttcggcgattttaattattctggcgattgtctggctgctcaccggtcatccgatgcagacgaactatacgagcgcatcaaactgggtgcccgatcttggacactgggataccattgtatttctgtccagtatgatgttcgcttttgccggtctggaggtcgcaccgatgatcgccgggcgcacccgtaacccgcagcgtgatttcccgcgggcgatggctgtttctgccgccgtcattgtcgggatatatatggttggtacctgggcactgaatacgctattaccagcaggaaaaaccgatattgttgctggtgtcatgcaggctatgcacgctgcagccgatactctccatatgccatggctgattccggtgatggctatctgcatgtttttcggcgcgttgggccagattaactcatggctggttggccctatctacatgcttcaggaagcttctcgtgaggataacctgttaggcgataaaattgcgcaattgcatcctgtctggaaaacgcctgcttttgcgctaatggttcaggcgattattgttacggtattgtgcttctcaacctttatctcgccaagcgttgcggcggcctactggatgctgactgcgctcaccacgataacctattttatcccctacctggtgatgttccccgcgttctggcgcctgcgcaaaacgcagcctgacacaccacgaagtttcaaaattccggggaaagtgctacctgccgtactacctgcattaggttttatttctatcgcctttgccgttgtgttgctgtttattccgccatcacaaatcgatatgggcgggtatttccagtatgccggcaagattattggtggggcattactggcgattgttgtcgctgaatggatttaccatcgcgctttaaaacgcaatacacgtctgggtatggtgaaggggaaataa

SEQ ID NO: 136414 - DNA, 1104 bp, Enterobacter cloacae
atgtatatgccaacgctcaaaatcaatttacgcaaactggaagaaaatgcgcgaactgagaaagctttgttagccagtagcggtattgacgttatggctgttaataaagtctttgatggctgtgtggaaactgcacaggcagtttttgatggcggaattcatgttattgccgaatcaagaacttataacttgaaaaaaatccgtgagatcggttgcacgacttgtttacttcgtagcccttgcctgagtgaaattgaagatgtcgttcgctatgcagacattagcctaaatagcgagccagtggtattgcgcgcattatcagaagaggctcgtcgccaggggaaaactcaccaggttctactgatgatagacatgggcgatttacgggaaggcatttggtttagcgaatatcaaaaaattctcgatactattaaccttatcaaaacattgccttgtctcgatctgtatggtcttggcactaatttcaactgctatggcaccgttctgccaacggtaaaaaacggcgaggatttcctggctctggcttctcgactggaacgagacagcggattgacgattcgtcgcttatctgccggtaattgtaccagctatcacctgctggataagggcatttggccgaaagggctgaaccatctgcgcattggtgggttacatgaatttggtatcgaatatgtagagatgaaatatctcaatgaatttcaccactccgcaaagcctgtagagaaagcgtgctcggatatgtatgtgctggaggccgagattatcgagttaaacagcaaaccgacagtcccggttggtgagctgggggtggatgcattcttgcagagtaaaacctttaccgataacggcatccgtaagcgtgcattactggcatttggtcgccaggatgtcccgtctgataactgtgtgccatgtcatgacagtatcaccattctggggcagaccagcgatcataccctggtggatattgaggattgcccattaccactgcaggtgggtgatgtgattagctttgaacttgattacaccgggctattgatggcttgccagaccaaaggcgttgctatccgatttattcgataa

SEQ ID NO: 136415 - DNA, 1386 bp, Enterobacter cloacae
atgagtaccctgcaagagccccctctgacagagcaaacgggtggattacgccgtaacttaaaaaagcgccatttactgatgatgtcgctaggcggaacgataggaacgggcttatttatcgggattgccgaacccctgtacagcgttgggcctgctggcactcttctggcttatttattagccggtgggataatgctggcgacgatgatgtgtcttggcgaattatcgtgcgcgtttccccactctggctcatttcagcattatgcattgatgtttattccaaacccgatctggagctataccatcgggtggctatactggtttagttgggtattttccctggctgctgatttaaccgctgcaggttttatcgcccaccattatttcaccaccatacctgtctatgaattctgtctttatattctcattgcattaacgctcgttaatcttttttcagcgaagagttttggtgagtgtgaatactggctatcggccattaaagtttttgctatcgtgttatttattgcggcaggaggtgtcatgatctattcgttatcaggacatgccggctggcacccgacattaaaaacgtcggggggctggtttcctcatggctggtggcaaattctggtttgcatgaccatcgttatctattcttttcagggagttgaactggtcggaaatgcggctggggaaaccgaatcgccccatacaattttaccgaaagttatcctgggaattggtattcggatcattttattttatggcctggcgattgctattctcgcgctggtttatccacgtgaacgactgcctgatgggcaaagtccttttgtttgggtcttttcccatgtgggcattccgggggcggataccttgatgacgttggtgatcttttctgcggcggtgtcggctgcgaattcggcaatttatgccagttcgcgaatgttatggtcgatggcgggcgaccatttcgcaccagcacgttttagccgggtaagccgcaatggcgtcccggtgaatgcgattttgctgactgccgttttggcactggtatcgatgcttacccgttatatttccgcacagcagttatatctctatttgatcgccagcaccgggcaggtagggtgtctggcctggattgtgattggctggtgtcagtatcgtttccggcgtgcggtggaccggggcgaatatccaagtagcctgctgcgctatcgctcccctttgtttccgtgggtggcggcaattgtgatagtcaccaatatcgccatcatcatcggcacctggttcagtcaatccggaatgttgattatgctgatagaattgttatttatgacctgcattatcgcgtcatggtttatattcaggcccatcctgaaatag

SEQ ID NO: 136416 - DNA, 633 bp, Enterobacter cloacae
atggttgcgtctgacagcgtaatccggcaaagtggccccaattatagcaacagggtggtccccgtgaaacgactgattattggcatttccggcgccagcggcgccatttacggcgtgcggatgctgcaggtgctaagagatgtgccggatattgaaactcatctcatcctcagccaggcggcgcgccagacgttggccatggagaccgactactccgtacgtgaggtgcaggcgctagccgatgtggtgcatgacgcccgcgatatcgccgccagtatctcttccggttcgtttaaaaccgccgggatggtgattttaccctgctcaatgaagacgctctcgggcattgtccatagctatacggatggcctgctgacccgggcggcggatgtcgtgctgaaagagcgtcgtccgctggtgctctgcgtgcgggaaacgccgttccatttgggccatctgcgtctgctggttcaggctgcagagctgggggcggtgataatgccgccggtaccggctttttaccaccggccacaaagcctggacgatgtcatcaaccagaccgtcaatcgggtactcgatcaatttgatattagtctggagcacgacttgtttacccgctggcagggggcctag

SEQ ID NO: 136417 - DNA, 783 bp, Enterobacter cloacae
atgaagaagacgattctggctctctctttactcgtgggaatgagcagcacggccagcgtgtttgctgctctgccgcagagcattcgcattggcactgacgcgacctatgcgccattttcgtcgaaagacgcgaaaggggactttgttggttttgatatcgatttaggcaatgagttgtgctcccgaattaaggtgaaatgtacctgggtcggcagtgattttgactccctgctcccctccctcaaagcgaagaaaatcgacgccatcatctcttccctctctattaccgagaagcgccagcaagagatcgccttctctgacaagctatatgccgctgactcgcgtctgatcgccgccaaagggtcgccgatccagccgacgctggaggcgctgaaaggcaagcacgtcggcgtgctgcagggttctactcaggaagcctatgctaacgaccgctggcgcagccagggcgttgacgtggtggcttaccagaaccaggatctgatctattcagacctcgcagctggccgtctggatgcggcgctgcaggatgaagtcgccgccagcgaaggcttcctgaaacagcctgccgggaaagatttcgccttcgccggcccgtccgttaaagacaaaaagtactttggcgatggcaccggtatcggcctgcgtaaggacgacgccgagctgaaagccgcgtttgataaagcgctgggcgaaatgcgtaaagacggcacctacgacaaaatggcgaagaaatacttcgattttaacgtgtacggcgactaa

SEQ ID NO: 136418 - DNA, 783 bp, Enterobacter cloacae
atgaaaaaactggcgttgtctctctctttagcgctggccctttccagcgtttccacggtctttgccgccatcccgcaaaaaattcgtatcggtaccgatccgacttatgctcccttcgaatcgaagaatgcgcagggagaattggtcggttttgatatcgatctggcaaaagagctgtgtaagcgtattaatacgcaatgtacctttgttgaaaacccgctggatgcgctgatcccctccttaaaagcgaagaaaatcgacgcgattatgtcttcgctgtcgattacagaaaagcgccagcaggaaattgccttcactgacaagctgtatgcggcagattcgcgtctggtggtgaaaaagggcagcccggtaacgccggatctcgccaccctcaagggtaagcgcgtgggcgtgctgcaggggacgactcaggaaacctatggcaatgagcactgggcgccgaaaggtatcgaaattgtctcctatcaggggcaggacaatatctattccgacctgaccgccggccggatcgacgccgcgttccaggatgaggtcgcggccagcgaagggttcctgaaacagcctattggtaaagattaccagtttggtggcccgtcaatcaaagacgagaaactgtttggtgttggcaccggtatggggctgcgtaaggaagacaacgaactgcgtgaagcgctgaataaggcgtttgcagagatgcgtaaggacggcacctacgacaagctggcgaaaaaatatttcgattttaacgtatacggcgaataa

SEQ ID NO: 136419 - DNA, 687 bp, Enterobacter cloacae
atgctgtatgggttttcacaggttattttgcagggtgcgctcgtcaccctggagcttgcgctcagctcggtcgttctcgccgtcctgatagggctggcgggcgctggcgcaaagttatcgagcaaccgtccactggcgctggtgtttgaaggctataccactctgatccgcggcgtgcccgatctggtgctgatgctgctgattttctacggcctgcagattgcgctaaacagcgttaccgacgcgctgggcatggcccagtttgatatcgatccgatgatcgccgggattattaccctcggctttatctatggcgcctattttacggaaaccttccgcggcgcctacctggcggtgccgaaggggcatatcgaagcggctaccgcctttggctttagcggcgggcagacgttccggcgtattctcttcccggcgatgatgcgctacgcgctgccggggataggcaacaactggcaggttatcctcaaggcgacggcgctggtctcgttgctggggctggaggatgtggtcaaagccacgcagctggccgggaaaagcacctggcagccgttctacttcgccatcgtctgcggcctgatttatctggtgtttaccaccgtttctaatggcgtactgctgctgctcgaacgccgctataccgttggcgtgaagagggctgacctgtga

SEQ ID NO: 136420 - DNA, 717 bp, Enterobacter cloacae
gtgattgaaattattcaggagtactggaaatcactgctgtggaccgacggctatcgctttaccggtgtggcgattaccttatggttgctgatctcttcagtggtaatggggggcatcctggcggtgtttctggccatcggccgcgtctcgagcaataagtttatccagttccccatctggctgttcacttacatatttcgcggcacgccgctgtatgtgcaactgctggttttttactccggcatgtataccctggaaatcgtcaaaggcacggagctgttgaacgcttttttccgcagcgggctaaactgcacggttctggcgttaaccctgaatacttgcgcctataccactgaaattttcgccggcgcgatccgctcagtacccgccggagaaattgaagcagcgcgggcctacggcttctcgtcagtcaaactgtatcgctgcattattctgccttccgcgctgcggattgcactgccggcctacagtaacgaagtgatcctcatgctgcactctaccgcgctggcgtttaccgctacggtaccggatctgctgaaaatcgcccgcgatatcaactcggccacctatcagccgttcaccgcgtttggcatcgccgcggtgctctatttaattatctcgtatgtgctgattagcttgttccgtaaagcggaaaagcgctggttgcagcatatcaaaccttcttcgacgcattga

SEQ ID NO: 136421 - DNA, 774 bp, Enterobacter cloacae
atgtccgacaataaattaaacgttatcgatctgcataaacgctatggggaacacgaggtgctgaagggcgtctcgctgcaggcgaaagccggggacgttatcagcatcatcggttcatcgggttccggaaaaagtacctttttgcgctgtattaacttccttgaaaaaccgagcgaaggcacgatcgtcgtcagcggccaaaatattggtctggtacgggataaagacggccagctgaaggtggccgacaagaaccagttgcgcctgctgcgcacccggttgaccatggtgtttcagcatttcaatctgtggagccatatgacggtgctggagaacgtcatggaggcgccgattcaggtgctgggcttaagcaaacaggaagcgcgcgaacgggcggtgaaatacctggccaaggtcgggatagacgaacgtcagcaggcgaaatatccggtgcatctttccggtggccagcagcagcgtgtctctattgcccgcgcgctggcgatggaaccggaagtgctgctgtttgatgagccgacctccgcgctggatccggaactggtgggcgaagtgttacgcattatgcagcagctggcggaagagggaaaaaccatggtggtggtgacccatgaaatgggctttgcccgccacgtctcttcacatgtcatttttctgcatcagggtaaaattgaagaagaagggcatccggatgcgctgtttggcgcgccgaaaagcccgcgcctgcagcagtttctgaaaggttcgctgaaataa

SEQ ID NO: 136422 - DNA, 528 bp, Enterobacter cloacae
atgacgaccatcaccacaccacgcctttcgcttacccgctttgttaccgatgactggcccttttttctgcgcctgcgccaggatccgcaggtgatgcgttttatgggggaggtgttaagcgaggaggcgctgcgcagcgtcttcgtcagtcgctgtgccgatcccggggtgtttgtattgcgcgataaattcggcgaggcgctgggcgatattgggctccgcatcagcccgaaaaatccgcacgaagctgacgtcggctacgcgctgctgcctcaggctcagggaaaaggctatgccagcgaagcgctgcgggcggtctgcgagtatggtttcaccaccctgggggtgcaggccatcaatgcctgggtgctgggtgaaaaccgtggctcatcgcgcctgctggagaagcaaggctttgtgcgcacccaggtgctggagaaagcctatcatctgaacggcgtcgattacgatgactggatctatcggctggagcgggaagctcatccggcgtccgcagacgccggatga

SEQ ID NO: 136423 - DNA, 894 bp, Enterobacter cloacae
atgaagatcctgcttactggtggtaccggcctgattggccgacatctgatacccagattgctggagctcgggcatagcgtcacggtctccacgcgacatccggataccgcccgcgcccgtctcgatctgcgcgtcaccctgtggcgcgatttcgagggccatcaccacctcaatgatattgatgccgtcatcaacctggcgggtgaacccatcgctgataaacgctggacggccgagcagaaacaacgcttgtgccatagccgctgggatctcacgcagcggctggtgggcctgatccacgccagcgacacccctccctccgtgctgatcagcgggtctgccatcggctactatggcgacctcggcgaggtggtggtgaccgaagaagagccaccgcacaatgagtttacccataagctgtgcgcccgctgggaacaaattgcctgcgaagcgcaaagcgagcgcacccgcgtctgcctgctgcgcaccggcgtggtactggctccgcggggcggtattctcggcaaaatgacacccgcctttaagctcggcctcggcgggcctatcggcaacggcagacagtacctggcctggatccatatcgacgatatggttaacggcattctgtggctgctggataacgatctgcgcggtccgttcaatatggtttctccctacccggtgcataacgagcagttcgcccatgcgctgggtcatgcgctccatcgaccggcgattttccgcgttcccgccgccgctatccgcctgttgatgggggaatccgccgtcctggtgcttggcggccagcgcgcgctgccaaagcgtctggaggccgccggctttgccttccgctggtacgatctggacgaagcgctaaaggatgtgctgagttaa

SEQ ID NO: 136424 - DNA, 363 bp, Enterobacter cloacae
atgtctcaaccagacgccattattcgtattaagaacctgcgcctgcggacttttattggtattaaagaggaagagatcgccaaccgccaggacgtggtagtgaatgtagccattcactaccctgccgataaagcgcgcgacagcgaggacatcaatgatgcgctgaactaccgcaccattaccaagcgcataatcagccatcttgagaatggccgtttttcgctgctggaaaaattaactcaggatgtgctgaatatcgcatgcgaacatcactgggtcacatatgctgaagtggagattgataaacttcatgcgctgcgctatgccgactcggtgtccatgaccatgagctggcgtcgctaa

SEQ ID NO: 136425 - DNA, 630 bp, Enterobacter cloacae
atgatcgatctttactatgcacccaccccaaacggccacaaaatcaccctgttcctcgaagaggcggagctagcctatcggctaattcgggtcgatatcggcaaaggggaacaatttcatccgcagtttctggcgatttcgccgaataataaaattccggctatcgtcgaccacatgcctgctgacggcggggcgccgttgagcgttttcgagtccggcgccatcctgctctatctggcggaaaaaagcggtaagctgctgagcggcgagctgcgggaacgctacgtcacgctgcagtggctgttctggcaggtcggcgggctggggccgatgctggggcaaaatcaacatttttctcactccgcgccgcaaaccgtgccctacgctattgaacgttttcaggtggaaacccaacgactgtatggggtgctaaatcagcgtctgggatgcagcccgtggcttggcggcgaccactacagtatcgccgacatcgccgcctggccctgggtgaactgccatgtccgacagcgtatcgatctggcgaactatccggcggtgcacaactggtatgagcgcattaagcagcggccggcaacggcggaagcgatgttaaaaattcagctttattaa

SEQ ID NO: 136426 - DNA, 639 bp, Enterobacter cloacae
atgagccagcctgtcattaccctgtggtccgatgccgattttttctcaccgtacgtgatgtctgtctatgtcgctctgcaggaaaaaagcctgccttttacccttaaaaccgtcgacctgaaccgcggcgaacatctgcaggcgggctggacaggctatgccgccacccgtcgcgtaccgctgctggaggttgatgatttcgcgctaagtgagtcttcggcgattaccgagtatctggatgagcgtttcgcgccgccggagtgggagcgcatctacccgcatgatctgcaaaaacgagcccgcgcccggcagatccaggcctggctgcgcagcgatctgatgccaattcgtgaagagcgatccaccgccgtggtgtttggcggggcgaaaatgccggacctcagcgaggccggcaggcaatctgcggaaaagctgtttgccaccgccaccacgctactggcccacggcgggcaaaatttatttggcgaatggtctattgccgacgcagacctggcgctgatgctcaatcgcctggttctcaatggcgataaggtaccggaggcgctggctgattatgcgtctttccagtggcagcgggcctcaatccagcgttacgtggcgctttccgccaaacgctga

SEQ ID NO: 136427 - DNA, 552 bp, Enterobacter cloacae
atgaagctgatgtttgcctccgatattcatggttcgctgcccgccacggaacgcgtgcttgaacggttcgcgcaaagcggcgccaggtggctgatcatactcggcgatgtgctcaatcacggtccgcgcaacgcgctgcctgaggggtatgcgccgggtgaggtggcggagcggttgaacagcgtggcggaacgcattgttgctgttcgcggcaactgcgacagcgaagtggatcagatgctgcttcgttttccaatgaccgcgccctggcagcaggtgcttagcgaacgctatcgcctgtttctgacccacgggcatctctatagtccggataatctgccgccgctggccgctggcgatgtcctggcatatggccatactcatataccggtcgcggaaaaacgcggcgcaatttacctctttaatcccggctcagtgagtatcccgaaagggggatattccgccagctatgggctgctggatcaggggcggctgcaggttttagcactcaatgataatcaggttattgcagaggttgcaatttacccgtaa

SEQ ID NO: 136428 - DNA, 552 bp, Enterobacter cloacae
atggcggaacagaatcatttggcaagcacagaatgggtcgatattgttaatgaaaacaatgaggtgatagcacagtccagccgcgagcaaatgcgcgcgcagtgcctgcgccaccgggcgacctatatcgtcgttcatgacggaatggggaaaattctggtgcagcgacgcaccgagacaaaagactttcatccgggcatgctggatgccaccgctggcggcgtcgtgcaggctgatgagcagctgctggaatcggcccgtcgcgaggcggaagaggagttaggcatcgccggggtgccgtttgccgatcacggccagttttattacgaagacaaattctgccgcgtctggggaagcctgttcagctgcgtctcccacgggccgttcgccctgcaggaagaagaggtcagcgaggtgtgctggttaacgccggaagagatcaccgcccgctgcgatgagttcacgccggactccctgaaagcgctggcgctgtggatgacccgcaacgccggtaatgagtatgatgatgcggaagagagcgagcgcgaataa

SEQ ID NO: 136429 - DNA, 1737 bp, Enterobacter cloacae
atgtctcagggcaccgacacgccagaacagctgaacgagcgtatcgaactgacccgtaacagctttggcggcgccaaaaataccagcatcaccggcgttatcgtcaacaaactgaatgcccctgtcgacgatcagggccgtacccgtcctgacctgtcggaaattttcgacgactcgtcgaaagcaaaaatcgtgaagattgacccggctcagctgcagaaaggcagcacgctgccggtgctgggcgcagtgccatggagcttcgatctgatcgcgacccgcgcgatcgacatggctcaccatctgaatgcgaccatcatcaacgaaggcgatatcaatacccgccgcgtgaaatccgtgactttctgcgcgcgcagcatcccgcacatgctggaacacttccgccctggttctctgctggttacctccgcagaccgtcctgacgtgctggttgcggcctgcctggcggcaatgaacggcgtggaaatcggcgccattctgctgaccggcggctatgaaatggacgcgcgcatcagcaagctgtgtgaacgcgctttcgcgaccggcctgccggtattcatggtcaacaccaacacctggcagacctccctgagcctgcagagctttaacctcgaagtaccggttgacgatcacgagcgtatcgagaaagttcaggaatacgtggccaactacatcaacgccgactggatcgaatcgctgaccgcgacctccgagcgcagccgccgtctctctccgccagccttccgctaccagctgaccgagctggcgcgcaaagccggcaaacgtgtcgttctgccggaaggcgacgaaccgcgtaccgtgaaagcggcggcgatttgcgctgaacgcgggatcgccacctgcgtcctgctgggtaacccggatgagatcaaccgcgtagccgcggcccagggcgttgagcttggcgccggcattgaaatcgtcgatccggaagtggttcgcgaaagctatgtgggtcgcctggtcgaactgcgtaagaacaaaggcatgaccgaagcggtcgcgcgtgagcaactggaagacaacgtggttctcggcaccctgatgctggaacaggacgaagtcgacggtctggtatccggcgcggttcacaccactgccaacaccattcgtccgccgctgcagctgatcaaaaccgcgccgggcagctcgctggtctcctccgtgttcttcatgctgctgccggaacaggtttacgtttacggcgactgcgcgatcaacccggacccgacagccgagcagctggcggaaatcgctattcagtccgctgaatccgcgattgccttcggcatcgaaccgcgcgtggcgatgctctcctactccaccggtacctccggcgcgggtagcgatgtcgagaaagtccgcgaagcgacccgtctggcgcaggaaaaacgtcctgacctgatgatcgacggcccgctgcagtatgacgccgcggtgatggctgacgtagcgaagtccaaagcgccgaactcaccggtagctggccgcgcgaccgtgttcatcttcccggatctgaacaccggtaacaccacgtacaaagcggtacagcgctctgccgacctgatctccatcgggccgatgctgcagggtatgcgcaagccggtcaacgacctgtcccgtggcgcgctggtagacgatatcgtctataccatcgcactgaccgcgatccaatcggctcagcagcagaagtaa

SEQ ID NO: 136430 - DNA, 705 bp, Enterobacter cloacae
atgaatcccaatacctccatcgtcctgaagccccgccgcggccgtccacccaaggtcgatcgccagtttgacgatacgcgtcaggcgctgattcgctcaggccttgaagtgctgaccgaaacgggctatctcgcggcgggtattgatgcggtgatcaagaatatcgccgtgccaaaggggtcgttttatcattgctttaaaagcaaagaggcttttggcctcgccgtgcttgccgcctatggcgacttctttgcgcataaattagataaattcctgctggacgacgccgtgccgccgctggaacgaatggcggcctttgtgcgtcatgccggtcagggaatggagaaattccagtttcgccgcggctgcctggtgggcaacctgctgcaggaagccccgttgttacccgagacgtttccccaacggttgatggctatcctggcggcatgggagtcgcgcgtggcgcgctgcctgcgcgaagcgcaggcagccggggccatcgccagcgacgcctcaccgcaggcgctggcccaggtgttctggatcggctgggaaggcgcggtgatgcgcgccaggctggtccagtctgccgcaccgcttaaccagtactgggatttttttgcgcacagtatgacaacaaaaacacctgcacaggacggcgctagcgccgataacccccttccgacgaggaatactctgtcatga

SEQ ID NO: 136431 - DNA, 978 bp, Enterobacter cloacae
atgaaagcattagttctggaccagatcgacaactgcaccgtcgccaccgtcaaagatatcgacctgcccgctcttgccgaaggcgacgtccgggtcgccatcgactggtcgagtctcaattataaagacgccctggcgatcaccggcaaaggaaaaattatccgtcagtttccgatggtgccgggcattgattttgccggtcaggtgaaagaaagccgcgatccgcgctttgttcccggccaggccgtgatccttaccggctggggcgtgggcgaaaaccactggggtggcctggccaccgaagcctgcgttaaaggcgactggctggttgctctgccggagacgctcagcgcgcgccaggcaatgatcatcggcaccgccggctttaccgcgatgctatgcgttgatgctctcgttagtgcgggcgtcacccctgacagcggggatatcctggtcaccggcgccagcggcggggtcggcagcaccgccgtggtgttgctgaaagcccttggctaccgggtgacggccgtatcgggccgggaatcgacacacgattaccttcgccagctgggtgccgatacgatcctgccgcgcagcgacttcgcggagacccgtccgctggagaaacagctgtgggcgggcgcggtggataccgttggcggcccggtgttggccaaagtgctggcgcaaacgcaatatcgcggctgcgtcgccgcctgcggtctggccgggggcttcgatctgccgaccaccgtgatgccgtttattctgcgcaatgtgcgtctgcagggggtggattcggtgatggtgccgaccgctgaacgcgacgccgtctggcagcgtctggcccagcttctgccggagagctactaccagcaggcggccactgaaatcacgctggagcaggcgccagcgtatgccgcagatttcctcagcaataatattcatggtcggacgctggtcaatatcggccagtaa

SEQ ID NO: 136432 - DNA, 933 bp, Enterobacter cloacae
atggatgtcataagcatcattatggcggcgggcaagtcgtccgttgacgtcgcgctgtatacgctgttgccgatcatggtgatcatgctgatcatcatgaaataccttgaggtccgcggtatcctcgatgtgattgttcgctgggtggccccgctgctgaagcccttcggcttaaccgggatgagcgccttcgccctgatccagattaactttgtcagctttgccgccccgctcgccacgctgtcgattatggataaacgcggcgtctcggaccgacaaatggccgccacgctggccatggtgttcgccatggggcaaggcaacgtcttctatcctcttaccccttttggtctgcactggctggcctcgatcgttatctcggtggtcggcggcctgtgcgcggccgccgtcgcctggcacgtcaccggacggcgcttatcggtcgccgagagcccccgcgcggaagcgctgccgaacgccgagcagaacagccagggaattctggccgtgattaacagcgccggctccgacgccatccgcctggcgctcggcgcggtgccaatgctgatcctgtcgttaaccatcgtcgggctgctgcagggcgccggggctatcgacctgctgcagcagctgctgaagccgcttctcagctggctgcacatcccccagaactttgtgctgccggcgctggtgaagtgcgttgccgggggcaccgcctactttggcgtcatttccgagctgatccagcagggcaaagtcaccgtggaccaagtcaacgcctcggcaggtctactgatccagacctttgatcttcccggtatcggcatttttcttggcatcagctcacggtttgtccgcctgttccgcttcgtggctcccgcggcgatcgtcggcatcctgctgcgtaccgttctgcacctgatcctgttttaa

SEQ ID NO: 136433 - DNA, 1623 bp, Enterobacter cloacae
atgaagcatctatttcgacactggcgaacgtcgggcgccgttatcggctcactgctgaaaaaagggagcattgcggtactggcgctgctggtggtctttctcgccgggcggatctatgagtcccagcgcggcccggccctgcatcgctggcatacctggagtggcaacgagatgtcggccgaagagatcgaccaggcgacctttgcccagtatctggcgcgggagaagacgattttcgccgatctccagcgtgaggtgacagaggctttgccggaggaagataaaaccccggtcaaccgcttttatcgtcacagccgggtctggccggggcagtttaagcaggactggaaccgttcttttgtgctgatgccgctgggcaagccgcgcggcagcgtggtgctcctccatggcctgaccgattcgccctacagcgtgcgctatctggcgcaactctggcagcagcggggttatgtggcggtggcgccgcgtttgccgggacacggcaccgcgccgggggcgttaacggcggttgactgggagacctggctggcggcgacgcgtctggcggtacgcgaagcgacccgccttgccggggcggacgtgccgctgcatctggtcggctactctaacggcggcgcgctggcgctcaagtatgccctcgatagcctggaggatagccacctgcgtcagccgcagcagattattctgctgtcgccgatgatcggcgtgaccgcgtttgcccgtttcgccggcctcgccgggctaccgtccgtcttcccggcgttcgcccgcgcggcctggctgaacgtggcgcctgagtttaatccgttcaagtacaactcctttccggtcaaggcggcgagacaatcgtggttattgagccaggcgctgcagcagcagattatccgcgcggcccggcagggcgagctgaaagcgctgccgccgatcctcacctttcagtcggtgatggattccacggtcagcacccgcgcggtggtggagtccctgtatcgctatctgccggataacggcagcgagctggtggtgttcgatattaaccaggcggcggatctccgggtcctgtttcgccctgcgctctatgcggcggtgaatacgctgctgcccccggcgccgcgggcctataccaccacggtggtgaccaacgcgacggcgcacacgctgcagaccgtcgcccggaccacgctggcccaggaacgggaagagcatcgttatcctttacacctggcctggccggcggatatgtactctttgtcgcatgtggcggtgccgtttcccctgagcgactcgctgtatggtcgcgagccggacgagcagaaccgctacggcattagcctgggcaccatttcactgcgcggagagaccgggacgctgagcgtggggctggagacgttaatgcgcgtcacctccaatccattctttccatggatgatgacgcgcgtcgatgagcgcatcgcctgcggcgaacaggcggcggtggcggcctacctgaaagcgcaggccagagcagaggcgttaaaacaggatcaggtgcagaacggtacgcagcaggatgccgacgatcgccgcgggagccacgaagcggaacaggcggacaaaccgtga

SEQ ID NO: 136434 - DNA, 246 bp, Enterobacter cloacae
atggagtggtgggtaaaaaaagtacaggacaacgcttcggccagcctctgccgcgtcgtgcttcagagcggtgcgctggagatgatcgcagagattgaagcctgtcgcctccgcctgcgggaaggggataaactcactccgctggccgatgcgcgctattgtctgaataataatccgacgcaaactttgaagatccgcaacgccactcattatagcagcgagcgttggacaaacgccggcaaataa

SEQ ID NO: 136435 - DNA, 1455 bp, Enterobacter cloacae
atgaatatcaaggccgccagtctgaccccggaacaagcgcttgccgagctggaagcacgctatgaagcctcggtcacggcgttacgcaaagccatcggcgactatatcgaccataatacgctccccgataccgaagcccgcgcggaaggtctttttgtctatccgcagctgtcggtctcctgggacggcgccgatcataaagccctcaaaacgcgcgcctggggacgtttcacccatgccggttgctataccaccaccattacgaatccgaaactgttccgcaactatttgctggaacagctgaccctgctgtatcaggactatggcgcgcatatcagcgtcgagctgtcgcagcatgagatcccctatccttacgtgatagatggttccaccctgacactcgaccgctcgatgagcgccggtctgacgcgctatttccctaccaccgagctgtcacaaattggcgatgagaccgcggatggcctgttccatcccaccgagttctatccgctgtcgcactttgacgcccgccgcgtcgatttttcgctggcgcgtctgcgtcactacaccggcacgccggcggaacacttccagccctacgtgctgttcaccaactatacccgctacgtggatgagttcgtcagctggggctgcagccagatcctcgatcccgacagcccctatatcgctctctcctgcgccggcgggatctggatcaccgccgagaccgaagcgccggaacaggccatttccgatctggcgtggaagaagcaccagatgccggcctggcatctgatcacccacgacggcaaagggatcaccctgattaacattggcgtcggcccggctaacgccaaaaccatctgcgatcatctcgcggtactgcggccggacgtctggttaatgatcggccactgcggcggcctgcgcgaaagccaggccatcggcgactatgtgctggcccacgcctatctgcgtgacgatcatgtactggatgcggtgctgccgccagatattccgatccccagcattgccgaagtgcagcgcgccctctacgacgccaccaagcaggtgagcgggatgcccggcgaagaggttaagcagcggctgcgtaccgggacggtggtcaccaccgacgaccgtaattgggagctgcgctattccgcttcggcgctgcgctttaatctcagccgggcggtagctatcgatatggagagcgcgaccatcgccgcccagggctatcgcttccgcgtcccctacggcacgctgctctgcgtctcggacaagccgctgcacggtgaaatcaagctaccgggccaggctaaccgcttttacgagggcgctatctccgagcatctgcagataggcatccgggcgattgacctgctgcgcgccgagggagatcacatgcactcgcgtaagctgcgcaccttcaacgagccgccgttccgttaa

SEQ ID NO: 136436 - DNA, 1437 bp, Enterobacter cloacae
ttgaacgtcacctccgccgtacgccaggccgtcgaacggacatcctggtttaaaaaacgtcagcgttatcgtgtgctgtactggcgcgaaatcagccctctcgctgtgcccattctgctggaaaatgcctgtgtgctgctgatgggggtgttgagcaccttccttgtcagctggctgggaaaagaggccatggccggtgtggggctggccgatagctttaacatggtcatcatgtccttctttgccgccatcgatctgggtaccacggtggtggtggcctttagcctcggcaagcgcgatcggcggcgggcgagggcggccgcgcgccagtcgctggccattatgaccctgttttccattttgctggcgggggtgatccatgcctttggccaggagattattgattttgtcgccggcgatgccaccgcccaggtcaaggacctggcgctgacctatctggaactgacggcgctgagctacccggcggcggcgattgcgctgatcggcagcggggcgctgcgcggcgccggcaccaccaaaatcccgctgctgatcaacggcgggatgaacatcctcaatatcttaatcagcagcgtgctcatctacggcatcttctcctggccggggctggggtttgtcggcgccgggcttgggctgaccattgcccgctatattggcgcgatagccacgatctgggtgctgatggtgggtctcaatccggcgctgcggctgtcgctgaagggctacttcaaaccctttaacttcgccattatctgggaggtgatggggatcggcatcccggccagtatcgaatctgtcctgttcaatggcggcaagctgctgacccagatgtttgtcgccgggatgggcaccaacgttatcgccggcaactttatcgccttttcggtggcctcgctaattaacctgccgggcaacgccctcggctctgcctcgacgatcattaccggcaagcggctgggaaaagggcagattggtcaggctgaattccaggcctggcacgtattttggctgtcgacgatcattctgacgctgatcgcctggggcagcgcccccttcgccggctttatcgcctcgttctacacccatgaagaagatgtaaaagaagtggttaaacagctgctgtggctcaacgccctgtttatgccgatctggtcgctgtcgtggactttaccctgcgcttttaaaggcgcccgtgacgtacgttacaccatgtgggtgtcgatgctcggcatgtggggctgccgggtggtggcgggctataccctgggcatcgtgctggggatgggggtgattggcgtctggttagggatggtgctcgactgggcggtgcgcggcgtgctgttttatttccgcatggtgagcggccgctggctgtggaaatatccgcgcgtgaaggcttcatcggaggaaagctga

SEQ ID NO: 136437 - DNA, 1104 bp, Enterobacter cloacae
atgaacctcagacaacagcaacagcaggcgttcgatcgcagcggagaacctcttatcgtcggcaacgtcagccactgcccgctgccgccggagaccctcgccgcactgggccccgattccccctatgtggtgcaggtatacggctcaggcctgaccggcgaggtttatcgtctgcgcatcgccggcaaggagtacaatttaaagaaacgtcgcgccgtcgccggcgttgccaacctcaacggccagctgtcgtttttaaatgaggtacagcgtcggcaggcattgcaacagctgaaggatgacccggtcaccgcgccgcgcttcacccacatcgtcccaacgctgtatgccgattatcgcctcggcatcctgctctccccctggatcgacggcgagccgatacaccagttaaccccgtcgctgatcgcccagctatttactactctggaagcctgcgaagagcaggggctgatggagtgggatctctgtagcgggaatctgctggtggaccggcaggagcagctgtggctgttcgattttggctatatgtatcccttcgacccgctgagagaattcaacagcaatggtctggccgacccgctgttccactttgtcgaacgttttgagactcgcttcttttttagctggctgatgaccaggatccctgacgccgaacagcagctggcgcactatcgcgagatgaagcggctggcggtcgaaagctaccgccggaagctcgtctggcttcgcgcccggcgcgctgacccgctggtgctggctcactttcagcagttgacggcgcgctgggagtcggcgctggcggaccctgccgcgctgagccggctgtttgccgtagaggcctttcgctcacatgtgctggatattgaagacgacctgcatggtcagtcctgtaccttactcaccctgcaacgcattgactgggtgataaaccagctggaacagcattatcgctttatcgccgacgaaggcggcctgttttacgataacgaagggaaatcgcagcaggcgttgctcagcagctatgcgcagaagcggcagcaggcgcagcagtacctgttgaatgccaccgccgcgaaggattaa

SEQ ID NO: 136438 - DNA, 972 bp, Enterobacter cloacae
atgaaattagccggacttcatcccgacgagcagcgtcgcctgcaatcgctacgctcttccgggctgttgaatagcggaaaagaagaacgcttcgatcgcctgaccaggcttgcccgttcgctgtataacctgccggtggcgtccatcagtctggtgggggaagatctcctgcatatcaagtcctgtgccggtctcgatgtggacacggtgccgagagatatttcattttgcgcccataccattctgcaaaccgacccgcttatcgtcaacgacatgcagcaggacgagcgctttcacgataacccgctggtcattgaggcgccgtttatccgcttttacgccgggtatccggtgcaactgccggatggcgcgaccgtcgggtcgttctgcctgatggatcaccagccgcgatcgttttccgcccatgaaatgcagatcttaagcgatctggcggcgatcgtggaggatgagttcaaggtgctggatgcggcaacctcggatgagctgacgggactgtttaatcgccggggattcctcaccctggcagagtatgccctgctgacggcccagcgccgccatgagccggtgagtctggcgtttgtcgacctcgatcgcttcaagcacatcaatgatacctgggggcatgaagagggcgatcgcgcgctgatcgccatcgccgacttgatgaaagcggccttccgcgagtccgatatcctcgcgaggcaggggggggacgaatttatcattctgttcgccaataccagccgccacgatgccgcgacggcgatggagacgctcagccacaacgtggcgcgtttcaaccagcaggcggccaatccctggcagctggcgttctcctggggctgcgtcgaatatgatcccgccagccatcccagtctcaacgcgctggtggccaccgctgaccgcctgatgtaccaggcgaagcagaagcagggacgcgagcgccgttaa

SEQ ID NO: 136439 - DNA, 837 bp, Enterobacter cloacae
atggcatttgtcaccacccaagacggcgtcaacatttactttaaagactggggaccaaaggaagctcagccgattgtttttcatcacggctggccgttaagcgctgacgactgggataaccagatgttatttttccttgccgaagggttccgggtcatcgctatcgatcgtcggggtcatggccgctccgatcaggttagcgaggggcacgatatggaccattacgcggcggacgtctcggcggtggtggagcatctggatctgcacaatgcggtccacgtcgggcactccaccggcggcggccaggtcgcccgctacgtcgcccgctacggtcagccgcaggggcgggtggcgaaggcggtgttaattagcgccgtcccgccgctaatggtgaaaaccgagcagaatccgggcgggacgccgatcgaggtgtttgacggtttccgcaaagcgctggcggcgaaccgcgcccagttctatctcgacgtcgcctctggcccgttctatggcttcaatcgtgatggagcagagatatcccaggggacgatccagaactggtggcgacaggggatgatcggcagcgccaaagcccattatgaaggcattaaggcgttttcagagaccgaccagacggaagaccttaagtcgatcaccttgccggtgctggtgatgcagggagatgacgaccaggtggtgccctataaaaatgcggccatcctgcaggacaagctgctgccgaacagccagctgaaaatttatcctggcttcccgcacgggatgcacacctcccacgccgataccatcaacgccgatctgctggcgtttatccgcgcctga

SEQ ID NO: 136440 - DNA, 180 bp, Enterobacter cloacae
atgcgggtcagcggcgccacggtgctgagcgtagctatcgccatcgcggcgacgctgctgacctggcatactgcgggaggaggacgccatggcgtctgctttgccttcgccgtgctgcttgactgggcgctgctcggcgcgctgatggtgcggatccgccagcaggagagtgcggcctga

SEQ ID NO: 136441 - DNA, 291 bp, Enterobacter cloacae
atgcacgttgtaagccgctacaccgccgcggaagccgcggcaacgatcgacccccgcggccgcgctatcgcccttagcgtggtcatcgccgccggggccttgctgttaatcatgcccccggttatcggggtgaccggcacgctgggtctgctgacggcgctgattgcggcctttggcgtcgggtggggatttacacgcggacaatcctggctttatcgctcacccctggcggcgacgcgctgggcctttctgctgtcagcggccggctggctgttggcgctggtggcctag

SEQ ID NO: 136442 - DNA, 915 bp, Enterobacter cloacae
atgagaccgccccgtctgccgccgctgggggcgctacgcgcttttcatgccgtcgcccgccaccgcagttttaaacaggccgccgaggcgctcagcgtcagcgcgacggcggtcagccatcagattaaactgctggagtcggtgctggagtgccgggtctgcgaacgcagcgcgcagggcgtcagtctgaccgctgatggcgagatcctttacgcggccacccaacgcgcctttagcgccctggaacaggccgtcgtccagatcgctcatgcccgtcagccgccatccttaaccgtcaccaccacctccaattttctcacccactggctggtgccgcggctggcggatttcaccgcccgctttccggctatcgacctgcggctacacaccagcgtcgaacgagtggatctgcatctgggcacggtagacgccgcgattcgctatcgtgaaaagccggagccggacctgtactgcacgctgctgtatgaggatcgctttatcgtggtcgccagcccaactctgggcctcagccggcctgaagatctgcagcaggtgacgctgtttcacgttgccaaccggcgcgtgccagctgattcgccgagctgggagaactggcgtcggcgctatggaccgccgacgctgaatattgatgcggggttaacctttagcgatgagacccatgccctgcaggcggcggtggccggtcagggagtggtgatcgccagcgaactgctggcgcgggatctgctgcagcgcggcgtattgtccgcgccgttcagcaacgcattgcctggcgcccgctactacctggtcactaccgaagcggtagcgcagcgggcggatattatcgctctgcgggagtggctgctcagccagatggcgtcgggcgacggcggccatccgactgcgggatag

SEQ ID NO: 136443 - DNA, 336 bp, Enterobacter cloacae
atgaccagtgaaaataaaggttataccttagcgctagagaatggccgacttcaccagaagcaggaaaaaatatttctcaaaccaatggtgttgtatattccacagcaggcggtggaggccgttaatgacctgctgagcaagttgccggacgacagggaagagggggagtttctgttgacggtcaccaataacaataacggcgtctcggttgataaaaccttttcctcgctggcggcgctccgcgacccactcaccgcggctgatgcggtgaaggatctgatcaatatcgttcgcggctacgagtccgatgaagagaccaacgtctgcggctggtaa

SEQ ID NO: 136444 - DNA, 333 bp, Enterobacter cloacae
atgcagcgaatcattattcccacccattacgttcacacccgcagcacgccgctgtggaccaaagagaccgccccggcctctatctggcgccgccatctggatgccggcacccggcagggcgtctaccctcgtctctcggtgatgcagggggcgatccgctatctcggctatgccgatgaaaccagccccgagcccgttgaaaccctgactattgaagccggccagtttggcgtctttccgccggagaagtggcactgtattgaggccctctcagaggacacggtttttaatgtcgacttttatgttgatccaaaaattctcatcgagggataa

SEQ ID NO: 136445 - DNA, 1788 bp, Enterobacter cloacae
atgtcgcaaatggtgtcggaatatatgcggctggagtctcgtctggcgggaatggcgattggggccgaaggggcggaccacgatgaggtgcgcctgcgtcttgagatcatgatgagccagatcgagcttctgcaggagggcgatctgggtaaatttatcaataaaagcgagcagcggaagacggtggttgcgacgctgattcgtaatcttcatctgctcgataaacaagttgataccatgacgccggagcaggtcagacagatcctgccggtgttaagcgagctggatggtccgctgacctcaatggccgccgccaccctgacgcaagatatcaatatcgttaatatcacccatgataaaatccagcatctctattatatctactcggtgatctccattctgctgatcgccatgtgtataactctcggtctgctgatgctccgacagaataataatctgcgtcgcgcccatgttcgtatgaaaacgctggccaacgatctgcaggcctcgaaagagaagctgcaggtgcagaaccgccgactgcagtacgatgcctaccatgattcgctgaccggtatgcccaaccgtctctctttctggcagcggctgcaggagatcgtcaaccaggtgcgtccgtataagggatgcgccgtggtgatgcttttcgacctcgacagctttaaggatgtgaacgatacccttggccatgatgctggcgataagctgctgcaggatctggccagtcgcctctcttttttccgcaaaacctccgagacgctgtatcgccttggcggtgatgagtttgcgatgctctcctacgatctcactgaagagatggcccttgagcgggccaatgttatccgggagaagatcagccagccctatcagatctacgatgcgcagattaatatcgacgcctgcattgggatcgtgatctctgacggtgaaagccgtaccgattatctgtacaagtgcgccgacctcgcgctgtatgaggcgaaaaaagagggtagcggccatgtgcaaatcttccggccggggatgctgcagcgcctgcaggagaacaaatcgtttgaagacgatctgctgcaggccctggcccatgacgaattcaaagtctactatcagccgatcgccgataccgtcacgcgcgaaatctacggctatgaagcgctggttcgctggttccatccggtgcgcggcgccgtgccgccgacggtgtttattccggtggcagagaaaatcggtcttattaatgcccttggcgaatgggtgctgaaaaccgcctgtgccgaagcggccagctgggcgacgccgctgaaggtctcggtcaacgtttcaccaattcagttgatgaatacatcgctgaccgacaccattatcgaggtgctgcatcagaccggcctcgatccgcgacgtcttgatctggagatcaccgagtcggacgtattcaatgagaacacccgttcgctggaaattctcagccagctgcgcgagcagggcattcagatctccatcgatgactttggtaccggctattcttccctgtcccgtttaagctacttcccgttcgataaaattaaaatcgaccgctcgtttgtcatcaatattccggaacaaaaagacgatctggatatcgtccgcctgattatcagcatgggaaagagcctgcatatgcgcattgtggcggaaggtgtagagaccgaagagcagttggcttcgctgcaggcgctgggctgtgacctggttcagggatatttaatcggcaaaccgagtccgctgcgctaa

SEQ ID NO: 136446 - DNA, 381 bp, Enterobacter cloacae
atgaatgtcggcgacaaggccgtttttgatctcgcaatgctggaaaaactggggatgaagacgatagaaaccaccaccccctggtacaccggcaaggttcgttttgacggtattccccttaataaactcatggatttagtcggcgcgaaaggcacatcggcccgcgtgctggcgctgaacgactacaccaccattatcccgattgatgatttttataaattcccggtcattatggcgttaaaaatgaacggtcaatatatgcgcattcgtgataaaggcccgttatttattgtctacccttacgacagcagtgctgaattacagaaccagatctattattcccgatcggcctggcaagtttcaaagatgattatagaataa

SEQ ID NO: 136447 - DNA, 1320 bp, Enterobacter cloacae
atggattcaacaataagcgtgcagcccggcgaggcgccagattcactacatcgggcccggcgggcggcctggggtagctttgccggcgcggtggtcgactggtacgattttcttctctatggcattaccgccgcgctggtgttcaaccgcgaatttttcccgcaaatcggcccggcgatgggaacgcttgccgcctttgccaccttcggcgttgggtttctttttcgcccgctcggcggaattatttttggccacttcggcgatcgcctcgggcggaaacggatgctgatgatgaccgtctggatgatgggtatcgccactgcctgcatcggcctgctcccctcgttcaaccagatcggctggtgggcgccggtgctgctggtgttcctgcgagcggttcagggattcgccgtcggcggcgaatggggcggcgcggcgctgctctcggtggagaatgccccacaggggaaaaaagccttttacagcagcggggtgcaggtgggctacggcgtcggcctcctgctctctaccgggctggtatcgctgattagcagcctgaccagcgaccagcagttcctcagctggggctggcgcttaccgttcctgttcagcgtggtgttggtccttattgcgctgtggatccgtaacggcatggcggaatcgcaggagtttgaagcgcagcagagccaggacaacgcgccgcagatgaaaaagcggctaccggtagtggaagcgctgcttcgccatccgggagcgtttttactgattatcgccctgcgcctgtgtgaactgctgacgatgtatatcgtcaccgccttcgccctcaactactccacgcaaaacctcggcctgccgcgcgagctgtttctcaacattggcctgctggtgggcggtcttagctgcctgactatcccctgtttcgcctggctggcagaccgctttggccgtcggcggatctatatcaccggggcgctgatcggcactttgagcggtttcccgttttttatggcgctggagagtcagtccgttttctggatcctgttcttcgccctgatgctggccaatatcgcccatgatatggtggtctgcgtccagcagccgatgtttaccgagctgttcggcgccagctatcgctatagcggcgccggcgtcggctaccaggtggcgagcgtggtcggcggcggctttaccccgtttattgccgcggcgctggtcaccttctccggcggatcgtggcacagcgtggccctctatctgaccgcaggatgcctgctgtcagcgctcaccgcgctgctgatgaaaaagcaccccgtcgactga

SEQ ID NO: 136448 - DNA, 741 bp, Enterobacter cloacae
atgtctcagttaaccctggccgactgctggcctcgccgtttttccccctcctcgctggcgctgcagttttgcgaggatcccacccaggccgaacagccgctgtttgctaaagccagcgccggcgaggccgtcgcccagctctggcaggcgccgcagggattggtggtgccggggagctatcgtcagtttacggatctgccggcggtcagcgcgcattttgccgcgcgcggctggccggtatggcttcgccgctccggcggcggtctggtgccccaggggccgggcattatcaaccttagcctcgcctggccggtgcagcagccgctcggcgaagccgccgaaccgatctatcattcgctgtgcgctgtgctgcagcgcaccctcgcgcgcttcggcgttgccagccacccccgggcggtgagcggttccttttgcgatggacggtataatcttgcctgcggagaaggcgcggaggcgcgcaagattgtcggtaccgcccagtactggcggccgctggcggcgggcggcggccacgtggtgctggcccatgcggtgatccttgttgacgccgatctgagcgcggcgcatcaggcggcgaacgccttcgaagcgcagctcggcagcgagcgggtctattgcgctgacaagaccgttactctcgcgcagctgcttcccggcgagcgccatctgctgccccgctttagcgagacgctggcgcaggagctggacgcggctcgctga

SEQ ID NO: 136449 - DNA, 957 bp, Enterobacter cloacae
atgagcgagagtcgtccggagagttactggctccatctgtactggctgacggtgctggaagaacaaaaaagctatacccgggccgcggaaaagctggggatcagcaagtcggctatcagccagaaaatcagcgagctggagcgggtgaccggtaaaaccctcgtccatcgcaccacccgcagcgtgagcctaagcgacgacggactgcggctggtggcggagctcaacgagccgtttggtcagctgcgggatattttcaccggcgcttgcgatgagggcgggccgctgcggggaacgttgcgcctgaccgcgccggtggccttttcccgccagcagctggtcccggcaatcgcgccttttttgcatcagcatccccagctgcatctgcagcttgaggtcaccgaccggctggtctctctggccagcgaagggttcgatctcgccatccgccactgtcgacgcgaggcgctccccgatacccacgtcgcctggccgctgtgtcacaccgcgacgcttaccgtcgcgtccgccgactatattcgccgccatggccgcccggagacccccgaagatctgcgccaccaccaatgcctgacctatccccgtgggccacagcgcccgcagtggacgttcgcctcccgtcagtcgcccgatgctcgggtgaccatcaacgtgcaggggccattcgccaccaataacagcgagtcgctacgtgatgcagtgctggcggggcttggggtggcgctgttgccggatttcagcgcccgggaggccattggccgcgggctggtgcaggagctgctgccggcgtggcagccggtggaggtgtttgccgatcggctgtacgtcatccggccctataccccgcgcgtgtcgcgcgcggtggaaaccttcagccgctatctgaaagcgaccttcagcgagccgcgtccagctcctgcgccagcgtctcgctaa

SEQ ID NO: 136450 - DNA, 390 bp, Enterobacter cloacae
atgccattactgacatttgacctgattgaaggccgtacggaacaggaggtcaaaaccctgctggatgccgcccatcgcgccgtgctgcgcgcctttgaggtaccagaacgcgaccgttaccagattgttcatgaaaacaaagcccaccatatggtgattgaagataccggcctcggactgacccgcacgcgggatctggtggtggtacgggtctataccagcccgcgcagcgaggcgcagaagcagcgcttcttcgccattttgcaggaggagctggcggaacactgcggcctgagcagcgatgatctgatggtgtcgattatcagtaaccagaaaggcgactggagctttggccgcggggtcgcgcagtatcttaccggcgatctgtaa

SEQ ID NO: 136451 - DNA, 732 bp, Enterobacter cloacae
atgttgagtgttattcctgcggggatattttcacggctgcggattttccttggccgcctgaagccgcacgcgctgccggtggcccgccggcatatcgtgctgggatccattggcgccggcaccggactggcggtgaccagcatgttcagccactggctgctcggcgaagtcaatctgtggtttattgccccgatgggggcctcggcggtactcctgtttggcgtaccgagcagcccgctggcgcagccgtggtcgattgtcggcggcaacgtgctgtcggcgctgatcggcgtcacggtgggtatgctggtccccgatgcggcgctggcctgcggtctggcggcggctctggccatcgccgggatgtattttctgcgctgtctgcatccccccggcggcgcggtggccctgacggcgatcctcggcggcgccggggtgcacagcgaaggctatcactttgtgctgaccccggtgctcctcaactcgctgatgctggcgctgctggctattgtgtttaataacctggttggccgccgttatccgcatccgctggcggcggaggaggtcaaatccagggcggtgccgctgggtatttcggtcacccgggaagatattcacgccgcgctgctggaaggccagttcctcgacattgatgaagacgatgtccaggagttgctggagaatatcgagcagcaggcgcggcagcgtatcgcgacggcagcccgccgctaa

SEQ ID NO: 136452 - DNA, 1110 bp, Enterobacter cloacae
gtgaataataaaatctctttagcgaaagaagtggcatgggccagccagaatatgccgcgtaccctgcgtcaggtcgccgcgctgcccgacctcagcggcgtgcgtctggcctgctgtatgcacctcgacatgaaaatgatcccgctggtgcaggggatcctcgacaagggcgctcaggtctttttaaccacctgtaaccccaccaccgtgcaggacgacgtggtggcctggctggtggagcgcggcgccgaggcctgcgcgtggcgcaatatgagcgatgccgactggcaacagtcatgggaaaaagcgattgcctggcagcccactcacctgtgcgagatgggcgccgatatcaccaccctgctccaccagcgcggcgagtttgggaacatcgtggcgggtctggaagccaccggctcgggcgtcaatcggctgggggatattcagccaggctatccgatctttaactgggacgatctgccggtcaaagaggggctgcacaaccgccatatggtcggtctcactgcctggcacaccttcttccagaccactcacctcaccctgcatgagaaaaaagtgctggtgatcggctacggcctggtcggccagggcgtcgcggcggcggcaaaagcttttggcggtcaggtgatggtggcggagatcgatcctgcccgccgtctacaggcggcctacgacggctggcacgtggtggacctccaggaggctatcgcctcggcggacgtggtggccacggcgacaggcggtaaaaacgtggttaatcgccaggcgctggaccgggcgaaagcgggagtatttatccttaacgtcggccacgtggcggaagagatcgacggcgagtacctgcgccagtacccccaggaagaggtgatgccgtatatcaacgcctaccgcatggccgacaaaaccctctatctgctggccaatggttcgatgctcaatctgaccgctggcttcggcgacagcctgaacgcctttgacgtcaccctggcggtgatggccagcggcatccgccatattgtcaccgacggcatgcgcgccccggcgaaggtttatctcctgccccaggcggtctggcagcaggccctgtaa

SEQ ID NO: 136453 - DNA, 570 bp, Enterobacter cloacae
gtgaaagccttcggcgtcggcgaattgggaatggccaataccaccccggccgcagcgacgatcagtgtcctgacgggcagcgaccctgacgcggtggtgggctgtggggctaatctgccgctggcgcagcggggccataaggtggcggtggtgcgccaggcgatagcccataatcagccgaacccggcggacgggctggatgtcctggcgaaggtggggggttacgatctggtgggcatgaccggggtgatcctcggggcggcctcctgtggcctgccggtggtgctggatggcttcctctcctatgcctctgccctggctgcctgccgcatggccccgtcggcgcacccttatcttattccttcacacctgtcggcggagaaaggagcgcagatcgccctcgacgcgctgggtctgcggccgtatctcgatatggacatgcgcctgggagagggcagcggcgccgcgctggcgatgcacctgctggatgccgccagcgtgatgtacaaccagatgggaacgctggcgcagagcaatattgtgttgcccgatagcgcgccgtcatcctga

SEQ ID NO: 136454 - DNA, 696 bp, Enterobacter cloacae
atgttagaagatcttaaacgccaggtgctggaagctaacctggctctgccaaagcataatctggtgaccttaacctggggcaacgtcagcgccgtcgaccgcgagaaaggggtgttcgtgatcaaaccctccggcgtggattaccgcgtgatgaccgccgacgatatggtggtggtcagtctggagagcggcgaagtggtagagggtaataaaaagccctcgtcggataccccgacccatcgcctgctgtatcaggctttcccgacgctgggcggcattgtgcatacccattcgcgccacgccaccatctgggcgcaggccgggcaatctattcccgcgaccggcactacccatgccgactacttttatggcccggtgccctgcacccggttaatgactgatgcggagatcaacggcgactatgagtgggaaaccggcaacgtgattgtcgaaaccttccgccagcagcgaatcgacccggcgcagatgcccggcgtgctggtccattcccacggcccgttcgcctggggcaagaacgccgaagacgcggtgcataacgccatcgtgctggaagagatcgcctatatggggattttctgccgccagctggcgccgcagctgccggctatgcagcagaccctgctggataagcactatctgcgtaagcatggggccaaagcctactacggccaataa

SEQ ID NO: 136455 - DNA, 2358 bp, Enterobacter cloacae
gtgacccagccacgagcaggatttttactcacccgtcactggcgggacactccgcagggcaccgagctctccttctggctggccaccgacgacggtccgctgcaggtaaccctcccgccgcaggagtccgtcgcctttattcccgaagcgcagcgggcgcaggctgaacggctgctgcagggggagaaagggctccgcttcgccccgctggccctgaaagatttccaccgtcagccaattgttggcctctactgccgcgcccatcgccagttgatgcgtctggagaagatgctccgcgacagcggcgtcaccgtttacgaaggcgatatccgcccgccggagcgctatctgatggagcgctttatcaccgccccggtgtgggtggaaggcgaaacgcgcggctcgcagctggtcaacgcgcgcatgaagccgaaccctgactatcgtccgccgctgaaatgggtgtcgctgaatatcgaaaccagccgccacggcgagctgtactgcatcggtctggaaggctgcggccagcgggtggtctacatgctgggccccgaaccggaaacgccgccagacgtcgacttcgagctggtcttcatcgccagccgtcccctgctgctggaaaagcttaacgcctggtttgccgaacacgaccccgacgtgctgatcggctggaacgtagtgcagttcgatctgcgcgttctgcaaaagcacgccgaacgctatcgcatcccgctgcggctcggccgcggcaacagcgagctggagtggcgtgagcacggctttaagaacggcgtctttttcgcccaggccaacgggcggctgattatcgacggcatcgacgcgctaaaatcggcgttctggaatttctcctccttttcgctggaggcggtggcccgcgagctgctgggagaaggcaaagccatcgacaacccatgggatcggatggatgagatcgatcgccggtttcatgaagacaaaccggcgctggccatctataacctgcaggattgcgagctggtgacgcggatcttccacaaaacggagatcatgccgtttttgctcgaacgagcgacggtcaacggtctgcccgccgaccgccacggcggctcggtcgccgccttcagccatctctatttcccgcgcatgcaccgcctgggctacgtggcgccgaatctcggcgacgtaccgccgcaggcgagccccggcggctacgtgatggactcccgccccggcctgtatgactcggtgctggtgctggactataaaagcctgtatccgtcgattattcgtacctttttaatcgatccggtcggcctggttgaagggctggcgcaacccgatgaccagcacagtatcgagggcttcctcggcgcccgcttctcgcgagataagcactgcctgccggggattgtcagccagatctggcacggccgggatgaagccaaacgccagcacaataagccgctctcccaggcgctgaagatcattatgaacgccttttacggcgtgctggggaccagcgcctgccgcttcttcgacccgcgtctcgcctcgtcgatcaccatgcgcggccatgcgatcatgcgccagaccaaagcgttaattgaagccaaaggctatgacgttatctacggcgataccgactccaccttcgtctggcttaagcgcccgcacagcgaagcccaggcggcggagatcggccgcgagctggtcagcgatgtcaacgcctggtgggcgcaggagcttagcaaaagccagcttaccagcgccctggagctggagtatgaaacccacttctgccgctttttaatgccgacgatccgcggcgccgataccggcagcaagaagcgctatgccgggatgattcaggagggcgatgcccagcgcatggtgtttaaggggctggaaacggtgcgtaccgactggacgccgctggcccagcagtttcaacaggagttatacctgcgcatcttccgcaaccagccgtatcaggattatgtgcgggagactatcgccaggctgatgaacggcgagctcgacgaacagctggtttatcgcaaacgcctgcgccggccgctggcggagtatcagcgcaacgtaccgccgcacgtgcgcgccgcccggcttgccgatgaacacaacctgaagcttgggcgggcgcagcagtatcagcagcgcggcaccatcaaatacgtctggaccaccagcggcccggagccggtggattaccagcagtcgccgctcgattacgatcactatttaacaaagcagttgcagccggtggcggaagggatcctgcccttcgtcaacgatgactttgctacaatagtgacaggacagttggggctattttga

SEQ ID NO: 136456 - DNA, 2907 bp, Enterobacter cloacae
atgccttttacacttggtcaacgctggattagcgacacagagagcgaactaggattagggacggtggtagcgctggatgcgcgcatggtcactctccttttccccgccatcggcgaaaaccgtctgtactctcgcaacgattccccgatcacccgcgtaatgtttaacccgggcgacaccatcaccagccatgaaggctggcagctccacgttgacaaagtgaatgaagagaacgggctgctgtcctacactggcacccgcctggacacccaggaagcgaacgtcaccctgcgtgaagtgctgctcgacagcaaactggtattcagcaaaccgcaggaccgcctgttcgccggccaaatcgaccgcatggatcgctttgccctacgctaccgcgcgcgcaagttccagagcgaacagtaccgcatgccgtggagcggcctgcgcggccagcgcaccagcctgatcccgcaccagctgcatattgcccacgatgtgggccgtcgtcacgcgccgcgcgtcctgctggccgatgaagtgggcttaggtaaaaccattgaagccgggatgatcctgcaccagcagctgctctccggcgccgcagagcgcgtgctgatcgtggtcccggaaaccctccagcaccagtggctggtggagatgctgcgccgtttcaacctgcgtttctcgctgttcgacgacgagcgctacgccgaagcgcagcacgatgcctacaatccgttcgaaaccgaacaactggtgatctgctctttagacttcgtgcgtcgcagcaagcagcgcctggagcatctgtgcgacgccgaatgggacctgatggtggtcgacgaagcgcaccacctggtgtggagcgaagaggcgccgagccgtgaatatcaggctattgaacagctggctgagcgcgtgccgggtatcctgctgctcaccgcgacgccggaacagctgggaatggagagccattttgcgcgcctgcgtctgttggatccgaaccgcttccacgattttgaacagtttgtcgaagaacagcagaactaccgtccggtggccgacgccgtcgcgctgctgctggcgggcaacaagctgagcgatagcgaactcaataccctgggcgatctgatcggcgagcaggatatcgagccgctgctgcaggccgccaacagcgatcgcgaagatgcccaggccgcgcgccaggagctgatctcgatgctgatggaccgccacggcaccagccgcgtgctgttccgtaatacccgtaacggcgtcaaaggtttcccgaaacgcgagctgcacaccattcgtctgccgctgccgacccagtaccagacggccatcaaagtgtccggcattatgggcgcgcgcaaaaccgcggaagagcgcgcgcgcgacatgctctatccggagcagatctatcaggaatttgaaggtgataccggtacctggtggaacttcgacccgcgcgtcgagtggctgatgggctacctgaccagccatcgctcgcagaaggtgctggtaatctgcgctaaggccgccaccgccctgcagctggaacaggtgctgcgcgagcgcgaaggcatccgcgccgcggtgttccatgaagggatgtcgattatcgaacgcgaccgcgccgcggcgtggtttgctgaagaagacaccggcgcccaggtgctgctgtgctccgagatcggctccgaaggacgcaacttccagttcgccagcaacctggtgatgttcgacctgccgtttaacccggatctgctggagcagcgtatcggtcgtctcgaccgtatcggccaggcgcacgatatccagatccacgttccgtacctggaaaaaaccgcgcagtcggtgctggtgcgctggtatcacgaagggctcgacgccttcgaacatacctgcccgaccggtcgcaccgtctacgacagcgtgcacgatgaactgatcaactatcttgcggcgccggaatccaccgacggctttgacgatctgatcaaatcctgccgccaacagcatgatgccctgaaggcgcagctggagcagggccgcgaccgtctgctggagatccactccaacggcggcgagaaagcccaggccctggcggagagcatcgaagagcaggatgacgacaccagcctgatcgctttctcgatgaacctgttcgatatcgtcggcatcaaccaggacgaccgcggtgaaaacctgatcgtcctcaccccttccgaccatatgctggtgccggatttcccgggcctgccggaagacggttgcaccatcaccttcgaacgtgacgtggcgctgtcgcgtgaagatgcgcaatttattacctgggaacacccgctgatacgcaacggtctggacctgatcctttccggcgataccggcagcagcaccatttccctgctgaagaacaaggcgctgccggtcggcaccctgctgctggagctgatctatgtcgtcgaagcgcaggcgccgaagcagctgcagctcaaccgcttcctgccggcgaccccggttcgcatgctgctggataaaaacggcaacaacctcgccgcgcaggtggagttcgaaagcttcaaccgccagctgagcgcggtcaaccgccataccggtagcaagctggtcaatgcggtacagcaggacgttcatgcgattctgcagcagggtgaagcgcagatcgccaaagcggcgcaggggctgatcgacgcggcgcgtaacgaagccgatgaaaagctgacggcggagctgtcccgtctggaagcgctgaaggcggtgaacccgaacatccgtgacgacgaactggcggcgatcgaaagcaaccgtcagcaggtgatggatgcgctggcgcaggccggatggcgtctggacgcgctgcgtctgatcgtcgtcactcaccagtaa

SEQ ID NO: 136457 - DNA, 660 bp, Enterobacter cloacae
atggcgatggaaaactacaatccgccgcaggatccctggctggtgatcctgtatcaggatgagcacatcatggtggtcaacaagccgagcggcttgttgtccgtccccggtcgtcttgaggagcataaagacagcgtgatgacgcgcattcagcgcgacttcccgcaggccgaatcggtgcatcgcctggatatggccaccagcggcgtgattgtggtggcgctgaataaagccgccgagcgtgaactgaagcgtcagttccgcgagcgcgagccgaagaagcagtacgtcgcccgcgtctggggccatccgcagccggcggaaggcctcgtggatttaccgctgatttgcgactggccgaaccggccaatgcagaaggtgtgctatgaaaccggcaaagcggcgcaaaccgaatatgaggtgctggagtacgcagaagataacaccgcccgcgtgcgcctgaagccgattaccggacggtcgcaccagctgcgcgtgcatatgctggcgctggggcatccgatccttggcgaccgcttctatgccacgccggaggcgctggcgatggccccgcgcctgctgctgcacgccgagacgctcaccatcacccatcctgcctacggcaacgcgatgacctttcgcgcgccgatcgacttttaa

SEQ ID NO: 136458 - DNA, 540 bp, Enterobacter cloacae
atgtcagtggatactcccgcccaggcgggcgtcagcatcgaggcattgctggcggcgaaagagcagcgtgcagcccgccaggccgactggttggcccattatcagcagcctgttatttccctgaccctggtgaccccgggggcggtgaaggacagcattcgctatcgtaatatgatgggcgttgccctccaggcctgcgatcagctgatgtggaagcaccgctggcaaacgctggatcgtcaggtgctatggctgccgaccgggccagaagcgctgtggtgcgtagcgcatccggccagcgaaatcaaagcgatgtgcagtacgctggagcagagccatccgctgggacgcctgtgggatatcgatgtaatctgtccgcagaacgggctggtgggacgccagtcgctgggcgaatcgcagcgccgctgcctgctgtgcgatgagccggcgcacgcctgtgcgcgcagccgtcgtcacgacaccgatctcgtcgtcgcccgcgttgagcagatgattgacgcgtggttcgcccgcgattaa

SEQ ID NO: 136459 - DNA, 1365 bp, Enterobacter cloacae
atgagcaccacagacaatgcattctctgcaacccttgaaccgatcgatacgccgaaaaccacgctcaagcagcgctggtggcatattatggataactggaaggtggggatcgtcccgctgccgctgtttctgctggccggaggactgattgccctcgactgccttggcggcaaactgccgagcgatatcgtggtgatggtggccaccctggctttctttggcttcgcctgcggcgagtttggtaaacgcctcccggtgctggggaaactcggtgcggcggcgatctgcgccacctttattccttccgcgctggtccactatggtctgctgcctgacgtggttattgaatccacgaccaaattctataaatccactaacatcctctatctctatatctgctgcatcattgtcggcagcatcatgagtatgaaccgcaccacgctgattcagggctttctgaagatcttcttcccgatgctgtgcggcgaagtggtcggcatgctggtgggcatcggcgtcggcacgctgctgggcatggagccgttccaggtgttcttctttatcgtgctgccgattatggccggcggcgtgggagagggggcgatcccgctgtcaatgggttatgccgcgctgatgcatatggagcagggcgtggccctgggccgggtattgccgatggtgatgcttggcagcctgacggcgatcgtcatctccggctgcctcaaccagctcggcaagcgcttcccgcatctgaccggcgaagggcaactgatgccgaaccgcagccatgaaacccgcagcctcagcgagagcgaaggcgtgagcggtaagaccgacgttgggaccctcgcctccggcgcgctgctggcggtactgctgtatatgatggggatgctcggccacaaactgattggtctgccggcgccggtaggcatgctgttcctcgcggtactgttaaagctggctaacgtggtgtctccgcgtctgcaggaggggtcgcagatggtgtataaattcttccgcaccgcggtcacctacccgatcctctttgccgtcggcgtggcgatcactccgtggcaggaactggtaaacgccttcactttaaccaacctgctggtgatcgtcagtaccgtctccgcgctggtggcgaccggtttcctggttggtaaaaagatagggatgcacccgatcgatgtggcgattgtttcctgttgccagagcgggcagggtggcaccggcgatgtggcgatcctgaccgccggcaaccgcatgagcctgatgccgttcgcgcagatcgctacccgcatcggcggggcgataaatgtctcgctggggttgctgttcctcagccactatctggcgtga

SEQ ID NO: 136460 - DNA, 1626 bp, Enterobacter cloacae
atgaaattatcttttcaatataagctgtttatttctctggtcgcttttttctcggtcctttttatcgcgctgggcatttattattattttgacgccagccgccagctttatcaggagatgagcgcccgggccaaaatacaggccgaagagatagccctgatgccgaatttacgtcaacaggtcagccggcacgacccacaggcgattcaggcgtttatgcagcaaatcgccgcccatagcgacgccagctttatcgtcatcggcgaccgtcagggagttcatctgtttcattccgtccatccggagtgggttggcacccgactggtcggcggcgacaaccaggcggtactggaagggaaatccatcaccaccattcgcaaaggcggcctcggggtctcgctgcgcagcaaaacgcccatcgttgatgacgcagggcgagttatcggtattgtctccgtcggctacctcaccagctatctcgacagcattactctgactaaagtgatcaatatttttatcgccgccgtcctgctgctcatcgccctgtttatcttctcctggtactttacccgcagtatcaagaagcagattttttcgctcgagccgcgggaaattggcctgctggttcgccagcaaaaggcgatgatggagtcgatctttgagggggtgatcgtcatcgatcgccagcggcgtattgaggtgataaaccatgccgcccgcagcctgctggggctcagccagcccgcccgccagctgcgcggtcagtcgatcgacagcgtcatttcgccgcagccctttttcgccagcggcgacatgctcgaacgcgatacccacgatgagctatgccgcttcaaccagttgaccgtgctcgccagtcgggtgcgcattatgctggagaataccctgcagggctgggtgatcacattccgtgaccgcaatgaaatcaatgccctcaccgcccagctgagccaggtgaagcgctatgtcgacaatctgcgcatcatgcgccacgagcagctcaaccggatgactaccctctccggcctgctgcatatgggccattatgacgaagcgatccgctatattcaggcccagtcggaacatgctcaggagctactggactttatctcctcgcacttccactcgccgacgctatgcggtctgctgctcggcaaagccacccgcgcccgcgaaaaaggcgtagcgctgagcttcgacccggcctgccgcatcgaccgccccctgccgtcgctgatggaatccgagctgatctccatcatcggcaacctgctggataacgccatcgaagccacgcagcgtgccgagctgccgcatgagccggtggaagtcctgatccagctcaacgcccgggagttgattatcgaagtggccgaccgcggcgtcggtatccgccccgatatccgcgagcgcatttttgaacgcggcgtcaccaccaaaacccgtggcgatcacggcattggtctgtatcttattgaacattatgtcactcaggcgggcggcaccatcgaagtcgccgataacgcgccgcggggaacgatcttcaccctatttatcccggccgacgcgcacgcctgtccgcaaccggaggcccacgatgcatcatga

SEQ ID NO: 136461 - DNA, 699 bp, Enterobacter cloacae
atgcatcatgacctggtcgatgtgctaatcattgaagatgagagcgaactggcgcgcctgcacgccgagcttgtgcaaaaacacccgcgactgcggctggcaggcatggcggcctccctcgcccaggcgcggcagctgcttcacgccacgccgccgcagctggtgctgctggataactatttaccggacggcaaaggcgtcacgctgatgaccgacccggcgctggcgaccagccaatgctcggtgatctttatcaccgccgccagcgatatggaaacctgcagccaggccatccgcaacggcgccttcgactatatccttaagccggtatcatggaagcggctgagccagtcgctggagcgctttatccagttctacgatcagcaacgggagtggaaaatcgtcgatcagcaaaacgtcgattccctctatcaactgcaggcgaagaactatcgcgtggatagcggcagcaaggggattgaagagaaaacgctggcgctggtgcagggactgtttagcggccgggaagcgcactgtttttccgttgatgaagtggtcagcgccgccgggctcagcaaaaccaccgcccgtcgctatctggagcacggcgttgagaccggttttctggaagtggagatgctgtacggaaaaattggccatccgcggcggctgtatcgccgcgctaaggtcaaaagttaa

SEQ ID NO: 136462 - DNA, 828 bp, Enterobacter cloacae
atgcagtatttgggtaaagtgattggcgtggcagtggctttgctgatgggtggtgggttctggggcgtggtgcttggctttctggtcggccatatgtttgaccgggcgcgcagccgccggttaaatctcttcgccaatcagcaggagcgtcagtcgctcttcttttccaccaccttcgaagtgatggggcacctgaccaaatccaagggccgcgttaccgaagcggatattcatgtcgccaatgtgctaatggatcgcatgaacctgcatggcgcctcgcgcaccgcggcgcagcaggcgtttcgcgacggtaaggccgacaactatcccctgcgcgagaaaatgcgtcagctgcgcagcgtctgctttggccgtttcgatctgattcggatgtttctggaaattcagctgcaggcggcgttcgctgatggcgaactgcatcctaacgaacgggaagtgctgttcgtcattgccgacgagctcggcatctcccgcgcccagttcgatcaattcctgcggatgatgcagggcggcgcccagtttggcggcggttcgcagcagcgctcttatggccagcatggcggcaacgccggctggcagcaggcgcagcgtgggccgaccctcgaagatgcctgcaatgtgctgggagtaaaaccgaccgacgacgcggcgacggtgaagcgcgcctatcgcaagctgatgaacgaacatcatccggacaagctggtagcgaaaggtctgccgccggagatgatggagatggccaaacagaaggcccaggagatccagaaggcctgggagctgatcaaagagcagcgcggcttctga

SEQ ID NO: 136463 - DNA, 2349 bp, Enterobacter cloacae
atgaaaaaacgtattcccagcctcctggctacgatgattgccagcgccttgtatagccaacaaggcctcgctgccgatctcgcaacgcaatgtatgcttggcgtgccaagctatgatcgtccgctcgtggaaggtcgtcctggcgatctgccggtgacgattaacgccgatcatgcgaagggcaactacccggacaacgccgtctttaccggcaacgtcgatattaaccaggggaatagtcgcctccgcgccgacgaagttcagctgcaccagcagcaggccgcgggccaggcgcagccggtgcgcacggtggacgcgctgggcaacgtgcattacgacgataaccaggtgatcctcaaagggccaaaagcctggtcgaatctgaataccaaagataccaacgtctggcagggcgattatcaaatggtcggacgccagggacgcggcaccgccgacctgatgaaacagcgcggtgaaaaccgctataccattctcgaaaacggcagctttacctcctgtctgccgggctccgacacctggagcgtcgtcggcagcgaagttatccacgatcgcgaagagcaggttgccgagatctggaacgcccgcttcaagcttggctctgtgccgattttctatagcccctacctgcagctgccggtgggcgataagcgtcgttcaggcttcctgatcccgaacgcgaaatacagcaccaaaaacggcgtggaattctccctgccgtactactggaacatcgcgccaaacttcgatgccactattactccgcactatatgaacaaacgcggcggcgtgatgtgggaaaacgagttccgctatctgacccagctcggcagcggcttaactgaattcgactacctgccgtcggataaagtctacgaagacgaccactcgagcgacagcaacagccgccgctggctgttctactggaaccactcaggggttatcgatcaggtatggcgtctgaacgctgactacaccaaggtcagcgatcctgactacttcaacgacttcagctcgaaatatggttccagtaccgacggctatgcgacgcagaaattcagcgccggttacgtcaaccagaactttgacgccacggtatcgaccaaacagttccaggtctttgaccgcgaatcgagcaactcctattcggctgagccgcagctcgacgtcaactactaccagaatgatgtcggtccgttcgatacccatctctatggacaggttgcccattttgttaactcgaataacaacatgccggaagcgacccgcgttcacttcgaaccgacgatcaacctgccgctgtccaacggttggggcagtctgaataccgaagccaagctgctggcgactcactaccagcagagcaacctcgataagtacaatgccgccaacggcactgactataaagagtccgtcagccgcgtaatgccgcagtttaaagtcgacggcaaaatggtctttgaacgcgacctgcaggagggattcacccaaacgctggaaccgcgcgtgcagtatctgtacgtgccgtaccgcgatcagagtgaaatcggcaactacgactccacgctgttgcagtcggattacaccggtctgttccgcgaccgtacctatagcggtctggaccgcatcgcgtcggctaatcaggtcaccaccgggctcacctcgcgcgtgtatgatgccgccgcggtggaacgttttaatatttccgttggtcaaatctactatttcaccgagtcacgcaccggtgatgacaacatcaactgggagaacaacgataccacgggttcactggtctgggccggcgatacctactggcgcattgccgatgaatggggtctgcgcggagggatccagtacgatacgcgtctggataacgttgccactggtaacggcaccattgaataccgtcgcgatgagaaccgcttagttcagcttaactatcgttacgccagcccggaatatattcaggccacgctgccgtcatattccaccgcggcacaatataaacagggtatttcgcaggtggggatgaccgccagttggccaattgtcgatcgctggtccgtggtcggggcctactactacgatactaatacccggaaagcagcaaaccagatgttgggtgtgcagtataactcctgctgctacgccatccgtcttggctacgaacgtaaagtcaacggctggaacagcaacgacaacggcggcgagagcaaatacgataacaccttcggaatcaatatcgaattgcgcggtctgagctctaactacggcctcggcacccagcagatgctgcgctcgaacattttaccgtaccagagctccctgtga

SEQ ID NO: 136464 - DNA, 1287 bp, Enterobacter cloacae
atgaagaactggaaaacgctgcttctcggtatcgccatgatcgcgaataccagtttcgctgccccccaggtggtcgataaagtagcggccgtcgtcaataatggcgtcgtgctggaaagcgacgtcgatggtttgatgcaatcggttaagctcaatgctggtcaggctggccaacagctgccggatgacgccaccctgcgccatcaaatcctcgaaagactgatcatggaccagatcgtgttacagatggggcagaagatgggcgtgaagatctctgacgaccagctcgatcaggctatcgccaacatcgccaaacaaaataatatgaccttggatcagatgcgcagccgtctggcctatgaaggcatcaactacaacacctaccgtaaccagatccgtaaagagatgctgatttcggaagtgcgtaacaatgaagtgcgtcgtcgcatcaccgtgctgccgcaggaagtggaagcgctggcgaaacagatcggcgaccagaacgacgccagcaccgagctcaacctgagccacatcctgatcccgctgccggagaacccgacctctgatgaagtcgccgcggcccaggagcaagcaaactccatcgttgagcaggcgcgcaacggcgccaacttcggcaaactggcgatcacctactccgctgaccaacaggcgctgaagggtggccagatgggctggggccgtatccaggagctgccgggcattttcgctcaggcgttaagcaccgcgaagaaaggggatatcgtcggtccgattcgttccggcgttggtttccacattctgaaagtcaacgacctgcgcggtggtacccagaatatctccgttaccgaggttcacgcccgtcatattctgctgaaaccgtcgccgatcatgaacgacgcccaggctcaggctaagctggaacagatcgcagccgagattaagagcgggaaaatcacgtttgctcaagcggcgaaaacctattcggaagatccgggttcggcaaaccagggcggtgatttaggctgggccacgccggacatctttgacccggcgttccgcgatgcgctgatgcgtctgaacaaagggcagaccagcggaccggtgcactcttcctttggctggcacctgatcgaactgctggatagccgtcaggtcgatagaaccgacgccgcgcagaaagatcgtgcttaccgcatgctgatgaaccgcaaattctctgaagaagcggcaacctggatgcaggaacagcgcgccagtgcgtatgttaaaattctgagcaactaa

SEQ ID NO: 136465 - DNA, 990 bp, Enterobacter cloacae
atgcctgaaacccgtaaagttgttatcactcccggcgaacccgccgggattggccctgacctggtcgtgcagcttgcccagcgcgactggccagttgagctggtgatttgcgccgatggcgccctgttaactgaccgagccaagcggctcggtcttcctttatctctcctcccttacgatcccgcgcaacctcctgttcctcagcgcgccggtaccctgacgctgctgaacgtgccgctaaacgtcccggcggagcccggcgtgctgaatgtgcaaaacggcgcctacgtagtggagacgctggcgcgcgcctgcgacggctgccttagcggcgagtttgcggcgttagtgaccggcccggtgcataaaggcaacatcaacgacgccggtatcgcctttaccggtcataccgagttctttgaagagcgcgcgaaggccagcaaagtggtgatgatgttggcgaccgaggagctgcgggtggcgctggtcaccacccatctgccgttgaaagccatcagcgaagcgattacccccgagctactgcgcgagatcatcaccattctcgatcacgacctgcgcacgaaatttggcattgcccagccgcatgtgctggtttgcgggcttaacccgcacgctggcgaaggcggccatatgggaacagaagagatagacaccatcattccggtgctggaagagatgcgcgcaaaggggatgaacctcagcggtccgctgccggcagacaccctctttcagccgaaatatcttgatcatgccgatgcggtactcgcgatgtaccacgatcagggcctgcccgtgctaaaataccagggctttggccgcggcgtgaacattacgctcggtttaccttttattcgtacctccgtcgaccacggcaccgcactggaattagcgggccagggaaaagcggacgtcggcagttttatcacggcgcttaatctcgccatcaaaatgattgttaatacccaatga

SEQ ID NO: 136466 - DNA, 822 bp, Enterobacter cloacae
atgaataatcgagtccatcagggccatttagcccgtaaacgcttcgggcagaacttcctcaacgatcagtttgtgatcgacagcatcgtctcggcgattaacccgcagaaaggccaggcgatggttgaaatcggccccggcctggcggccctgaccgagccggtcggcgaacgccttgaccagctgaccgtcatcgaactggaccgtgatctggcggctcgcctgcagacgcatccgttcctcggtccaaagctgaccatctatcagcaggatgcgatgaccatgaactttggcgaactggcggagaaaatgggccagccgctgcgcgtcttcggcaacctgccgtacaatatctcgaccccgctgatgttccatctgttcagctatactgatgccatcgccgatatgcactttatgctgcagaaggaagtagtgaatcgtctggttgccggaccgaacagtaaggcgtatggtcggttaagcgtgatggcgcaatattattgccaggtgatcccggtactcgaagtgccgccgagcgcgtttaccccgccgcctaaggtcgactccgcggtggtacgcctggtgccgcaccgcaccatgccgtatccggtcaaagagatacgggtgctgagccgcatcaccaccgaagcgttcaaccagcgccgcaagactatccgcaacagtctcggcaatctgttcagcgtggaagtgctgaccgagctgggcatcgacccggccatgcgcgccgaaaatatttccgtggcgcagtactgcctgatggccaactggctgtctgacaatctgccaacgaaggagagctaa

SEQ ID NO: 136467 - DNA, 378 bp, Enterobacter cloacae
atgattcattcgccccgggtgtgtgtccaggtacagagcgtctatatcgaatcgcagtcttccccggaagaagagcgctacgtcttcgcttacaccgtcaccattcgcaacctggggcggagtcaggttcagctgcttggccgctactggctcatcactaacggccacggtcgtgagactgaagttcagggtgaaggggtggtcggcgagcaaccgcatattcccgccggcggtgaatatcaatataccagcggcgcagtgattgaaacgccgctgggaaccatgcagggtcattatgagatgatcgatatcgacggcgcgccgttccgtattgagatccctgttttccgtctcgcagttccaacgctcattcattaa

SEQ ID NO: 136468 - DNA, 849 bp, Enterobacter cloacae
atgtcaacataccttattggcgacgttcacggttgctacgatgaactgatcgcattattagcgcaggttgaattcgatccgcggagagatacgctgtggctgaccggcgatctggtggcccgaggcccgggatcgctggaggtcctgcgctatgtcaaatctctgggcgacagcgttcgactggtgctgggcaaccatgacttacacctgctggcggtctttgccggtatcagccgcaacaagccaaaggatcgtctgaaaccactgctggaagcgccggatgccgatgagctgctcaactggctgcgtcgccagccgctgctgcaggtggatgaagagaaaaagctggtgatggcccatgccggcattacgccgcagtgggatctggagaccgcccagcagtgcgcgcgtgatgttgaagcagtgctctccagcgactcctatcctttcttcctcgatgccatgtacggcgacatgccgaaccactggagcaacgagctgagcggcctggcgcgcctgcgctttatctctaacgcctttacccgcatgcgctactgtttcccgaacggccagctggatatgtattcgaaggaagcgcccgaggacgccccggcgccgctgaagccgtggtttgccattcccggcccggtcagcaatgcctacagcattgcctttggccactgggcttcgctggagggacgcggcacgccggaggggatttacgccctggataccggctgctgctggggcggggaactcacctgcctgcgctgggaagataagcagtacttcacccagccgtcaaaccggcagaaaagcctcgacgaaggcgaagccgtcgcgtcctga

SEQ ID NO: 136469 - DNA, 480 bp, Enterobacter cloacae
atgatcagtctgattgcggcgttagcggtagatcgcgtcattggtatggaaaacgccatgccatggaacctgcctgccgatctcgcctggttcaaacgcaacacgttaaataagccggtggtgatggggcgtctgacctgggaatccattgggcgcccattgccggggcgtaaaaatatcgtgatcagcagcaaacccggcagcgacgatcgcgtgcagtgggtctcctccgtagaagaagcaattgccgcctgcggcgatgtggaagagattatggtgatcggcggcggccgggtgtatgagcagttcctgccgaaagcgcagaagctctacttgacccatattgatgcggaagtggaaggcgatacccatttcccggattacgatccggacgaatgggagtcggtgttcagcgagtttcatgacgccgacgcgcagaactcccatagctactgctttgagatcctcgaacgccgttaa

SEQ ID NO: 136470 - DNA, 1866 bp, Enterobacter cloacae
atggatagccatacgctgatacaggcgttgatttacctcggcgccgcggcgctgattgtgcccatcgccgtccgtctggggctggggtcagtgctgggctatctcatcgccggctgtattatcggcccgtgggcgctgcggctggtgaccgatgccgaggcgattctgcactttgccgagattggcgtggtgctgatgttgttcgtcattggtctggagctcgatccgcagcgcttatggaagctgcgcgcctcggtgtttggcggcggcgcactgcagatggtggcctgcggggtgttgatcggcctgttctgcatgctgctgggcctgcgctggcaggtggccgagctgattggtatgactctggcgctttcctcaaccgcgatcgctatgcaggcgatgaatgagcgcaatctgacggtgtcgcagatggggcgcagcgcctttgcggtgctgcttttccaggatatcgccgcgatcccgctggtggcgatgatcccgctgctggcggccagcggcggcgccacttcgctgatggcttttgccctctccgcgctgaaagtggccgcagcgctggcgctggtggtggtccttgggcgctatctgacccgcccgctgctgcgctttgtcgcccgttccggcctgcgcgaagtgttcagcgccgtggccctgttcctggtcttcggctttggcttattgctggaagaggtggggctgtcgatggcgatgggggcgtttctcgccggggtgctgctggccagctccgaatatcgtcatgcgctggagagtgatattgagccgtttaaaggactgctgttggggctgttctttatcggcgtcggcatgtcgattgatttcggcaccctggtcacccatccgctgcgtattgtgattttgctggtcggtttcctggcgataaaaatgctgatgctgtggcttatcgccaggccgcttggcgtaccgcgcgcccagcgccgctggtttgcggtgctgctggggcaggggagtgagttcgcgtttgtggtgtttggcgccgcgcggatggcggatgtactggacggcgaatgggcaaaagcgttgaccctggcggtggccctgtcgatggcggcaacccccattctgctggtgctgctgacccgtctggagaaatcgtccagcggccaggcgcgtgatgctgacgagattgatgaagagcagccgcgggtgattgtcgccggctttggccgcttcgggcagattgccgggcgattgctgctctcgagcggggtgaagatggtgatcctcgatcatgacccggaccatgtcgataccctgcgcaaatttgatatgaaggttttctacggcgatgccacccgggtcgatctgctggagtcggccggggccgaaaaggcggaagtgctgatcaatgccattgacgatccgcacgtcagcctggagctggtggcgagggtaaaagagcattttccgcatctgcagatcatctcccgcgcccgcgatgtcgatcattacattcagctgcgccaggctggcgtcgaggccccggagcgtgaaaccttcgaggcggcgctgaagtccggccgaatgacgctggaggcgctggggctcggcgcctatgaagcgcgcgagcgggccgatctgtttcgtcgattcaacctgcaaatggtcgaagagatggtggcgatggcggaaaacgatgccgcgtcgcgggtggcggtcttcaagcggaccagcgatatgctgaccggcatcatcaacgaagatcgtcatcatctgtcgctggtgcagcgtcatggctggcagggtacggaagagggcaggcacaccggggatatcgccgatgaaccggaaaataagccctcagcctga

SEQ ID NO: 136471 - DNA, 534 bp, Enterobacter cloacae
atgattctgataatttatgcgcatccttatccgcagcattctcatgcgaataagcgaatgcttgaacaggcagggacgcttgaaggcgtagagatacgctccctctatcaactctatcccgactttaatatcgatgttgccgccgagcaggcggcgctggcccgtgccgatctggttatctggcagcaccctatgcaatggtatagcgtaccgccgctgctcaagctgtggatggacaaggtgctgtcgcacggttgggcctatggccataacggtattgccctgcgcggtaaatcgctgatgtgggcggtcactaccggcggcggtgaaagccactttgatatcggttcgtttcccggtttcccggtgctggcgcagcctctgcaggcaaccgcgctttactgcgggatgaaatggctgccgccgttcgctatgcactgcacctttatctgcgatgatgaaacgctgcaggcgcaggcccgccgctatcgtcaacgcttaatcgactggcaggaggcacaccagaatggatag

SEQ ID NO: 136472 - DNA, 234 bp, Enterobacter cloacae
atgcggaacaatattctggtggcatccgcactggcagcgacggcaatcatgttcgtggccggctgctcatcgaatcagtcgatcaaaaccaccgacggcaagaccattgtcaccagcggcaaaccgcaggtggatgatgacaccggccttgtctcatacaaaaatgccgaaaccggccgcgtggagcagattaaccgcgaccaggtgaagtccatggacgagctggataactaa

SEQ ID NO: 136473 - DNA, 1512 bp, Enterobacter cloacae
atgaaagagaaaaagacaaccataccgcctgccggtgcagtcaagccaacgactgcgaataaaaaacctctcctgatgatggcgctgccgattatcgttgccgtgctgttattgttcgtcccggtccccgaaggcctgccgccgtacgcctggcactacttcgctatctttgtcggggtgatcgttgggttgatttttgaaccgctgcccggcgccgttatcggtatcaccggcgtggtagttattgccctgtgcagccagtggctgctgttcagcccggatcagatggccgcgccaggcttcaaaatggctggcgcctcctttaagtgggcggtgagcggcttcggcaactccaccgtgtggcttatcttcggcgcgttcatgttcgccgccggctacgataaaacgcagttcggccgccgcctggcgctgattctggtgaaatatcttggccgtcgcagcctgacgctcggctacgccatcaccttcgcggatctgctgctggcgccgtttacgccgtctaacaccgcacgcagcggggggactatctacccgattatcgctaacctgccgccgctgtacggttcaaagccaaacgatccgagcgcacgtaaaatcggttcctatctgatgtgggtagcgatcaccgccgcctgtattaccagctcgatgttcctgtcggctctggccccgaacctgctggccctggcgctggtcaaaagcattgttggcatcaatatctcctggggcacctggttcatcgccttcctgccgctgggtatcctgctgattctggccatgccgctgctggcctactggttctacccgccggaagtgaaagtcaataacgaagtgccgctgtgggccgcgcgtgaactggaaaaactgggcaaactgtcgcgcaatgaaattctgctgctggtattcgtctgcttcgcgctgatgatgtggatcttcgccgccgactggatcgaaccggcgctggctgccctgctggttatcgtgctgatgctgtggaccggcgtgctctcctggagcgatatcaccaacaacaaagcggcatggaacacctttgtctggttcgccaccctggtggcactggccgacggcctctcctccaccggctttatcgcctggctgggtaaagagggcggcgcgctgatgagcggcatctccccggggatggcgaccatcgtcctgctgctggcgttctacctgctgcactatctgtttgccagcaccaccgcgcacaccaccgcgctgctgccggccatgctgaccattgcctcgactatcccgggaatgaatatggaagtgtttgtcctgctgatggtcacctcgctgggcgtgatggggatcatcaccccgtacggtactggcccaagcccaatctactacggcagcggctacctgccgaccaaagattactggcgcctcggcaccatctttggcgccatcttcctggccgccctgctgctgattggctatccgtggatgtccatgatgttctga

SEQ ID NO: 136474 - DNA, 1653 bp, Enterobacter cloacae
atgtcgactaaaccgtttgtttatcaggatccgtttccgctggcgcacgacgatacggaatactatctgctcagcaaagagcacgtctccgtcgccgaatttgacggccagcaggtcctgaaagtagagccgcaggcgctgaccctgctcgctcagcaggccttccacgacgccgcctttatgctgcgcgtctcccatcagcaacaggtcgcctcgattttgctcgacccggaagccagcgataacgataaatatgtcgccctgcagttcctgcgcaactcggaaattgccgccaagggcgtgctgccgacctgccaggataccggcaccgcgattatcatggggaaaaaaggccagcgcgtctggaccggcggcggcgatgaagccgccctggcgcagggcgtttacaacacctataccgaagataacctgcgctactcacagaacgcgccgctggatatgtataaagaggttaacaccggcaccaacctgccggcgcagatcgatctctacagcgtcgacggtgaagaatataagttcctgtgcatggcgaaaggcggcggttccgccaacaaaacctatctgtaccaggagaccaaggccctgatcaccccggcgaagctgaaaaactacctcgttgagaagatgcgcactctcggcaccgccgcctgcccgccgtaccacatcgcgtttgtgatcggcggcacctcggcggaagcgacgctgaagaccgtgaaactggcctcgacccgctattacgacggtctgccgaccgaaggcaacgaacacggtcaggcgttccgcgacgtgcagctggagcaagagctgctgcaggaagcgcagaacctcggcctcggcgcgcagtttggcgggaaatacttcgcccacgatatccgggtgatccgtctgccgcgccacggcgcctcctgcccgatcggcatgggtgtctcctgctccgccgaccgcaatatcaaagccaaaattaaccgcgacggtatctggatcgagaagctggagagcaatccgggaaaatatattcctgaacatctgcgtcaggccggcgaaggcgaagtggtaagcatcaacctgaatcagccgatgagcgagatcctggcgcagctgtcggcacatccggtctccacccgcctgagccttaacggcaccattatcgtggcccgcgacatcgcccacgccaagctgaaggaacttatcgacaacggcgaggcgctgccgcagtacgtcaaagatcacccgatctactacgcgggcccggcaaaaacgccggacggttacgcctccggctctctggggccgaccaccgcaggccgcatggactcttacgttgatctgctgcagtcccacggcgcgagcatggtgatgctggcgaaaggcaaccgcagccagcaggtgaccgatgcctgccataaacacggcggcttctaccttggaagcatcggcggcccggcggcagtgctcgcccagcagagtatcaagagcctcgagtgcgtggcctatccggaactggggatggaagctatctggaaaatcgaagtggaagattttccggcgtttatcctcgtcgatgataaaggcaacgacttcttccagcagatccagaataagcagtgcgcgggctgtaaacagcacggctaa

SEQ ID NO: 136475 - DNA, 1617 bp, Enterobacter cloacae
atgaacaggatgagcatcgttatcctctgggcgctggcgctgctggtgctccagccggcgctggccgccgaaccgcgacagcagccaaccgcgcgcgagcaggcacgcacggtcacgattttccaccaacctgtcgtcatgttgcaggccacctttggccagaccacgcccgaagagcgcgttttgcgcacccgcagcgccctgcgcgccttcaccgaagatgatattcgccagccgctgcgggtcgtgcctgttatccgctatggtcagccaggcagactgtttctgatgaacggcaaaccggtgctgctgctgagccaggcggatctcgacgagggcgatgatttaaccctcgaccaggcagcccagcgggtgctggcgcgtatggaagcccagcgcaccagcctccaggagcagttcaacaaccgctatctgttcatctccgccggtaaagccctggccggggcgctgctgctggcgctgttttactacggcgccttccgcgcctggcggcgggtgcgacgttttttcctgctgcggatcctcgaaaaacgtagcgccataccgcagcactggcggcgctatctcggcaatattgaagttcgactctatgctgtgctggtcatccttctcggcatgctggcctgttatctctggctgagctgggccttcagcctgtttccctggacgcgggtgtggagcgaatcgctgggcgactggtcgctgggggtgatccgcgacctctctctgtcgattgtcgcctccctgccgggactgatgatcgtggtgcttattttccttctcacctggcttatcattcgcctggtgaaggtggttctcgaccaggtcgccgccggccgcattcaggttcccggcattcatccggagaccgttagcgccacccgtcgacttatctcggtggtcatctggttgtttgccctctccgccgcctacccgttccttcccggcgccaactctctcgccttcaaaggcattagcgtgttcttcggcctgatgctgaccctcgggtcaaccggagtgatgacccatgcgatgagcggcctggtgctgatctactctcgggcgctgcgcaaaggcgactgggtccgcctcgccgataatgagggtcaggtcagcgagattggcgtgctggcgaccaaaattctcacccgcgaaaattacatcgttaccgtcccgaacgcggtggtggtgagcgggaaaattattaatctcagcgccgaaagcgccgacggtggagtcaacctcaccaccagcgtcaccatcggctacgatacgccgtggcgtcaggtccatgcgctgctggagctggcggcgagacgcaccccggggatcgatcagcaaattgccccggtggtgcgtaagctgggattgctcgactggtatacctcgtatgagctgcaggtgcgcttactccccacaaccaagctgccggatggccgcaacgcattgcatagcagcattattgatgtgtttaacgaattcggtgtgcagattatgtcgccgaactttgtgatgcagccaaaggcggcggtagtggtgccgcaggaagcctggtacgccgccccggccgtcgcgccgcaggagccggagaaataa

SEQ ID NO: 136476 - DNA, 648 bp, Enterobacter cloacae
atgacagcacaaaaggatcaggatgctccccgccgcccgggtcggccgcgcggtaaaaaaccgggtaccgccaaccgcgaacagttgatggacatcgccctgacgctgtttgcccgcgacggggcgggccgcgtatcgttgaacgccatcgccaaagaggccggggtgacgccggcgatgctgcattactacttcagctcgcgggatgcgctggtgactcagctgattgaggagcgctttatgccgctgcgcaatcacatcagccgcatctttgtcgatcatccacaggacccggtgctggcgctgacgatgatggtcgagacgctggcgcatatggcggagaaaaacgcctggttcgcgccgctgtggatgcaggagatcatcggcgaaatgccgattctgcgccagcatatggatgcccgcttcggcgaggagcgttttcaggtgatgctggggacggtgcgtcgctggcagcaggaaggcaagatcaatccggcgctggcgccggagctgctgtttaccacggtaattagcctggtgctggtgccattttcacgcatccacagcgatccgcgtttacaggcggtcaaccgtcagaccatcgtcagccacgcgctggcgttaatgggccacggcgttggaggttaa

SEQ ID NO: 136477 - DNA, 1413 bp, Enterobacter cloacae
atgactactcaagtcgcaaacccaccggtgcagtcgatacgcctgctgttcagcgcattgctgctggtgatgctgctttcagcgctggatcagaccattgtctccaccgcgctgccgacgattgtcggcgaactgggcgggctgttcggccgcaaaatcgtgctgcaggtggcgattgggctgtttctcgtcggctccgcgctctgcgggctggcgcagaatatgacccagctggtgctgatgcgcggcctgcaggggctcggcggcggcggcctgatggtgatcagcatggcggcggtcgccgacgtcatcccgcccgccaaccgcggccgctatcaggggctgttcggcggcgttttcggcctggcgacggtgatcggcccgctgatcggcggttttctggtgcagcacgcctcctggcgctggatcttctatatcaacctgccgctcggcctgttcgcgctgctggtgatcggcgcggtattccacagcagcaataaacgcagccagcatcagattgattggctgggggcgatttatctcagcatggcgctgctgtgcatcatcctgtttacctcggaagggggcagcgtccatgcgtggaatgacccgcagctgtggtgcattctggccttcggcatcgtggggatcatcggctttatttacgaagaacggatggccgccgagccgattattccgctggcgctgttccgcaaccgcagcttcctgctgtgcagcctgatcggcttcgtcatcggcatgtcgctgttcgggtcagtcaccttcctgccgctctatctgcaggtggtgaaggaggcgacgcccaccgaagccgggctgcagctgatccctctgatgggcggcctgctgctgacctcgattatcagcgggcggattatcagccgtaccggtaaatatcgcctgtttccgatcctcggcaccctgctcggcgtgaccggcatggtactgctgacccgcatcaccattcactcgccgctgtggcagctgtacctgtttaccggcgtgctgggagcgggtctggggctggtgatgcaggtgctggtcctggcggtgcagaatgcgatgccggcgcagatgtacggcgtcgccacctccggcgtgaccctgttccgctcgattggcggctccatcggcgtggcgctgtttggcgcggtgttcacgcacgtgctgcagagcaacctgcaacaactgctgccggaaggcgcggtgctgccgccgggaatgaatccggtggcggtccagcacctgcccgcggatatccgcctcgactacctcgacgccttcggcgcggcgatccacgcggcgtttctgatggcggccggcattatggcggtggcgtttgtcctctcatggctgttaaaggaggcgccgctgaaaaccgcgacgcattaa

SEQ ID NO: 136478 - DNA, 915 bp, Enterobacter cloacae
atggatcgattaagcgcgatggcgctgttggtgaaagtgaccgagctggggagcatgtcggcggcggcgcgggcgctgaatatgccgttgaccaccgtcagccgccatattggcgaactggagagcgcgctgggcgtacgcctgctggcgcgaaccacccgcaaactgacgctcaccgacgccgggggcgattatgtcgccgccgcgcggcggatccttgaggaggtggaaaacgccgaacgccaggcgacgggcgaatatcaggaaccgaagggcgagctggtgatctccgcgccgacgatgtttggacgccagcacgttcttccggtaatcagtgaatttatcgcccgctacccgctaattcgcgtccgtttgctgctcagcgatcgcaatgccgacctggtgagcgaccatgtcgatctggcggtgcggattggcgacctggcggacagcagcatggtggccacccgcctcggcaccatgcggattgtggcctgcgcccatccggcgctgctggcgaaatacggcgagccgcagcggccgcgcgatctggcggcgctgccgatcatccgcattgaatcgccgatgccttatcgcggctggcgctttcgcgccgctgagcgcgaggaccagctgattaacctgccgccggtgctatccgtcaccacgccagagagcgccgccgatgccgcgcggctgggggtgggggtggcccgcttactgcattatcaggcgctggatggcctgcgccacggggagctccgtctgctgctggaaaacgtcgagccggatccggcgccggtccatttgctgtataccgctcgggatctggcgccgcttaaactgcgcaaatttatcgattttgccgcaccggcgctgcgtcaggcactgctgcgcatcgccggggccgcttaa

SEQ ID NO: 136479 - DNA, 627 bp, Enterobacter cloacae
atggcagcaacctttctcgatatcgctatcaccccggacgtgatggatgtgcagcatgaaatgggcagcgactcgctgtggcaaacgccgcgcagtcgccgccaggccgaccgcttcggcgacagcgaagcggggatgatcgccacccgcgacagcttttatctggcgacggtgtcgcagagcggctggccctacattcagcatcgcggcggcccgccggggtttctgcatctgctggatgacaccaccctggcgatggccgatttcggcggtaaccgccagtacattactaccggcaatctgcgcggcagcgaccgggcctgcctgtttttgatggattatccgcgccgtgccaggctgaaaatctacgccaccgtcgaggtcctggcggcagaggaccacccgcagctgctggcgcaggtggcgccggccaactatcgcgcccgcattgaacgtctgtttctttttcatttgcaggcgtttgactggaactgcccgcagcacattacgccgcgctacagcgcgcagcaggtggcggagtacagccagaacctgcagcaacgtattcatgacctggagcaggagaatcagcgcctgcagcagcaattagcccgtagaggagagtaa

SEQ ID NO: 136480 - DNA, 471 bp, Enterobacter cloacae
atgaccgaacaacgttccccgttaccgccgtttacccgcgacagcgctatccagaaggtccgcgccgcggaagatggctggaacagccgcgatgcggaaaaagtcgccctggcctacaccgtggatagcgaatggcgtaaccgcagcgaatttgtccacggtcgggggcaaattgttgagttcctgcagcgaaaatggcgcaaggagcagcaataccggctgattaaggagctgtgggcatggcaggagaatcgcattgccgtgcgcttcgcctatgagtggtgcgacgacagcggcaactggtttcgctcgtatggcaatgagaactgggagtttgataagcatggactgatgcagacgcgctacgcctgcatcaacgatctgccaattagcgaaagcgagcgcctgttccactggccgcaggggcgccgcccggacgatcatccggggctcagcgatctggggctgtaa

SEQ ID NO: 136481 - DNA, 537 bp, Enterobacter cloacae
atgagccgtttagcagatatccgtgaacaagacgccaccggcaaagccgccgatattttcgccgggatcaaaaaagcgatgggcaaagtgccgaacgcctacctgaccatcggcggccactcgccggcggcgctgcagcaggcgctggcgcacaatgcgatgctccataaaggcagcctcagcgcccaacagctggaagcgattaacctgtcggtcagcgaagccaccggctgtgactactgcctggccgcgcataccctgatggcgaaaaaagctggcttcagcagcgagcagatccacgccctgcgccgcggggagtatgcggaagaggcgcagcttgatgcgctggtgaaattcgcgcagaccctggtgaccaccaccggtacgctgccggaagccgacgtcgccgcgctgcgcaacgccggttttagcgaccagcaggtgattgagattatcagcgccatcagcgccatcctgttcaccaacatggtgaaccgggttaacgacacggtggtcgacttcccgaaagccgattaa

SEQ ID NO: 136482 - DNA, 906 bp, Enterobacter cloacae
atggacagtctcagtcatctgctggcgctgctggcgccgcgctgcgaagtgaacctgcactgtcgcttcggcggccgctggcaggccgggcaccagcaaatgcgcagcggcgtggtgccctggcacgtggtgctgcgcggcgaggggcggctcaacgtcggcggccagacccatcacctgcgcgcgggagatgtcgtcctcctgccccacggttcgccgcacctgatggagagcctggtggagtggggccaggtgctgccggtggcgcaccggtttaacggcacggtgacggaaatgcgcgccggcccggcggagggggcgctggagatgctgtgcggcgaattctattttggtccgcacgtcagctggctgttcagtgaagcatcgacgctgatccatctccataccgatgcgcgtgaagactgcccggagcttgacgcgctgcttaatatactggtgcgcgagagcctggcgcagcgtcccggcggcagcgctatcgtgcgcagcctcggcgatacgctgctggtgctcctgctgcgcatgctgcttggcgagcaacagccgcccggcgggctgctgcgcctgatgagcgatgaacgcctgatgccggcggtgctggcggtgatggcgaccccggagcaaccgtggacgctggagagtatggccgcccgcgcgtttttatcacgggccacctttgctcgtcattttgcccgcgtctatcacctgacgccgcaggcgtggctgtcgcagttgcgaatggcgctggccgcccggctgctgcgcctggagcgtcagaccaacctcgaggtcattgccgaacgctgcggctttcagtcgctggcgtccttctcgaagcgcttcaaaatgcgctatggcgtgacgccgggcgagtggcgacggggctag

SEQ ID NO: 136483 - DNA, 810 bp, Enterobacter cloacae
atgagattacgtttacgggccgccgccgcagtgatgctggcgggtctggcgctggtcggctgcgaccaaaagggtaatgaagcgaagcacattaaggtcggtgtgattaacggcgccgagcaggatgtggcggaagtggcgaagaaggtggccaaagagaagtacggtctggaggtcgagctggtggggttcagcggctcactgctgcccaacgagtcgaccaacgccggggatctggacgccaacgtcttccagcatcggcctttccttgagcaggacaacaaagcgcataattatcatctggtggcggtcgggaataccttcgtcttcccgatggccggctattcgcgcaagatcaagtcagtcgccgaactgaaagacggcgcgacgatcgctatccccaacgatccgaccaacctcgggcgggcgctactgctgctgcaaaaagagaagctgattaccctcaaagccgggaccggcctgctgccgacggcggtggatatcaccgacaacccgcataacctgaagatcatggagctggaaggggcgcaactgccgcgcgtactcgacgatcccaaagtcgacgtggctatcatcagcaccacctacctgcagcaaaccgggctgtcgccggttcgtgacggcatctttatcgaagataaaaactcgccctacgtgaacatcatcgtgacccgggaagacaataaagacgcgcaaaacgtgaaggagtttatgcagtcgtaccagtcgccggaggtggcgaaggcggcagagactatcttcaacggcggcgcggtgcctggctggtaa

SEQ ID NO: 136484 - DNA, 855 bp, Enterobacter cloacae
atggtacgccaacggcaggctgacctgctgctgattgccgcgacggtgattgccgcctgcggctggatattttcccgcgaggcgatcgccggcatgccggtgttcgcgtttcttgggctgcgttttttcttcgccgcgctgcttctgctgccgttctgccgcggttttcgcccgcaaaagcagcactggccaaaactcatcatcagcggactctggtttgcgctcaacctctgcctgtggatctattcggtctccacgacggcgtcgctcggcgaaggggcgtttatcatgagcctgtcgatgatgttcgtcccgctgaccgcatgggtgatgatgaaggtgcgcccgccgcgcgcctggtgggagtgcctgccgatcgcggtggttggcctggggctgctcagtctgcatatgccgatagccttccaccccagccagggctggtttttgctgacggcgctggtgcagtcgatctggttctgttacaccagccgctgcgcgcgtgaagtaccgctgatccccctgaccaccgtgcagctggcgatcaccggtatcgtcgggttgaccatctccgctgccgttgaacgctgggaccagccgatgaccctgccgactctcggctggttggtggccagcattgtcatcgctaccagcctgcgcttcggtctgcagatgaaggggcagaagtacgcggcggtggccagcgcggcgatcatcatggtgctcgaaccgctgctgacggtcattgccgccgcgctgtggtacggcgaacagctgccgctgcagaagattatcggcggcgtgctgatcctcgtggcccagctgtggttccgctggcggatgcttaagccgtaa

SEQ ID NO: 136485 - DNA, 561 bp, Enterobacter cloacae
atgaaaaagaaactgaccgccgccgatatgcacgacccgcaggtcatcgccgagacgccgtggttcagcatgcgtaaggtgggtattgatgtcgcccccggcgagcgccgcgacttttattccattcattacccgcgcccggcggtggggattgtggccatccaggatgagaaagtgctgctgattcgccactaccgctacctgatcgataaggtggtgtgggcgatcccctctggcggcgtcgatgaaggggaagacccggcggtcgccgcgctgcgcgagctgcgggaagagaccggctggcaggcgcaacgcgttgaggagatcattcgctttaacccctcctacggcagcagcgatcagctgtttatcacctggctggccaccggtttacgctgggtggggatggatgcagatcaggatgaggtgatggagaccggctggtttaccttcgacgagataaaccaactgatcgcccgcggcgagatgccggacgggctgtcgctggtgccgctgctgcagctgatggcgcagcggcgaagcggctcgcttacggcttaa

SEQ ID NO: 136486 - DNA, 780 bp, Enterobacter cloacae
atgaacatcacccacatccgtaatgcgacccagattattcactacgccgggaaaagatttctcatcgatccgatgctggcggacaaaggcgcctggccgggttttccgggcaccgcgcgcagcgaattgcgcaatccgctggttgagctgccgttttcccgcgataaaattgtcgatgttgatgcggtgatcgtcacccacacccatgacgatcactgggacgcggcagcgatcgccgcgatcccgaaaaccccgccggtgttcgtccagcatgaggccgacgccgcgctgctgcgcagccagggatttcaggatctgcgcctgctgtcgtcagacagcgaatttgccggcgtgcgtctgctgataaccacctccggccaacacggcagcgaccgcacctacgcggtgccggcgatggctgaacgcctgggcgaggcctgcggcgtggtgtttcgccatccgcaggagaagacgctgtggctggtgggggatactatctggcgcgatgacattgcagccgacctgctgaagctgcgcccggacgtggtggtcctcaacgccggctacgcccacgtcatcggctttggcccgattatcatgggcaaggaagatctcctgaacgtgcacttcaccctgccggaagcaaaaatcatggctatccacctcgaggcggtcaaccactgcctggtgagtcgggaagagatgcgccagtatgcgctggataatcagattgccgatgtggtttctatcccgcaggatggagaaaccgtcgtttattaa

SEQ ID NO: 136487 - DNA, 954 bp, Enterobacter cloacae
atgaaactcaccgacgtggcgattgtcgctgtagagggctttagcccgtttcactacgccgtcccctgcatgctgtttggcgattcggtttcggaaatcaaacgctttaatctgcacatttgcgccgagcggccggggctgctgcgcgcccgcgatggttttgcgctgtacgccaccggcgattatgccgcgctggaacaggcggatatcgtggtggtgccttactggggcgaggtcgatcggcgtccgccgcaggcgctgcttgatagcctggtgcgggcccgggataacggcgcggagattgtcggcctgtgcctcggcgcgttcgtcctcggctacgccgggctgctggacggcaggcgagcggcgactcactgggagttcgagcaggatttccagcgccggtttccgcaggtgcagctggatatcaacgccctgtacgtcgacgaccagcggatcattacttcggcgggcaccgcggcggcgctggactgttgcctctacatcatccgccagcgtttcggcagcctcgcggccaaccagatcgcccggcggatgattgtttcgccgcaccgcgagggcggccaggcgcagtttatcgcccagccggtgccgaaaaacacccgcgatgcgcgaatcaactgcctgctggattatctgcagcagcatattgccgagccgcacagtctcgattcgctggcccgggtggtggcgatgagccgccgtaccctgacccgccacttcgcccgggcaaccgggatgagcattaccgactggctgaccgccgaacgtctgcgccgcagccagactctgcttgaggcgggcgatctgccggtcgagcaggtggcggaggcggtgggctatctttcagcggtcacctggcgccagcagtttaaagcgcgctttggcgtcagcccgacggaatggcggcgtacctttcgtcgcggcgcttag

SEQ ID NO: 136488 - DNA, 1050 bp, Enterobacter cloacae
atgctgatcaacgctattggtacctactccgccagccagccgctggaatcaatggccatcacccgccgcgacccggggccgcaggatgtacagatcgccatcgcttactgcggcgtctgccactccgatctccaccaggcgcgatcggaatgggcgggaacgctgtatccctgcgtgccggggcatgaaattgtgggtcgggtgaccgcggtcggcaacgccgtctcgcgctacgccgtcggcgatctggtgggcgtcggctgtatggtcgatagctgtcaacagtgcgaagagtgcgctgaggggctggaaaactactgcgaccacatggtgctgacctataacgggccgacccaggacgcgccgggacacacgcttggcggttattcacagcagatagtggtcaatgaacgctacgtgctgcggataacccatcccgaagcgcagctggccgccgtcgcgccgctgctgtgcgctgggatcacgacatactcgccgctgcgccactggcacgtcgggccgggtaaaaaagtcggcgtggtcggcatcggcggcctggggcatatggggatcaagttggcccatgccatgggggcccacgtggtggcctttaccacctccgaatccaagcgtaatgcggccagagcgctgggcgccgatgacgtggtggtgtcgcgcaacgacgacgaaatggcggcccacgtcaaaagcttcgacttcatcctcaacaccgtggcggcgccgcacaatctcgatgccttcaccacgctgctgaaacgcgatggtaccatgacgctggttggcgccccggccacgccgcatccgtcgccggaagtgttcaatctgatcttccgccgccggtcaattgccggctcgatgatcggcggtattccggaaactcaggagatgctcgacttctgcgccgaacacggcatcgtcgccgatatcgagctgatccgcggcgatgagatcaacgaagcctgggaaagaatggtcaagggtgacgtgaaataccgcttcgtgatcgacagtgcgaccctcgccggctaa

SEQ ID NO: 136489 - DNA, 465 bp, Enterobacter cloacae
atggttgtatcaacgatatttgccccttcgctattgggattaatcgatggttacggcgcgtttaatggtatcccggaaaaaagccactgttccgtatttgctgagacggatttgcgcggaggctggataggacaccaggtggcggtcgagatcctcaatgagaaaaacctgtggcaggagatggctcatattctggcgcagcgattgatggtgttgaggatgcgttcgcaggagatggtgggggtggattcttatccgatggtgcgaaccctgctaacagagctggcggactacccggaggagtatcgtcgccaaattaacgcgttaagctttatacagcgccgcaccaacctgtcgcgcagccgtgttatgtcgattctggcagagctgcgcaaaggtggttacattacggtccatcgcggggtgctggaaaagataacccgcacgcttcccgcccacttttaa

SEQ ID NO: 136490 - DNA, 291 bp, Enterobacter cloacae
atgatatcgcttatcgccgtgctcaaggcgaaaccgggccaaacggacgccctgcgccaggccctgcaggcgctgctcctgccgacgagacaggagccgggcaacctcgactatgccctgtttcagctgcgcgacgcgccggacaccttctatatgcgcgaggcgtggcagggacaggacgccctcgatgcccatgtcgcgatgccctattttcaggcgtttatggcgcagatggagtctctgctggctgagccgctgcggctggactttctgacgccggttgagccttag

SEQ ID NO: 136491 - DNA, 1008 bp, Enterobacter cloacae
atgaaagctatcgccattactcaagccgccgctgacggcaacaacatcccttctttaaccgagatcgacctgccgatccccaccgcccacgggcgtgatctgctggtcgctgtgaaggctatctcggtcaatccggtagacaccaaagtgcgcgccggctttcagggcgacacgccgcgggtgctgggctgggacgccgttggcgtggtgcagtccgtcggtgaggaagtgacgctgttcgcgcccggggacgaagtctggtacgccggcgcgctgggccgggccggcagcaacagtgaatatcagctggtggatgagcgcctggtggcgcacaaaccgcgcaccctcgataatgcctccgccgccgcgctgccgctgacggcgatcaccgcctgggagctgctgtttcaccgtctcggcgttgaggaaggcggcaatgcgggcgacacgctgctaatcgtcggcgcggcgggcggcgtggggtctatcctgacccagctggccagtaaactgaccgccatgacggtgatcggcaccgcctcgcgtcccgaaagccagcagtgggtccgcgaggcgggcgcgcaccatgtgatcgatcacagcaagccgctcgccgacgagctggcgcgcattggtatcacgtcggtaacccatgtcgccagcctgaccaataccgagcagcacttcaacgcgctgatcgacgccctcgccccgcagggcaagctggcgctgattgatgacccggagaccctggacgtggtgccgctgaaagcgaaaagcctgtccctgcactgggaatttatgttcacccgttcaatgtttgagacggatgatatgatcgcccagcatcagctgctcacccgcgtggcggcgctgatcgacaaccacactatcaaaaccacccttggcgaacactacggcgccatcaccgccgccaatctgcagaaagcgcatcgccagctggaaaccggacgcgccgtcggcaagatcgtgctggaggggttttaa

SEQ ID NO: 136492 - DNA, 468 bp, Enterobacter cloacae
atgacccccgaactcagacactgtttttccattaccatccaggttgataaaccgataatcgtctcccgcagcccgcagaccggtaagcgccagctgatcccgattgtcggcggcagcgtctcgggtcaacttcgcggccacgtattacccggcggcgtcgacagccagataatcgaacccgacggcacctgcaggctgtccgcccgctatgccctgcaggtggcggaaggcacggtctatgtggaaaacaatggcatccgccgggtgccggcccagtatcatgaccagcttttcgccgacgatatgcgcttttttagcgatattccgccagaagccatctattttcgcaccgtgcccacctttgaggtggatgctcccgcgctcagctggctaaccacctcgctgtttatctgcgccggtggccggacccaggatggggtgatgctcgacttctatcaggtgggctga

SEQ ID NO: 136493 - DNA, 1395 bp, Enterobacter cloacae
atgaaagatcacattttgtccgtcaaagagaaaattggttatggcatgggtgatgccgccagccacattatttttgataacgtcatgttgtatatgatgtttttctacactgatatttttggtatccccgccggctttgtcggcaccatgttcctgctggcgcgcgcgctggacgcgatttccgacccgtgtatgggtctgcttgccgaccgtacccgcagccgctggggtaagttccgcccatggatcctcttcggcgctatcccgttcggcctcgtctgcgtgctggcctacagctcgccggatttaagccacaacggcaagctgatctacgccgccgtgacctacacgctgctgaccctgctctacaccgtggtgaatatcccttactgcgcgctgggcggcgtgatcaccgacaacccgacgcagcgcatttcgctgcagtcctggcgcttcgtgctggcgacggcggggggcatgctctccaccgtgctgatgatgccgctggtcaactttatcggcggcgaagacaaagcgctcggcttccaggggggcatcgcggtgctgtcggtgattgccttcctgatgctggccttctgcttctttactaccaaagagcgtgtcgaagcgccgccgagcagtacctcgatgcgtgaagacctgcgcgatatctggcgcaatgaccagtggcgggtggtcggcgtgctcaccatcctcaatatcctcgcggtctgcgttcgcggcggcgcgatgatgtattacaccacctggatcatgggctcggcggcgctgttcaccgccttcctcacgacctactgcgtcggcaacctgattggctcggcgctggcgaaaccgctgaccgactggaaatgcaaagtcagcgtcttctggtggaccaacgccctcctggcggtgctcagcgtggcgatgttcttcgtaccgatggacgccgaaatcaccatgtttgtctttatcttcgtcattggcgtactgcaccagctggtgacgccaatccagtgggtaatgatgtccgacaccgtcgactacggcgaatggtgtaacggcaaacgcctgaccggcatcagcttcgccggtaccctgtttgtgctcaagttagggctggcgctgggcggcgcgctgatcggctggatgctggccggcggcggctatgacgccgccgctaaaacccagaacagcgccaccctcaccatcattatcgccttgttcaccctcgttccggcggtgtgctacctgctgagcgcggtgatcgccaaacgctactacacgctgaaaacgccgttcctgaaaaaaatgatggccgagctggccgagggcgcgcgtcgcaacgaacaagatttcaccgccgccccgatcgacaaagaatggcaaaactaa

SEQ ID NO: 136494 - DNA, 276 bp, Enterobacter cloacae
atggatgtctttctgcacgttcagcggatagtgcgggccgttatccagcgcgccctggaagtgctccatgcgcacgccgattatcccttcctgcggcgagaaaaagcgcagggtgaacaatggcgtatccagctgccaggcgcgttcgcggacatcgcgcggcgcggcatagaccaccatttcattcccctgctgctccacctcgtaaacctgtacgggttggatcaggttgagccctggttgaatgagccagtttccatcactgattttcattaa

SEQ ID NO: 136495 - DNA, 237 bp, Enterobacter cloacae
atggttgaccagcacgccgtagccgcggttggtcagatagaacgggatatttttgtaggattgctcggtgctggtgccgccgtcctcgttccaggtttctaccgtctggccgttgcgcaccagggcggtaaagcgctcgccgaggccgtagacggtttcgccgacgccgaggtcgaggcgctcaaacatgtagttgcgctgggtcttactatcctgcacgtagccgttgttttttag

SEQ ID NO: 136496 - DNA, 972 bp, Enterobacter cloacae
atgaatttagaaaaaatcaatgagttaaccgcgcaagatatggcgggtgtcaatgcgacgattcttgagcaactcaactccgatgttcagcttatcaatcagttaggctattacatcgtcagcggcggcggcaaacgcattcgcccgatgattgctgtgctcgccgcacgcgcggtgggctatcaggggagcgcgcatgtcaccattgccgcgctgattgaatttattcataccgccaccctgctgcatgacgacgtcgtcgatgagtctgatatgcgtcgcggcaaagccacggccaatgcggcgtttggcaatgccgccagcgtgctggtcggcgattttatctatacccgcgcctttcagatgatgacccagctgggctcgctgaagatccttgaggtcatgtcggaagcggtgaacgtcattgccgaaggcgaagtgctgcagctgatgaacgtcaatgacccggatatcaccgaagagaactacatgcgcgttatctacagtaagacggcgcgcctgtttgaagctgcctcgcagtgtgcgggactgctggccgactgcactgcggaagaagagcgcgcgttgcaggattatggccgctatctcggcaccgctttccagctaatcgacgatttactcgattatagctctgacggcgagcggctcggtaaaaacgtcggtgacgacctgaacgaaggtaaacccacgctaccgctgctgcacgccatgcaccatggcacacccgatcaatcagcgatgatccgcggtgcgatcgagcaaggcaacggccgccatctactggatgctgtgctggaaacgatggcgacctgcggttcgctggaatggacgcagaagcgtgccgaagaagaagctgacaaagccattgccgcgctgcagatcctcccggacacgccctggcgcgaagccttgattgggctggcgcatattgcagtccagcgcgatcattaa

SEQ ID NO: 136497 - DNA, 273 bp, Enterobacter cloacae
atggataagttcatcgactggcatcccgcagatattgttgcgggattacgtaaacggggaacatcgctggcggcagagtcgcgacggcacggactaagttcttcaacgctggcgaacgccctgacccgcccctggccgaaaggcgaattgattatcgccacagcgctggaaacgcagccgtgggtcatctggccgtcacgctaccacgacccggtgactcatgagtttatcgacagaacgcagatgatgcgtcagaagaagatcgacaagtga

SEQ ID NO: 136498 - DNA, 1260 bp, Enterobacter cloacae
atggataaattccgtgttcaggggccgactcgccttcagggtgaagtcaccatctccggggcaaaaaacgccgccctgccaatcctcttttccgcgctgcttgccgaagagccggtagagatccaaaacgtacctaagctgaaagacatcgataccaccatgaagctgctgagccagctgggcgcgaaggtcgagcgcaatggttcggtatggattgacgccggcccggtcgatgtattctgtgctccgtacgatctggtgaaaaccatgcgcgcctctatctgggcgctgggcccgttggtggcacgtttcggtcaggggcaagtttctctgcctggcggctgcgctatcggcgcgcgtccggtcgatctgcatattagcggtctggagcagctgggcgccgagatcaaactggaagaaggttatgtcaaagcctcggtcagcggtcgccttaaaggcgcgcatattgtgatggataaggtgagcgtcggcgccaccgtaaccatcatgagcgcagcgacgcttgcggagggaacgacgattattgaaaacgccgctcgcgagccggagattgtcgataccgccaacttcctgaacgcgctgggcgcaaaaatcacaggccagggtagcgatcgcattaccatcgaaggcgtgcagcgcctgggcggcggcgtctaccgtgtgctgcctgaccgtattgaaaccgggactttcctggtggccgcggcgatttccggcggcaagatcctctgccgtaacgcgcagccggataccctggatgccgtactggcgaagctgcgcgacgccggggctgacatcgaaacgggcgaagactggatcagcctcgatatgcacggcaaccgtccgaaagcggtcaacgtgcgtaccgcgccgcacccgggcttcccgaccgatatgcaggcccagttcacgctgcttaacctggtagcggaagggaccggcgtgatcaccgaaacgatctttgaaaaccgcttcatgcacattccggagctgatccgtatgggcgcgcacgcggagatcgagagcaataccgctatctgtcacggcgtgaagcagctttctggcgcgcaggtgatggcgaccgatttgcgcgcgtcggcgagcctggtgctggccggctgtatcgctgaagggaccaccatcgtcgatcgcatctatcatatcgatcgcggctatgagcgtatcgaagataaactgcaggccttgggcgccaatattcaacgcgtgaagggcgagtaa

SEQ ID NO: 136499 - DNA, 255 bp, Enterobacter cloacae
atggaaaatcatgaaattcagaccgtgctgatgaacgcactccccctccaggaagtccacgtctctggcgatggcagccactttcaggttattgctgtgggtgagatgttcgatggcatgagtcgggtgaaaaagcagcagagcgtctacgcgccgctgatggaatatattgccgacaaccgcatccatgcgctgtcgatcaaggcctttactccgcaggagtgggcgcgagaccgcaaactcaatggcttctaa

SEQ ID NO: 136500 - DNA, 291 bp, Enterobacter cloacae
atgagcgggcagctgagctggactcgcgagggcgagacgctggcgctgcacggggagctggatcaggatctgctggtcccgctctgggaggcgcgcgcccaggcgacggcgggaacggcgatcatcgatctcagtcagaccacgcgcgtggacaccgcgggcctggcgctgttagtgcattttgtggcgctgattcgccgtcagggccgggaagcgcaactggtcggcaagagcgaaaacctgcaaacgctgatcggtctttacaacctgcctgccgatctgatctcataa

SEQ ID NO: 136501 - DNA, 636 bp, Enterobacter cloacae
atgtttaaacgcttactcatggtcgccatgctggtgattgccccgctgaccgccgtccaggctgcagatcagtccaatccgtataagctgatgaatgaagcggcgcagaaaaccttcgatcgcctgaagaatgaacagccgaagattaaagctaatcctaactatctgcgcgacatcgtcgaccaggagttattgccgtatgtacaggtgaaatatgccggcgcgctggtgctgggccgctattacaaagaagcgacccctgcgcagcgtgaggcctattttgccgccttccgtgaatacctgaagcaggcctacggtcaggcgctggcgatgtaccatgggcagacttaccagattgctccggagcagccgctgggcagcgcaaccatcgttccgatccgcgtcactatcatcgacccgaacggtcgtccgccggtacgtcttgacttccagtggcgtaaaaatacccagaccggcaactggcaggcctacgatatgatcgcggaaggggtgagcatgatcaccaccaaacagaatgagtggagcgatctgctgcgcaccaagggcgttgatggcctgaccgcgcagctgaaagcgatctctgcgcagccgatcaccctggaacagaaaaaataa

SEQ ID NO: 136502 - DNA, 552 bp, Enterobacter cloacae
atgcaaacgaaaaaaactgaaatctgggtaggggtgttcttactggtggcgctgctggcggcgctgtttgtctgcctgaaggcggcgaacgtcacctcgctacgcaccgagccgacttatcgcctttatgcgactttcgataacatcggcggcctgaaggcgcgctcgccggtgcgcatcggcggcgtggtagtggggcgggtagcggacattacgctcgatccgaaaacctatctgccacgcgtggagctcgatatcgatgagcgctacaaccatatcccggataccagttcgttggcgatccgcacctctggcctgctgggcgagcagtacctggcgctgaacgtcggttttgaagacccggacctcgggacgactatccttaaagacggcggcactatccaggacaccaagtccgccatggtgctggaagatctgattggtcagttcctttataacagtaagggcggcgacaatcagaattctggcaatgataaggccgaggcagaaggtcatactgacgcgacgccggcagccggcacgacgcattaa

SEQ ID NO: 136503 - DNA, 783 bp, Enterobacter cloacae
atgctgtttaatgcgctggccgcgctaggtcatcgcggtattaaaaccaccgcgacgtttggacgcgccggattaatgcttttcaacgccgttgtcggcaaaccagagtttcgcaagcacgcgccgctgctggttcgtcaactctataacgtcggcgtcctgtcgatgctgattatcattgtatcgggcttgtttatcggtatggtgctcgggctgcaggggtatctggtgttaaccacctacagcgcagagaccagtcttggcatgctggtggcgctgtcgctgctgcgtgagctggggccggtggtcgccgcgctgctgtttgccggccgcgccgggtcggcgctgaccgccgagattggcctgatgcgggccacggaacagctctccagtatggagatgatggcggtggatccgctgcgtcgcgtcatttccccacgcttctgggccggtgtcatttcgctgccgctgctgacgattatcttcgtcgcggtagggatctggggcggtgcgctggtgggtgtgagctggaaaggcattgacggtggttttttctggaccgcgatgcaaaatgccgtcgactggcgaatggatctggtgaactgcctgattaagagtctggtgttcgctattacggtaacctggattgcgttatttaatggttatgacgctatccccacttccgccgggattagccgggcgacaacgcgtaccgtggtgcatgcgtcgctggcggttctggggctggattttgtgctgactgcgctgatgtttgggaattga

SEQ ID NO: 136504 - DNA, 813 bp, Enterobacter cloacae
atgagccaaactcaggcgaatttagttgaagtgcgcggtatccgcttttcacgcggcgatcgtgtgatcttcgacgacatctcgctgtcggtgccgcgcggtaaaattactgcgatcatgggaccttcggggatcggcaagactaccctgttacgcctgatcggcggccagatcccgccggacaggggagagatcctgtttgatggcgagaacgtgccgcagatgacgcgttcgcgtctttatacggtgcgtaagcggatgagcatgctgttccagtccggcgcgctgttcaccgatctcaatgtctttgacaacgttgcctatccgctgcgcgaacatacgcatttgccgcctgcgctgctgcatacgacggtgatgatgaagctggaagcggtggggctacgcggtgcggcgaagttaatgccttctgagctttccggtgggatggcgcgccgcgccgccctggcgagagccattgccctggagccggatctgattatgttcgacgaaccgttcgtcgggcaggatcccatcactatgggcgtgctggtgaagctgatttccgaactcaacagcacgctgggtgtcacttgcatcgtggtttcgcacgatgtgcccgaggtgcttagtattgcggactacgcgtatatcgtggcggataaaaagattgtcgcccacggtagcgcccagtcgctacgggagaataccgatcctcgggttcgtcagttcattgatggtattgccgacggtccggtgccgttccgttatcctgctggcgactatcaccatgatttattaggcatagggagttga

SEQ ID NO: 136505 - DNA, 978 bp, Enterobacter cloacae
atgctcttagcgacggctctgttaattattggtttattgctggttgtctacagtgccgatcgtctggtctatgccgcctccatcctgtgtcgtatgttggggatcccgccgctgatcatcggcatgacagtggtaagtatcggcaccagcctgcctgagatcatggtcgccaccgcggcctcgctgcacgggcagaccgatctggcggtcggcaccgcgctcggatctaatatcaccaatatcttattgatcctcggtctcgccgccttactcaggccatttaccgtgcattctgatattctgcgccgcgaattaccgctaatgttgctggtcagcgtgctggcgggactggtgctctacgatggacaactgacccgtctcgacgggctatttttactggcgttagcgcttctgtggctgctgttcaccatcaaaatcgctcgcctggcggagcgccagggaagcgatagcctgacccgcgaacagctggcggagctgccacgcgaagggtcgctgccggtcgccctgctctggttaggggtagcgatgatcgtcatgccgatggcgacccgcatggtggtggataacagtacagtgctggcaaactatttcgccatcagcgaactgaccgtcggcctgacggtggtggcgataggcaccagcctgccggagctggccaccgccatcgccggggcgcggaaaggggaagatgatattgccatcggcaatatcatcggcgccaatatccttaatatcgcactggtgctgggtttaccggcgctgatcgcgccggggagctttgcgaccgaagccttcactcgcgattatggcgtgatgctgctggtcagcctgatcttcgcagtgctgtgctggcgccgtcagcagcagccgggacgactggttggcgcgctgctggtcggcggctttgtggtttggttggcgatgctgttttggacagcaccgctcttcgttgaatga

SEQ ID NO: 136506 - DNA, 1005 bp, Enterobacter cloacae
atgattcgggataacatcatgtcgcaaatagatttgcccacggattttgactttcaacaggcaggccgtcaggtgctggaaattgaacgtgaaggtctggcccagctcgatcaatacataaatgaagactttacccatgcctgcgaaacgattttccgctgcggcgggaaagtcgtggtgatggggatgggcaaatccggccacatcggccgcaaaatggcggcaaccttcgccagtaccggcacctcggcattttttgtccaccccggcgaagcggcgcacggtgatttaggtatggtcaccccgcaggatgtggtaattgcgttgtcgaactccggcgaatcgaatgaaatcctcgcgctgatcccggtcctcaagcgccagcaggtgaagcttatctgtatcaccagccggccggagagcagcatggcgcgcgcggcggatatccatctgtgcgtgaaagtgccgaaggaggcctgcccgttaggactggcgcccacgtcgagcaccaccgccgcgctggtgatgggtgatgccctcgccgtcgccctgctggaagcccgcggctttaccgctgaggatttcgccctgtcgcatccgggcggcgcactcggccgtaagctgttgctgcgggtcaatgatattatgcataccggtgatgaaatcccgcacgtcggcctgcaggcgaccctgcgcgatgcgctgctggaaatcacgcgtaaaaatttaggcatgaccgctatctgcgatgacgatatgaacatcatcggtatctttaccgacggtgacctgcgccgggtcttcgataccggcgttgatatgcgcgatgccagcattgccgacgtcatgacccggggaggtatccgcatccgccccggcactctggcggtggatgcgctaaacctgatgcaatcccgtcatatcacctgcgtgctggttgccgatggcgaccatctgctgggtgtggtacatatgcacgatctgctgcgcgcgggcgtagtgtaa

SEQ ID NO: 136507 - DNA, 567 bp, Enterobacter cloacae
atgaataatgctgatgctcagttagcgacctgctacgggccggtaagccaggcgtttgtcgatcgcgcggcgaagatccgtctactgatccttgatgtcgacggtgtattatccgacgggcttatctatatgggtaatcacggcgaggagctgaaagcgtttaacgtccgcgatggctatggtatccgctgcgcgctgacctcgggtattgaagtggcgattattaccgggcgaaaagctaaactggtagaagatcgctgtcagacgctgggcatcacgcatttgtaccaggggcagtcggacaagctgctggcgttccgcgatctgacggacaaactgcacgtgcggccggaagaagtcgcctacatcggcgacgatctgattgactggccggtgatggccgaagtgggccttagcgtcgccgtcgccgatgcgcatccgctgctgctaccgcgggcgaattatgtcacgcgaattaacggcggacgcggcgcggtacgcgaagtctgcgatttgttactattggcgcagggcaagttggatgaggccaaagggcaatcaatatga

SEQ ID NO: 136508 - DNA, 576 bp, Enterobacter cloacae
atgagtaaaaccagacgttgggttatcattttactgtcgctgctcgcgctgatccttatcggcctgaatctggcgaatacggacgacacggcccagccggaggtcaatcctaacgaccctacgtataaaagcgaacataccgacaccgtggtatacagtccggaaggcgccctgagctatcggctgattgccgagcacgtggaatatttttccgatcaggaggtctcctggtttaccaaaccggtgatgaccacctttgatactaacaaggtgcctacctggtcggtcagagcagacaaagcgaagctgacgaatgaccggatgctctatctttacgggcacgttgaggtgaatgcgctcgcgccagattctcaactgcgcaaaattacgacggataacgcccagataaatctggtaacgcaggacgttacctccgatgacatggtgacgttatacggcaccacatttaattccagcggcctgaaaatgcgtggaaaccttcgcagcaaaaatgccgagctgattgaaaaggtgagaacctcttatgaaattcagaacaaacaaactcagccttaa

SEQ ID NO: 136509 - DNA, 546 bp, Enterobacter cloacae
atgaaattcagaacaaacaaactcagccttaagattgcgctcgccggcgcgttactggccgccagcctgccggccctcgccaagacgggcgataccgatcagccgatccatatcgaatccgatcagcagtcgctggacatgcagggcaatgtcgtcaccttcaccggtaacgtggtcgtgacccaggggacgatcaagattaacgctgataaagtggtggtcacccgtccaggcaacgagaaaggcaaagaggtgatcgaaggtttcggtaacccggctactttctatcagatgcaggataacggcaagccggtaaaaggccgggcgtcgaaaatgcgctacgagctgcagaacgattacgtcgtgctgacgggcaacgcttatctggaacagctcgacagcaacatcaagggcgacaagatcacctatctggtgaaagagcaaaaaatgcaggccttcagcgacaaaggtcgacgcgtcaccaccgttctggtgccgtccgagctgcaggacaaaagcggcaaccagcaaaagaagagtaactaa

SEQ ID NO: 136510 - DNA, 726 bp, Enterobacter cloacae
atggcaaccttaactgcgaagaatctcgctaaagcgtataaaggccgccgcgtggtggaagatgtcagtctcaccgttaactcgggcgagattgtcggcttgctcggcccgaacggcgccggtaaaacgaccaccttctacatggtggtcgggattgtgccccgcgacgcaggcaatatcatcatcgatgacgaagacatcagcctgctgccgctgcacgcgcgcgcgcgacggggcatcggctacctgccgcaggaagcgtcgattttccgtcgcctcagcgtctatgacaacctgatggcggtcctgcagatccgtgacgatctaaccagcgaacaacgggaagatcgcgctaaagagctgatggaagagtttcatattgagcacctgcgcgacagcctcggtcaggcgctctccggtggtgaacgccgccgcgtcgaaatcgcccgcgcgctggcggcgaatccgaaatttattcttctggatgaaccctttgccggcgtggatccgatctccgttatcgatattaaacgcatcattgagcacctgcgcgacagcggtctcggcgttctgattaccgaccataacgtccgtgagaccctcgcggtctgcgaacgcgcgtatattgtcagtcagggacaccttatcgctcatggtacaccgcagcagatcctcgaagatgagcaggttaagcgcgtgtatcttggggaagacttcagactctga

SEQ ID NO: 136511 - DNA, 1434 bp, Enterobacter cloacae
atgaagcaaggtttgcaattaaggcttagccaacagcttgccatgacgccgcagctgcagcaggcgattcgtttgctgcagttgtccacgttagaactccagcaagagctccagcaagcgctggaaagtaacccgttgcttgagcaaaccgatcttcacgacgaggtagaggcaaaagaggtggaggaccgcgagtccctcgataccgtcgatgcgcttgagcaaaaagagatgcccgacgaactgcctctcgatgccagctgggatgaaatctataccgctggcacgccgtcgggtaacggcgtcgactatcaggacgacgagcttcccgtctatcaaggcgagaccacccagacgctgcaggactatctgatgtggcaggttgagctgacgcctttcaccgacaccgaccgcgctattgccacctctatcgtcgacgccgtcgacgatacgggctacctcacgattcagattgaagatattgtcgacagcatcggcgatgacgagatcggcctggaggaggtggaagcggtcctcaagcgaatccagcgttttgatccggttggcgtcgcagcgaaagatctgcgcgactgcctgctgatccagctgtcgcaatttgctaaagagacgccgtggctggaagaggcgcggctgattatcagcgaccatcttgatctgctggccaaccatgatttccgcactctaatgcgagtcacccgcctgaaagaagaggtgcttaaagaggcggtcaacctgatccagtccctggatcctcgccctggccagtccattcagaccagcgaaccggaatatgtcatcccggatgtgctggtgcgcaaggtgagcggccgctggaccgtcgagctcaacgccgacagcattccacggttgaaaataaatcagcagtatgcggcaatgggcaacagcgcccgcaatgacgccgacggccagttcattcgcagcaatctgcaggaagcccgctggctgattaaaagtctggaaagccgcaacgataccctgctgcgcgtcagccgctgcatcgtagagcagcagcaggcttttttcgaacagggtgaagagtatatgaagccgatggtgctggccgatatcgcccaggccgtcgagatgcatgaatcgacgatttcccgtgtcaccacgcaaaaatatctgcacagtccgcgcggtatttttgaactgaagtatttcttctccagccatgtgaataccgaaggcggaggcgaagcctcgtcgacggcgattcgcgcgctggtgaagaagctcatcgccgcggaaaaccccgcgaagccgttgagcgacagtaagctcacctccatgctgtccgagcagggtattatggtggcgcgccgcactgtcgcgaagtacagagagtctttatccatcccgccgtcaaaccagcgtaaacaactggtctga

SEQ ID NO: 136512 - DNA, 288 bp, Enterobacter cloacae
atgcagctcaacattacaggacacaacgtcgaaattacgcctgcgatgcgcgaattcgttacggcgaagttcagcaagctggagcaatttttcgaccggatcaatcaggtctatattgtgttaaaagtagagaaagtgacgcaaattgcggacgcgaatctgcatgtcaacggtggcgaaatccatgccagtgcggaagggcaggatatgtatgcggctgtcgatggtcttatcgacaagctggcaagacagttaacgaagcacaaagataaactaaaacaacactaa

SEQ ID NO: 136513 - DNA, 489 bp, Enterobacter cloacae
atgatgaacaacgattcggctctacaactgagcaacgtcctgaaccaggaatgtacccgtagccaggtgcactgccagagcaagaagcgtgctctggaaatcatcagcgaactggccgccaaacagttaagtttgccgccgcaggtggtgttcgaagcgatcctcacccgcgaaaaaatgggcagtaccgggatcggcaatggtatcgccattccccacggaaaactggaagaggatacgctgcgtgctgtcggcgtttttgtccagctggaaacccccatcgccttcgacgcgatcgacaatcaacctgtcgacctgctgttcgcgctgctggtgccggccgaccagacaaaaactcacctgcatacgctctccctggtggccaaacggctggcggacaaagcgatttgtcgtcgcctgcgcgcggcgcagagcgatgaagagttgtatgagatcatcaccgaagcaggaagcagcgatgacgcataa

SEQ ID NO: 136514 - DNA, 855 bp, Enterobacter cloacae
atggtactgatgatcgtcagcggccgctcgggctcggggaaatccgtcgctctgcgagcgctggaagatatgggcttttactgcgtggataacctgccggtcgtgctgctgcccgacctggcgcggtcgctggctgaccgtaatatctccgcggccgtcagcatcgacgtgcgtaacatgccggaatccccggagatcttcgagcaggcgatgcagaatctgccggaatgtttttctccgcagctgctgttccttgatgccgaccgcaataccctgatccgccggtacagcgatacccgtcgcctgcacccgctctccagcaagaatctgtcgctggaaagcgccatcgacgaagagagcgatctgctggagcccctgcgctcccgcgccgatctgatcgtcgatacgtcggaaatgtcggtgcatgagttggccgagatgctgcgtacccgactgctgggtaaacgcgagcgtgaactgacgatggtcttcgaatccttcggcttcaagcacggtattccgatcgatgccgattacgtctttgacgtgcgctttctgcccaacccgcactgggatccgaaactgcgtccaatgaccggcctggataaaccagtggccgccttcctcgatcggcacactgaagtgcacaactttatttatcagacccgaagctatcttgagctatggttaccgatgctggagaccaacaatcgcagctatctgacggtggccattggctgtaccggcggtaaacatcgttcggtttatattgctgaacaactggctgactacttccgctcgcgcggcaagaacgtgcagtctcgtcatcggacgctggaaaaacgtaaatcatga

SEQ ID NO: 136515 - DNA, 273 bp, Enterobacter cloacae
atgaccgtaaagcagaccgttgaaatcaccaataagctgggcatgcacgcccgcccggcgatgaagctgttcgaactgatgcagaatttcgatgccgaagtactgctgcgcaacgatgaaggcacggaggcggaagccaacagcgtgattgccctgctgatgctggactcggcgaaagggcgacagatagaggtggaggccagcggtccgcaggaagttgaagccctcgccgcggtgattgccctgtttaacgctggctttgacgaagactaa

SEQ ID NO: 136516 - DNA, 726 bp, Enterobacter cloacae
atgaggctccgcattgcgccctttgcgctgctaaaacgtctggcattgcgtctgctgctgatcgccgccgttttctggggcggggggatcgcgctgtttagcgtgctgccggtgccgttttcggcggtgatgcttgagcggcaggtgagcgcctggctgtccggcgatttccattatctggcgcattccgactgggtcgctatggataaaatctccccatggatggggctggcggtgattgccgccgaagatcagaagttcccggaacactgggggttcgacgtgtcggcgattgagaaagcgctggcgcacaatgagcggcatgatacccggattcgcggcgcgtcgacgctgtcgcagcagacggcgaaaaacctgtttttatgggatggccgcagctggctgcgtaaggggctggaagccgggctgactgtcgggatcgaaaccgtgtggagtaaaaagcggatcctgaccgtctacctgaatattgccgagttcggcgatgggatatttggtgtggaagcggccgcccagcgctattttcataaacccgccagtcagctgacgccgggggaagcggctctgctggccgcggtgctgccgaacccgatccgctatcgcgccgatgcgccgtcaggctatgtgcgcagtcgtcaggcctggatcttacgccagatgcgacagctgggcggggaagggttcatgcgcgagcataagctctattag

SEQ ID NO: 136517 - DNA, 654 bp, Enterobacter cloacae
atgaaaaaaattggtgtggtactgggcggctgcggcgtgtacgacggcagtgaaatccatgaggcggtgattaccctgctggcgatcgcgcgcaacggcgcgcaggcagtgtgctttgcgcccgataaaccgcagcgcgatgtcatcaaccatctaaccggggaggcgatgccagagcagcgcaatgtgctggtggaagcagcgcgtatcgcccgcggcgacatcctgccgctgacgcaggcgcgtgcggagacgctggacgcgctgatcgtccctggcggcttcggcgcggcgaaaaatctaagcagcttcgccgccgagggcagcgaatgccaggtggatcccgatctgcgggccctggcgctggcgatgcatcagaccggcaagccgctgggctttatgtgcattgccccggcgatgctgccgaaaatctttgcgtttccgctgcggataaccattgggaccgatcttgataccgccgatgtggtggaagagatgggggcagagcacgtgccttgcccggtcgacgacatcgtggtggatgaagacaacaaagtggtcaccactccggcgtatatgctggcggaggacattgcgcaagccgccaccggaattgagaagctggtggcccgcgtgctggcgctgagcgcatga

SEQ ID NO: 136518 - DNA, 2340 bp, Enterobacter cloacae
atgaagcaaattcgtatgctggcgcagtattatgtcgacctgatgatgaagctgggtctggtccgcttttcgatgctgttggctcttgcgctggtggtgctggccatcgtggtacagatggcggttaccatggtgttgcatggccaggttgaaagtatcgacgttatccgctctatcttctttggcctgctgatcacgccttgggcggtctactttctctcggtggtggtggagcagctcgaagagtcccgtcagcgtctttcgcggctggtggacaagctggaggagatgcgtgagcgcgatctaaagctgaacgtccaactgaaagataacatcgcgcagttgaatcaggagattggcgaacgtgaaaaagcggaagccgagcgcgagaccaccctcgagcagttgaagattgagatgaaagagcgtgaagagacgcagatccagctcgaacagcaatcctcctttctgcgctctttccttgatgcttccccggacctggtcttctatcgcaatgaggataaggagttttcaggctgtaaccgggcgatggagctgctgaccggcaaaagcgagaaacagctgatccacctcaaaccgcaggacgtctatagcgaagaggcggcggaaaaggtactggagaccgacgagaaggtgttccgccataatgtatcgctgacctatgagcagtggctggactatcccgatggccgcaaagcgtgctttgaaatccgcaaggtcccctactacgatcgcgtcggtaagcgtcgcggcctgatgggcttcggccgcgatatcaccgaacgtaaacgctatcaggacgctcttgagcgcgccagccgggataaaaccacctttatttctaccatcagtcatgagctgcgtaccccgctaaacgggatcgtcgggctgagccgaattttgctggataccgaactgaccagcgagcaggaaaaatacctgaaaactatccatgtctcggcggtgacgctggggaatatcttcaatgatattatcgacatggacaaaatggagcgccgcaaggtgcagctcgataaccagccggtggacttcaccagcttccttgccgaccttgaaaacctatccggcctgcaggcacagcagaaggggctgcgctttgtgctggagccgagcctgccgctgccgcataaggtaatcacggatgggacccgcctgcggcagatcctgtggaatcttatcagcaacgccgtgaagtttaccccgcagggcggaggggtgaacgtccgcgtgcgctatgacgaaggcgatatcctgcacttcgaagtggaagactccggaattggtattcctgaagcggaacaggacaaaattttcgccatgtattaccaggtcaaagacagccacggcggcaaaccggccaccggaaccgggattggtctcgccgtctcgcgtcgcctggcgcgtaatatgggcggtgatatcagcgttaccagccagccgggtaaaggggcgacctttacgcttaccgtccatgcgccagccattgcggaagaagtggaagatacgctggcggaagacgacatgccattaccggcgctcaacgtgctgctggttgaggacattgagctcaacgttattgtggcccgttcagtgctggaaaaactgggtaacagcgttgatgtggcgatgaccgggaaagccgcgctggagatgtttgagccaggcgaatatgaccttgtgctgttggatattcagttaccggacatgaccggactggatatttcccgggaactgaaacagcgctttgccgctgacgagctaccgccgctggtcgccctgaccgccaacgtgctgaagaataagaaagagtatctcgacgccggaatggacgatgtgttgagtaagccgctatcggtgccagcgctaacggccatgatcaagaaattctgggatgcaccggatgaggaagcgcaggaagcgccggcggctgatctgcataaagccgacgcggtgctggataccgatatgctggagcaatatatcgagctggtgggaccgaagcttatcaacgatggtctcgcggtgtttgagaagatgatgccgggctacatgtccgttctggagtctaatctgaccgcccgcgaccaaaaagggattgtcgaagaggggcataagatcaaaggggcggccggttctatcggactgcgccacatccagcagctgggccagcagatccagactccggatctgcctgcctggtctgataatgtcgctgaatgggttgaagagatgaaatccgagtggcaaaacgatgtagcggtactgaaggcgtgggtggcgaaagccagcaaaaaatga

SEQ ID NO: 136519 - DNA, 1065 bp, Enterobacter cloacae
atgcagatgacaatgcgctggtttggaccagaggaagacaagatttcattagaacatattcgccaggtgcctggcgttgagggggtggtcggcgcgctctacgacgtcgcggtgggcgaagtatggccggtggataaaattgagcgtctggtcggtcaggcccatgccgcaggcctgaaaatggaggtgatagagagcgtcaacatccatgacgacatcaaaatcggcctacctacccgtgaccgctatattgccaactaccagcagaccatccgcaaccttgcccgctttggcgttaaagtcatctgctataacttcatgccggttttcgactggatgaagacggatatgaactacgtcctgccggatggctcgctgacgatggcgtttgagaagaaagatatcgataagcggctggaagacgtggtgaaggaggtgcttgagaattcaaacggctttgccttgccgggctgggagccggaacggctggcggaggtgcagaccctgtttgccaaatatagcgcggtggatgatcagaagctgcgggagaacctggtttattttctgcaggcggtgatcccggtttgcgaagaggttggggtgaaaatggcgatccacccggacgacccgccgtactccatttttggcctgccgcgggtggtcaaaaaccgcgacgatctggactggatctgccgggccgtcgattcacccgccaacggcattacgctctgcaccggctcgattgccgaagatcctgataatgacgtgtacgccatcctggccgaatttacccggcgtaagcgaattcattttgcccacgtccgcaatataaagctgatgcaggataaagacttttacgagtgcgcccatccgtcagagtacggctccctggatatgtacaaagtgatgcaagcgctgtatgacaacggattcgacggctatattcgcccggatcatggtcgctttatctggggagagaccggacggccgggctatggcctgttcgaccgcgccctcggcgtgacctacctgaaaggactctgggaggcgttaagcaagcgttaa

SEQ ID NO: 136520 - DNA, 1017 bp, Enterobacter cloacae
atgagaagcgtcgtcgtcaaagagccaggccaactgaacattgaatcacgtccggttccagttccgggcgcccatgaagtacgggtgaaaattgcttttgccgggatctgtggttccgatgtacacatctatcacggccacaaccctttcgcgaaatatccccgcgtcatcggccatgaattctatggcatcatcgacgccgtcggcgagcaggtatctccggcacgcatcggcgagcgtgtcgcggtggaccccgttgtcagctgcggccattgttatccttgctcggtaggaaggccgaatgtctgtacgcagctccaggtcataggagttcaccgcgacgggggatttagcgactatgcctgcgtgccggcgaaaaatgcctggcgcatccccgaggctatcagcgaccgtcaggcaacgatggttgagccttttaccatcgcggcaaatattaccgcccagctgcagcccacggcgcaagatattgccctggtttacggcgctggcccgatggggctgacaatcattcaggcgctaaagggggtatatggcgttaagcaggttatcgtcgtggatcgcattgccgaacgtctgcagatggcccgggaaaacggcgccgatctgacgctcgataacactgaccagccgctcgcggaacagctggcgcagcggcagcttgcccccacgctggtcattgatgccgcctgccacccggcgatcctgcaggaagccattctcctcgcctcccccgccgcccgcatcggtatactcggtttctccggcgaggcctcgaccctcactcagcaaagcatcaccagtaaagaaatttctattttctcctcccggctgaacagcgggcgttttccgctggtcatcgactggatggagaaaggccttattcgtccggaggcgttaatcacccattgtatgccgctggagcaggtgaaagaggccatggagatttttgctaacgaccgtaagacctgctgcaaagtgctgctgcagctgggttaa

SEQ ID NO: 136521 - DNA, 1284 bp, Enterobacter cloacae
atgggaaaaaatatccgctggattatcgtcctgttattatttttagtatatatgataaattatctggaccgggtggcattatccattacggtcccgatgattgaaaaggaccttgcacttaacgctgaacaattcggcattattttcggcagttttttcttcggctacgcggtatttaattttattggcggtttggccgtggataagtttggcgcaacgctggtaatgggcctggcggtcggtctgtggtcgctgttttgcggcttaaccgcggtagccaccggcttttattccatgctagtgctgcgggtgcttttcgggatggcggaaggccctatctgcgcatcggcgaacaagatgatcaacggctggtttcctaaaaaacaagcggctaccgccgtcggctttctcagcgcaggctctccgctgggcggcgcggtcgccggccccatcgtcggttacctggccctggcattcggctggcgcccggcttttatgattattttcgctatcggtattgtatggatgatagcgtggtttttcattgccgctaattcgcccgaaaagcacaaaaaagtcagccaggaagaacttaagctgattaataaaatgaaagaagaagaagtcgcgctggaaacaatagaaaatcaaacagctcactcgctgggttattatttgaaacagccaattattctggtaacggcctttgccttcttctgctacaactatattctgtttttctttctcagctggttcccgtcctatctggtacaacagcaccatctggatattaaacagatgagccttaccactatgatcccatggatagtcggctttgtcggtctggcgcttgggggctatatttccgataaaatttttaaactcaccgggcgcctgctgctgtcgcgcaaaattgtgctggtggtatgcctgctgatggccgctatctgcgtgggactggcgggtaccgtcagcagcgtcgtgcctgccgttctgctgatgtcggtctccatctttttcctctatgtaaccggggcgatctactgggcgattatccaggacgtggtgcataaatcccgcgtcggcggcgccagcggctttatccatcttatcggcagcgtctccggcatcgtggggccgattgttaccggctatatcgtgcagtctactggtaaatttgacagcgctttcgttctcgccggcactatcgccgcgcttggcgccctgctggtgctgttcgtgatcaaaactccgcgtgtgacgatgaaagccagccaggcataa

SEQ ID NO: 136522 - DNA, 933 bp, Enterobacter cloacae
atgcagttacagaaattagtcaatatgtttggtggggatcttatgcgtcgctatggcgaaaaggtccataagctaacgctgcacggcggttttagctgcccaaaccgcgacggcacgctgggccgcggcggttgcactttctgtaacgtggcatcgtttgccgatgaggcgcagcagcatcgctctatcgccgaacagctcgctcatcaggcgcagctcgtcaaccgggcgaagcgctatctggcctattttcaggcctacaccagcaccttcgctgaagtgcaggtgctccgttcaatgtatcgtcaggccgtcagtgccgcaaatatcgttggcctgtgcgtcggcacccgcccggactgcgttccgcaggcggtccttgacctgctgagtgaataccatcagcaagggtatgaggtatggctggagctggggctgcaaactgctcatgacaagaccctgcatcgcattaaccgtggacacgatttcgcctgttatcagcgtaccgcgcacctggcgcgagagcggggcctgaaagtctgtgcgcatctgatcgtcggtctgcccggagagagccaggggcattgtctgcagacgctggagcaggtagtggcgaccggcgtggatgggatcaaattgcatccactgcatattgtgaaaggcagcattatggccaaagcgtggcaggccgggcgtctcgatggcattgagctggaggcgtataccgtcaccgctggagagatgatccgccatacgccgccggaggtgatctaccaccgtatttccgccagcgcccgtcggcccacgctgttggcgccgctgtggtgtgaaaatcgctggaccggcatggttgaactggatcgttatctgaatcagcagggcgctcagggctcggcgctgggccgtagctgggttgctccccaggctgagtga

SEQ ID NO: 136523 - DNA, 711 bp, Enterobacter cloacae
gtgctgacccgggccgacggcagcgaggagcgcttcccccatctggtaaccgatcgcgcaaaaccgggcgtgattgccgtcaatcagcgggcggtacgcttcgtcaacgagtccagctcctatcaccatttcgccagcgcaatgcaggatgcagcggaaaatgccccctgttttttactctgcgacgcccaggcgatgaagcgttatggcctcgggctggcacgcccggcgccggtcaataatgacgccctggtcgccgccggctatctgcacaaagccgataccctggccgcgctggcgcaacagcttggtctggatgcccaaaccctgagcgagacggtagcccgctacaaccgcgacgccgcgcagggcgtggatcgggaatttgctaaaggcggcaacagctataaccgggcgatgggcgatccgggccatcagcctgacgcctgtaatgcccccctgctcagcgcgccgttctatgccatcaaactttataccggcgatctggggacctcacggggcctggtcaccaccgccgatgcccaggtcgtcaataccgaaggacaccccatcccggggctgtacgcggtgggaaacgacatggattcgctgatggccggcacctatccgggccccggcatcaccctcggcccggggctgacgtttggctatctcgccgcctgccatctggcacaacactccacccactaa

SEQ ID NO: 136524 - DNA, 321 bp, Enterobacter cloacae
atgatctacgaaaaacgcacgtacaccatcaatccgctgaaaatggccgactggctggcgctgtaccaaagcgatgccctggcggtgcaaaccgaccatctcggccagctaatcggcttcttttttaccgagatcggcgtggtcaatcaggtagtgcacatctgggcttatgaaagcctggacgatcgtctggtgcgccgcgcgcggatggcccaggacgaacgctggcagaccttctcgcgtaaaaatcgcgaactggccgccgtggaacgcctcgagtcggtgctgatgcgccccaccgctttttcacctctgcagtaa

SEQ ID NO: 136525 - DNA, 459 bp, Enterobacter cloacae
  misc_feature (365)..(374): n is a, c, g, or t
atgagcgggcctgtgaaggtggatgtgctggtggtcggctccggcgccgcggggctctctgccgcggtgactgcggcgatgcacggcgccagcgtcatggtggcggagaaagcgtcagtgctcggcggaaccagcgcctggtccggcggctggctgtggatcccccgcaacccgctggcgcgggcggagggcatcgacgaagcagccgacgcgccgctgacctatctgcagcatgagatggggggcgaagccgccgatattcgtctgcaaaccttcctgagttacgggccggagatggtggaatttttccatcagcggacggcggtgcagtttctctcgggcagcgccatgccggactttcaccnnnnnnnnnnggcggtcggtcaccgcgcaaccctacgatggccgcctgctcggcgactggctccatcgcctgcgtccgccgctggaaaccattag

SEQ ID NO: 136526 - DNA, 1203 bp, Enterobacter cloacae
atgggcatcgccggcggcgcggatatggcgcattttttcaatgccacccgctcgccgcgctccgcgctgtatgctgcccgccgcctgctgcgccacggctggcagcggctacgcgccggacgggggcagcatctggtcaatggcaatgcgctggtcgcccgtctgctgcgatccgccctcgacgccggcgtgcgttttcagctcaatgccccggtggtccggctgctgcagggtccgccgggcgtgtccggcgcggtgctgcgcagcgacggcggggagattcacgtcgaagctggcgccgtggtgctggcctgcggcggttttccccacgatcgccagcggctggcgcaggtggtgccccacgcggcggagggttacggccatttctccgccgcaccgccggacaatcagggcgaggggatcaggcttggcgaatccgtcggcggccagttcgacacttccctgcgccacccgctggcctgggcgccggtgtcccgcgtcactctggccagcggccagcagctaatgtttcctcatctggtggagcgcgccaaacccggggtgatcgccgtcctgcccaacggcaaacgttttgttaacgaggccgactcttatcatgactttatcgccgccctgctggcggccacacccgcgggcgacacgccacaggcgtggctgctggccgatcgtcgtacgctgcgtcgctacggcctgggccacgccagaccgttcccgttcacccccaccgcctggctgcgtaccggctatctgcagcgaggaaacaccctggcggagctggcgaagcagtgcgctatcgacgccaatgcgctggcggaaaccgttgaacgctttaaccacttcgccagcactggcgaagacgtcgattttcaccgcggggcctcagcctataaccgcgcccagggtgaccatcaggtgacgctcggaccgctgcgcgaagggccgttctacgcggtgcgcattctgcccggctcgctgggcaccttcagcggattgcaaaccgacgaacacgcccgggtgctggatgaacagcagcagccgataccgggtctgtacgccatcggcaacgacatgtcgagcgtgatgcgcggctattaccccagcggagggatcactctcgggcccgccatgaccttcggctatctggtgggtaaaggcctgacaaaaaaacaatataaacaataa

SEQ ID NO: 136527 - DNA, 819 bp, Enterobacter cloacae
atgaacaagcgtaccctatcgctcgccgcgctgaccctgctcgatgtccctccccccgaacaggtgcggattgcggccagaaccggttttacccacgttggactgcgactgctccccgccacaccgaccgacccggactacgacatgctgggcgataccccggccgtccgggcgacgctcgccgcgttgatggaaactggcatccgcgtgtcggacgtggagatcgtccgcctgacccccgggtttaccctcgacgatcggctgcagcgttttatggagaccgccgcgcgtcttggcgccggacaggtgttagtcgccggcaatgatgacaaccttcagcgcagcgctgacaacctcgccatcctcgccgcggccggtcgtccatttgggctgaccatgaatcttgagccgatgccctggacccagttgcgcaacatcgccgcagcgcaagcactaatcgccgccagcgggcgggaagacatcggcattctggtggacgctctccatttctggcgcgcgggagaatcgctcgccgccctctccagcctgcccgcgcatcatctcaactatatgcaactctgcgatggcgcggcgcagaggccggagagcgagcaggaacttatccgccaggcccgctcggcgcgcaacgtgccgggggaaggcggtctggatctgcatggtctgatgtcggccctgccggcgacgctgccggtctctctcgaagtgccgcttgacggcgagcaaggcgccctgccgcctcttcagcgggcgcagttactgttcgatgccgcgcagccctacctgcgcgcctgcgcataa

SEQ ID NO: 136528 - DNA, 1365 bp, Enterobacter cloacae
atgacacagactcaacgcctggatgtcagagagttaataaatcgtaacccgctgagccgatttcagaagctgattatatttctcggcttttgcgtcatcgctctcgatggttttgatatcgcgatcatgggctttatcgccccgacgctaaagctggaatggggggtaagcaaccaccagctgggtctggtgatcagcgccgcgctgatcggcctcgcgctgggggcgattttctccggcccgctcgccgactggctgggacgtaagaaaatcatcatcaacagcgttttcttcttcggtttctggaccatcgccaccgccttctcgcacaacgtagaacagatgatgttctttcgctttatgactggcctcgggctgggcgccgcgatgccgaatatcgggacgctggtgtcggaatacgccccggaacgccagcgttcatttattatcaccgtcatcttttgcggcttcaccttcggcgcggcggctggaggattttcggcatcgtggctgatcccccagtttggctggcactcgctgatggcgctcggcggtattctgccgctgctgtttgcccccctgctcatctggctgctgccggaatcggttcgttttctggtgatcaaacaagcgcccgcggcgcgcatacgcgccattcttaaccgtctctatcccggacaaatcagcgacaatgtgacgtttatcctgccggcgcagccagcggccggcaacgcgatgcgcattgtcctctcccgccagtacggtttcggctcgctgatgctatggctggtctactttatggggctgttcctggtctatatcctcggcagctggctgccaacgctggttaaagcggtaggaatgaccgttagccaggcggccatcatgacggcgatctaccaggcgggaggcaccctcggctcgttgtttgccggctggctgatggacaggatcaacccccatcgcgcgctggggataatctacgccgttggcggcctgttcaccatggcgatgggctacgccgcgggcagctttgccttgctctgtatgctggcgtttatcagcggcgcctgcctgaacggcgcgaataccggcatgaacgccctctccgcccgctactaccctacacaggcgcgggcgacgggctccagctggatgcacggcgtcgggcgcatcggcgccattctcagcgcctttgccggcgccgagatgatggcgctcaacctgccctttgaaagcgtctttttgatcctcggcatcccggcagccctcaccgtcgcaggcctggcggcgaagggcatctttgcggccggtcatcctcccgtcgcttcaacttcccccgcgcctgtgcgcggagcgtcatag

SEQ ID NO: 136529 - DNA, 1179 bp, Enterobacter cloacae
atgttaaacggcctgaaacccttatcccgttccctgcgctggggcatggtcggcggcgggggaaccagtcagatcggctacagccaccgctgtgcggcgctgcgtgacaatgtttataccctgctggccggcgcgcttgacgtcgatgccgagcgcgggcgcgcgttcggtgagcaactgggcatcgcgccggagcgctgctacgccgactaccagaccctgtttcgcgaagaggcgcagcgccctgacgggatcgaggtcgtctcggtcaccaccccgaacaatacccatttcgccatcaccaaagcggcgctggaggcgggactccacgttatctgcgaaaagcccctctgctttaccgccgaagaggcgcgcgagctggtggatctgagcaaaaaacagaacaaaatcgtcggcgttacctacggctatgccggctatcagatgatccagcaggcgcggcagatgattgccgatggactgctcggcgagatccgcatcgttaacatgcaattcgcccacggcttccataaccaggccgtcgagctgcaggcagaatccacccgctggcgagtaacgccgaagtttgccgggcccagctatgtgcttggggatctggccacccatccgctgtttgtcgccgagaccatggcgccgcagctcaatatcaaacggctgatgtgctcccgtcagagctttgttccctcccgcgcgccgctggaagataacgcctttgtcctgatggaatatgacaatggcgcggttggctcgatgtggaccagcgcggtcaacagcggcgccatgcactcgcaaaaagtgcgcatcgtcggcgaaaaagcaagcatcgaatggtgggatgagcatcctaaccagctcagctatgaggtgcagggcgagccggcgcgcattctggaacgtgggatgccctacctgtcgccgaatgcgctggcggatgaccgcattggcggcggccatccggaagggttgttcgaagcctgggccaacctctatcgccgctatgcgcaggcgattgacgccacggaccgcgacgatcgcgccttcctgcaagacttctggtatccggacgtcgaagccgggctgcacggcgtctattgggtagagcagtgcgtcaaatcggctgacgctggcagccagtgggttgactttactttaccttaa

SEQ ID NO: 136530 - DNA, 1365 bp, Enterobacter cloacae
atgaacgataacaaaatgacgccaggggaactgcgcgcgacctggggtttggggacagtattctccctgcgcatgcttggcatgtttatggtcctgccggttctgaccacgtatggcatggcgttgcagggtgccagtgaagcgctgattggcctggcgatcggtatctacggcctggcgcaggcggtgttccagatccccttcggactgttatctgaccgtattggccgtaagccattgatcgtcggcggcctgcttatcttcgtgctcggcagcgtcatcgccgcgctcaccgactccatctggggcatcattcttggccgcgccctgcagggctccggcgccatcgccgccgcggttatggccctgctgtccgatctcacccgcgaacagaaccgcaccaaagcgatggcctttatcggcgtcagcttcggcgtcaccttcgccatcgccatggtgctggggccgattgtcacccaccagctgggtctgcacgcgctgttctggatgatcgccatcctggcgaccgtcggcatcctgctcaccctgtgggtggtgcccaacagccataaccatgtctttaaccgcgaatccgggatggtgaagggctgctttagcaaggtgctggcggagccgcgcctgctgaagcttaactttggcatcatgtgcctgcacattatgctgatgtccacttttgtcgccctgcccggacaactggaggccgccggcttcccggccgccgagcactggaagatttacctggtcaccatggttatctcgttcatctcggtggtgccgtttatcatctacgccgaagtgaagcgcaagatgaagcgcgtcttcctgctctgcgtcgccatcctgctgattgcggaaattgtcctctggggcgccggaggctacttctgggagctggtggcgggcgttcagctcttcttcctggcgtttaacctgctggaagcgctgctgccgtcgctaattagcaaggagtctccggcgggctacaaaggcaccgcgatgggcgtctactccaccagccagtttctcggcgtggcgattggcggcgcgcttggcggctgggtcgatggtttctttgattcgcaaaccgtgtttctgctgggcgccctgctggcgatgctgtggctgctggtggccagcaccatgagcgagccgccgtacgtcagcagcctgcgggtggaggtgccggacggcgtggtggtcgacagcgcgctgcaggcgcgtctgctgagcgccagcggggttcatcaggcgctggtggtacccgaggagcgttcggtgtatatcaaaatcgacagcaaggtcaccaaccgcttcgagatagagcagctcatcaaaggggtataa

SEQ ID NO: 136531 - DNA, 492 bp, Enterobacter cloacae
atgccatctttcgatattgtctctgaagttgatcttcaggaagcccgtaacgcggtggacaacgcgagccgcgaagtcgagtcgcgttttgattttcgtggcgttgaagccacttttgaattaaacgacgccaacaagaccattaaagtgctgagcgagtctgacttccaggtgaaccagctgctggatatcctgcgcgccaagctgctcaagcgcggcattgaaggcacctccctcgacgtaccggaagatatcgtgcacagcggtaaaacctggtttgttgaagcgaagctgaagcagggcattgaaagcgcggtgcagaagaagatcgttaaactgatcaaagacagcaagctgaaagtgcaggcccagattcagggtgaagagatccgcgtgaccggtaagtcccgcgacgatctgcagtcggtgatggcgctggtgcgcggtggcgatctgggacagccgttccagttcaaaaacttccgcgactaa

SEQ ID NO: 136532 - DNA, 912 bp, Enterobacter cloacae
atgaaagtaaccgtactgggatgcggtgcgctgggacaactatggctgaccgcgttgtacaaacagggacatgaagtccagggctggctgcgcgtaccgcagccattctgtagcgtcaacgtcattgaaaccgatggctcagtgttcaacgaatcgctgacggccaacgaccccgattttctcgccagcagcgagctgctgatcgtcaccttaaaggcctggcaggtgtcgaatgcggtaaagcacctggccgggatcctgccggacaccacgccaattgtgctgattcataacggcatgggcaccgtcgaggagctgcgcggcgtgaaacagccgttgctgctggcctccacgacccaggcggcgcggcgcgatgggaatgtcatcatccacgttgcccagggcaccacgcatatcggaccggcaaaaagctacgagggggactacagctatctcgcagaagttctgcagagcgtgctgccggatgtcgcctggcataacaatatccactcggccatctggcgcaagctggcggttaactgcgtgattaaccctctgaccgcgctcaaagggtgtaaaaacggcgatctgcgcgactatacgcaggaagttgcggccatttgtcgcgaggtggcggcggtgatggagcgcgaaggtattcatacctcggcggaaaacctgctattttatgtcgaacaggtaattgaaagtacggcagaaaatatctcttccatgctgcaggacgttcgcgcccagcggcatacagagatcgactacatcaccggttttctgctcaaccgcgcccgcgcccacggcgtcgccgtaccggaaaacgcccgcttatttgaattgatcaagcgtaaggagaatgaatatgagcgcgtcggcactgatttgcctcgcccctggtag

SEQ ID NO: 136533 - DNA, 594 bp, Enterobacter cloacae
atgagcgcgtcggcactgatttgcctcgcccctggtagcgaagagaccgaagcggtcaccactatcgacctgctggtccgcggcggagtaaaggtgaccaccgccagcgtcgccagcgacggcagcctgaccatcgtctgttcgcgcggcgtcaaactgctggcggatgcgccgctggtcgaggtggccgatggtgatttcgatatcatcgtcctcccgggcggtatcaagggcgcagagtgcttccgcgacagcccgctactggtggaaaccgtccgccagtttcatctctctgggcgcattgtggccgccatctgcgccgccccggcgaccgtgctggtaccccataatctgttcccgatcggcaacatgaccggttttccggcgctgaaggaacatatccccgccgagcagtggcaggataaaagagtggtctgggatgcgcgggtgaatctgttaaccagccagggtccggggacttcgattgatttcgccctgaaaatgatcgatctgctggtggggcgcgagaaagcgtatgaggtcgcctcacagctggtgatggccgccggcatttataattactacgaagcctga

SEQ ID NO: 136534 - DNA, 477 bp, Enterobacter cloacae
atgtcccggagcgcaaccgattctcgcgatcttgttatcagccgcctgctcagcgcgcgcgccccagccctgtggcgcgcgtgggccgacccggcattactccgaacctggtggtgcccgaagccctggcaaaccgaggttctggcctttgattttcgcgccggcggggcctttcacaccgtgatgcacgggcctgacggtgaacgcagcgataaccccggctgttttcttgaagttatcccgcaacaaaaaatcgtcatgacctcgatgctgacggcggattatcgccccgccgtttcccccttcgcgatgacggccatcatcacctttgccgatgaacagggcgggtgtcgctatacggctacggtgctgcatgccgatgatgaaacccgcgagcagcatgagcagatgggatttttcgagggctggaatattgtcatcgatcagctcaatgacctggcgctgaccctgcgctaa

SEQ ID NO: 136535 - DNA, 1449 bp, Enterobacter cloacae
atgaagtttatcattaaattgttcccggaaatcaccatcaaaagccaatctgtgcggttgcgcttcattaaaatcttaaccgggaacattcgtaacgttctcaaaaactatgatgagacgctggccgtcgtccgtcattgggatcatatcgaagttcgcgcgaaagatgaaaatcaacgcccggctattcgcgatgcgctgacccgtatccccggcatccaccatattctggaagtcgaagacgtgccgttcacctcgctgcacgatattttcgagcagacgctgccgctgtggcgcgaggcgctggaaggcaaaaccttctgcgtgcgagtgaagcgtcgcggcaaacatgaattcacctcaattgaagtggaacgttacgtcggcggcggtctgaatcagcatattgaaacggcgcgcgtgaagctgaccgacccggacgtcactgtcaatctcgagattgaaaacgatcgcctgctgctggtgaaaggccgctatgaaggcatcggcggtttcccgatcggcacccaggaagatgtgctgtcgctgatctccggcggctttgactccggcgtctccagctacatgctgatgcgccgcggctgccgcgttcattactgcttctttaaccttggcggcgccgcccatgagattggcgtccgtcaggtcgcgcattatctgtggaaccgcttcggcagctcacaccgcgttcgctttgtggcgattaactttgagccagtagtcggcgaaatccttgaaaaagtggacgacggccagatgggcgtcgtgctcaagcgcatgatggtccgcgccgcgtcaaaagtcgcggaacgctatggcgtgcaggcgctggtcaccggcgaagcgctcggccaggtctccagtcagaccctcactaacctgcgcctgatcgataatgtctccgatactctgatcctgcgcccgctgatttcgcacgataaagagcacatcatcgacctggctcgtgagatcggcacggaagattttgcccgcaccatgccggaatattgcggcgtgatctccaagagcccgaccgtgaaggcggtgaaggcgaagattgaagcggaagaagaacacttcgatttcagcatccttgataaagtggtggaagaggcgagcaatatcgatattcgcgagatcgcccagcagacggaagagacggtggtggaagtggaaaccgtgaccggctttggcgccaatgacgcgatcctcgacattcgctccatcgacgagcaggaagacaagccgctgaaggtcgagggggttgaggttgtttccctgccgttctacaagctaagcaccaaatttggcgatctcgatcagagcaaaacctggctgctgtggtgcgagcgcggggtgatgagccgtctgcaggcgctttatttgcgcgagcagggcttcagcaacgtgaaagtgtatcgcccgtaa

SEQ ID NO: 136536 - DNA, 243 bp, Enterobacter cloacae
atgccaaagaaaaatgaggccccggccagctttgaaactgctctgggcgaactggagcagatcgttaaccgtctggaaagcggcgatttgccgttagaggaagcgctaagcgaatttgagcgcggcgtacagctggcgcgccaggggcaaagtcagctgcagaaggccgaacagcgcgtgcagatcctgctggcggatagtgaagattccccgaccacgccttttacgccggacgctgaataa

SEQ ID NO: 136537 - DNA, 900 bp, Enterobacter cloacae
atggatttcccgcaacaattgcaggcctgtgtggaacaggcaaacgaagcgctgcgccgtttcatcgccccgcagccctttcagaacactccgctggtggaagcgatgcattatggcgcattgttaggcggtaaacgcctgcgtcccttccttgtctacgccaccggcgagatgttcggcgtgtgccgtaccacgctggatgctcctgccgcggcggtcgaatgcattcatgcctactccctgatgcatgatgatttgccggcgatggatgatgacgatctgcgccgcggcctgccgacctgccatattaaatttggcgaagccaacgcaattcttgcgggagatgccctgcaaacgctggcgttctctatactgagtgatgcgccgatggtcgacgttcctgaccgggaccggctggcgatggtttccgaactggcgcaggccagcggcgtggcgggcatgtgcggcggccaggcgctggatctgcaggccgagggacagcaggttgatttacaggcgctggagcgtatccatcgccacaaaacgggcgccctgatccgcgccgccgtccggatgggagccctgagcgccggcgaacgcggccgcgctgccctgcccgcgctggatcgctatgcggaaaatatcggtcttgccttccaggtccaggatgacattctcgacgtggtaggggatactgcgacccttggcaaacgtcagggtgccgaccagcaattgggtaaaagcacctatcccgccctcctgggtcttgagcaagcccggaagaaagcgcacgacctgatcgctgatgcccgccggtcgttagatgagctggccgcacaatctctggatacttcggcactggaagcgctcgcgaattacattattcagcgcgataaataa

SEQ ID NO: 136538 - DNA, 1863 bp, Enterobacter cloacae
atgagttttgatattgccaaatacccgaccctggcgctggtagactccacccaggagttgcgcctgttgccaaaagagagcctgccgaagctatgtgatgagctgcggcgctatctactggacagcgtcagccgttccagcggtcactttgcctctggcctcggcacggtggaactgaccgtggcgctgcactacgtgtataacaccccgttcgatcgcctgatctgggacgtcggccatcaggcctacccgcataaaattctgaccggtcgccgggacaaaatcggcaccattcgtcagaaaggcggcctgcatcccttcccgtggcgcggtgaaagcgagtatgacgtgctgagcgtcggtcactcctccacttccatttccgcgggtatcggggtggctatcgccgccgcgaaagaggataagcagcggcgcgcggtgtgcgtcattggcgacggggcgatcaccgccggcatggcgtttgaggcgatgaaccacgccggggatatcaaacccgacctgctggtggtgctgaatgacaatgaaatgtcgatttccgagaacgtcggcgcgctgaacaatcatctggcgcagctgctctccggtaagctctactccaccctgcgcgaagggggcaaaaaggtcttctccggggtgccgccgattaaagagctgcttaagcgtaccgaagagcatatcaaagggatggtggtgccgggcacgctgtttgaagagctgggctttaactacattggcccggtggatggccatgacgtgctcggtctggtcagcacgctgaagaacatgcgcgacctgaaaggcccgcagttcctgcatattatgaccaaaaaaggccgcggctatgagcccgccgagaaagacccgatcaccttccatgcggtgccaaaattcgaccataccagcggcgtactgcccaaaagcagcggcggcctcccttcctactcgaaaatcttcggcgactggctgtgtgaaacggcggccaaagacaacaagctgatggcgatcacgccggcgatgcgcgaaggttcagggatggtggagttttcgaagaaattccccgatcggtactttgacgtcgccattgccgagcagcatgcggtcaccttcgccgccgggctggcgattggcgactacaagccggtggtggcgatctactccaccttcctgcagcgagcctacgatcaggtgatccatgatgtggctatccagaagctgccggtgctgtttgctatcgaccgcgccgggatcgtcggcgcagacggccagacgcatcagggagcgttcgatctctccttcctgcgctgtattccggatatggtggtaatgaccccgagcgatgaaaatgaatgtcgccagatgctgtacaccggctaccactacagcgacggcccctgcgcggtgcgctatccgcgcggtagcggcaccggcgcgacgctcgagccgctggcatcgctgccgatcggcaaaggggtggtgaaacgtcagggcgagaaaatagcgatcctcaactttggcaccctgctgccggaagccgcggcggtagcggacaaactcaacgccaccctggtggatatgcgctttgtgaagccgctggataccacgctgatcctccagctggccggcgagcacgacgcgctggtgacgctggaagagaacgccatcatgggcggcgccggcagcggcgtgaacgaagtgctgatggcccatcgccgggcggtaccggtgctcaatattggcctgccggattattttattcctcagggcactcaggaagagatccgcgccgacctcggccttgatgccgccggtattgaagccaaaatccgcgactggctggcataa

SEQ ID NO: 136539 - DNA, 975 bp, Enterobacter cloacae
atgcactatatccccctcggtgatactgccttacgtgtttcccgactctgcctcggctgcatgaccttcggcgagccggaccgcggcagacacgcctggacgcttccggaagagagcagccgcccgcttatccagcacgccattgaaggcggcatcaacttcttcgataccgcaaatagctactccgatggcagcagcgaagagatcgttggccgcgccctgcgcgactttgcccgccgtgacgaggtggttgtcgccaccaaggtgtatcaccaggtcggcgatctggcggaaggactttcccgggcgcagatcctgcgctccatcgacgacagcctgcgccgtctcgggatggactatgtcgacctgctgcagatccaccgctgggactataccaccccgattgaagagacgctcgaagcgctggacgaggtggtgaaagccggcaaagcgcgctatatcggcgcctcgtccatgcatgcccgacagtttgcccaggcgctggcgctccagcagcagaacggctgggcgcgcttcgtcaccatgcaggatcactacaacctgatttaccgggaagaagagaatgagatgctgcccctgtgccaacgtaacggcgtagcggtgatcccatggagtccgctggcgcgcggcaggctaacccgcccctggggtgagaccaccgcccggctggtctcagatgagttcggcaaatcgctgtacagcgccagtgaagaaaacgatgcgcagatcgccgggaatctcgcggacgtggcggaagaactcgacgccagccgcgcccaggtcgccctcgcctggctgttaagcaaacccggcgtcgccgcgccgattatcggcccgtcgcgtcaggaacagcttgatgatctgctgcaggcggtggatttgacgctctccccggaacagatcgacaagctggaggcgccgtatcagccgcatccggtggtgggatttaagtga

SEQ ID NO: 136540 - DNA, 504 bp, Enterobacter cloacae
ttgcgtagtcgagacgaggcgcttagccgcctgagtatgcgtaatccgtggcatctgctggcgaccggctttggcagcggcttaagcccggtggtgccggggacgatgggctcgctggcggcgatcccgttctggtatctgatgacctttctcccctggcagctttactcgctggtggtgatgatgagcatctgtatcggcgtctatctgtgccatcgcacggccaaagatatgggcacccatgaccacggcagcatcgtctgggacgagttcgtcgggatgtggatcaccctgatggcgctgccgaccctggactggcagtgggtggccgccggcttcgtgattttccgtatcttcgatatgtggaagccgtggccgattcgctggtttgatcgcaatatccacggcggaatggggattatggtcgacgacatcgtcgccggcgtgatctccgctggcgtgctgtacgtcattggccatcactggcccatcggtctgctttaa

SEQ ID NO: 136541 - DNA, 972 bp, Enterobacter cloacae
atggcatgcggcgaattctccctgattgcccgttattttgatcgcgttaaaagcgcccgccttgatgttgaaaccggcatcggcgatgactgcgcgctcctgcatattcccgagaaaaaaacgctggcaatcagcaccgacaccctggtggcgggcaatcacttcttacccgatatcgaccctgccgacctcgcttataaagcgctggcggtgaacctgagcgacctcgcggcgatgggcgcggagccggcgtggctcacgctggcgctgaccttgccggaggtggatgaagtctggctggaagccttcagcgacagcctgtttgtccagctggactattacgatatgcaactgattggcggcgacactacccgtggcccgctctccatgacgctgggtatccacggctttgtgccgccgggacgcgccatgaaacgcgctggcgcgaagccgggggactggatctatgttaccggcactccgggagatagcgccgccggtctggcggtactgcagaatcgtctaacggtggatgaaccgtctgacgccgactacctgctggcccgtcatctgcggccgatgccgcgcgtgctgcagggccaggcgctgcgtgacctggcgacatcggctatcgatctctccgacggcctgatctccgatctgggccatattctcaaagccagcggctgcggggcacgtatcgatctcgatgccctgccgtactccgatgcggtgctgcgccaggttgattctgagcaggcgctgcgctgggcgctcgccggcggggaagattacgagctgtgctttaccgtaccggagctgaaccgcggggcgctggacgtggctcttggccatcttggcgcgcgttttacctgtatcggacagattgcgccggagagcgaagggctgcagtttatccgcgacggtaagccggtcgcgcttgatttaaagggatacgatcactttgcgtag

SEQ ID NO: 136542 - DNA, 420 bp, Enterobacter cloacae
gtgaaacctgctgctcgtcgccgcgcccgtgagtgtgccgttcaggcgctctactcctggcagttgtcccacaacgacatcgctgatgtcgaataccagttcctggcggaacaggacgtaaaagatgttgatgttctgtatttccgcgaactgctgtccggagtggcgactaacagcgcgtacctcgacggcctgatgaagccctacctgtcccgccagctggaagagctgggccaggttgaaaaagcggtgctgcgtatcgcgctgtttgagctgtccaaacgtgatgacgtaccgtataaagtggccatcaatgaagctatcgaactggcgaaaaccttcggcgctgaagatagccacaagttcgttaacggcgtgctggacaaagcggctccggtaattcgtccccacaagaagtaa

SEQ ID NO: 136543 - DNA, 471 bp, Enterobacter cloacae
atgaacattattgaagctaacgttgctaccccggacgctcgcgtcgccatcaccattgcgcgtttcaacaactttatcaatgacagcctgctggaaggcgcgattgacgccctgaaacgcattggtcaggtaaaagatgaaaacatcaccgtcgtttgggttccaggcgcgtatgagctgccgctggcggctggcgcactggcgaaaaccggtaaatatgacgcggtgatcgcgctggggacggtgattcgcggcggtaccgcccactttgaatatgtggcaggcggtgccagcaatggcctggcgcatgtcgctcaggacagcgaaatcccggtagcctttggtgttctgaccactgaaagtattgaacaagccattgagcgcgctggcaccaaagccggtaacaaaggtgcagaagctgcgctgaccgcgctggaaatgattaacgtattgaaagccatcaaggcctga

SEQ ID NO: 136544 - DNA, 1104 bp, Enterobacter cloacae
atgcaggacgaaatgtacatggcgcgtgcgctgaagcttgccgcgcgcggtcgctttactacccatcctaaccctaacgtcggctgcgtcattgtgaaagacggcgagatcgtcggcgaggggtttcactatcgcgccggcgagccgcatgctgaagtgcacgccctgcgcatggctggcgaaaaggcgcgcggcgccaccgcctacgtcactcttgagccctgcagccaccatggccgtacgccgccatgctgcgatgcgctgattgccgccggcgtcagccgcgtggtcgccgcgatgcaggatccgaatccgcaggtggcggggcgcggtttgtatcgcctgcagcaggccggcattgaggtcagccatgggctgatgatgaacgaagcggaagcgctgaataagggctttctgaagcggatgcgcaccggttttccctgggtgcagctgaagctgggcgcctcgctggacggccgcacggcgatggccagcggcgaaagccagtggatcacctccccgcaggcgcgacgcgacgtgcagcgtctgcgcgcccagagccatgccatcctgaccagcagcgccaccgtgctggcggacgatccggcgctgaccgtgcgctggcaggagctgagcgccgatacccaggcgctttatcccgaagagaatttgcgccagccgctgcgcgtcgtcatcgacagccagaaccgcgtcacgcctgagcatcgtattgtgcagcaggcgggggaaacgctgtttgcccgcctgcgcgccgatgaacggcagtggccggaaagtgcccgcacgctgctggttccggagcataacggccatctcgatctggtgctgctgatgatgctgcttggcaaacagcagatcaacagcgtctgggttgaggcaggggctacgcttgccggggcgctgctgcaggcgggtctggtcgacgagcttatcgtctatattgcgcctaaactgttaggcaatacggcgcgtggattatgcgcgctgccggggcttgaagagctgagccaggccccccattttaaattcaatgagatacgtcaggttggcccggatgtctgcctgcatttaaccactgcgtga

SEQ ID NO: 136545 - DNA, 450 bp, Enterobacter cloacae
atgcattgccctttctgtttcgccgtggataccaaagtgatcgactctcgtctggtgggggaaggctcttccgtgcgtcgccgtcggcagtgcctggtctgtaacgaacgctttaccaccttcgaagtggcggagctggtgatgccgcgggtggtgaagagtaacgatgtgcgcgaacccttcaacgaagacaagctgcgcagcgggatgctgaaagcgctggagaaacgtccggttagcgccgacgacgtggaaatggcggtcaaccatatcaagactcatctgcgcggcaccggcgagcgcgaagtggccagcaaaatgatcggcaacctggtgatggagcagctgaaaaagctggataaagtcgcctatattcgcttcgcgtcggtctatcgcagcttcgaagatattaaagaattcggcgaagagatcgcccgcttacaggactaa

SEQ ID NO: 136546 - DNA, 540 bp, Enterobacter cloacae
atgacaagacgttacctgaagctcgccatcgcgggctgcctgttcaccctgaccgcctgcgcccagcaaagcgaaatccgccagatgcaccagagcgtgagtacgctgagccaggagatgacccagctcaaccagcaaacgatcaaaatcacccagcaaaacgcgctgaacgccaaatccacccgcggcgtctatctgctgccggaggccaagaccccggcgcggctggagagccagatcggcaccctgcgcatgtcggtgggcagtattaccccggatggcgatgggtcacgcctgaccttacgcattcagggcgaatccaacgatccgctgccggcctttaccgccaccgtcgcttccggacagatcaccggcaccacccacagctatcaggaagtcaatgttcaggatcagctgattagcgcgccggccagcaccctcgcccccagcgatgtcgatatcccgttgcgcctcaatgtaacgccagataaagtcggttttattcgcgtacatgatatccagcccgccgccgcccagtaa

SEQ ID NO: 136547 - DNA, 885 bp, Enterobacter cloacae
atgaaaaaaacattactggcagcgggtgcggttgtggcgctctccactacttttgccgcgggcgcggcagaaaacgacaaaccgcagtatctgtctgactggtggcaccagagtgttaacgtggtgggcagctaccacacccgttttggaccgcagatccgtaacgatacctacctggaatacgaagcgttcgccaaaaaagactggtttgatttctacggctatattgatgccccggtattcttcggcggcaacagcacggcaaaaggtatctggaacaaaggttccccgctgtttatggagatcgaaccgcgtttctctatcgataagctgaccaataccgacctgagcttcgggccgttcaaagaatggtatttcgccaacaactatatctacgatatgggccgcaacgactcccaggagcagagcacctggtatatgggtctgggtaccgatatcgataccggcctgccaatgagcctgtcgctgaacgtctacgccaagtaccagtggcagaactacggcgcgtccaacgaaaacgaatgggacggctatcgcttcaaagtgaaatactttgtgccgctgaccgacctgtggggcggttcgctgagctacatcggcttcaccaacttcgactggggttctgacctcggcgatgacaacttctacgatctgaacgggaagcacgcgcgcaccagcaactctatcgcctccagccacatcctggcgctgaactacgcgcactggcactactctatcgtcgcccgttacttccataacggcggccagtgggctgatgatgcgaagctgaacttcggcgatggtccgttcagcgttcgctcgaccggctggggtggttacttcgtggtcggctacaacttctga

SEQ ID NO: 136548 - DNA, 546 bp, Enterobacter cloacae
gtggagggcgaagcgggcagcggctaccggctgctggcgggctacgatctgccgccgctgatgctgaccaccaaagaatccgaggcgctgatcgctgcgattcggctgctaaaaacctggggcggtgaggcgctgtcgcagtcgctggaatccgcccaggagaagatgctggcgatcctgccggaggcgcgtcggcgccaggcggagcagactcgcctgtttgcccccgatttcggcgcccatcgctatgctaaaacccattttgacgtcattcatcaggcggtctccggccagcaggtgctgcagctgcgctatcaggatgagacaggccgggtgaccgagcgcgacgtgctgcccctggggctgtttttctggggcgaacgctggctgttggtagcctggtgcgaactgcgcaatgattaccgcaattttcgcctcgatcgttgcctggaggtaagcgcgaccgaacgtcgattcagcgagtgcgccgaccgctcgttaagcgattttttgcgcaaggtccggtgcgaggtgcgggagaaataa

SEQ ID NO: 136549 - DNA, 558 bp, Enterobacter cloacae
atgactgcaactttcaataaaaaatctattgttttagagccggttgccgatccatttggtgaggtgatggaattcgaaagggttatatttgatcaaattagtttttctatccaaactctcagcaataagatatgtttattgactttttacaatcctccaaaaactgttaaaccttttatcgattttttgtctcaggctgaagggttaaatgttgcttatgggaatttaactgtagatcttaaagctttcatgagagtcattcgagacaatttcggcgtgaaggtgtttagtatttcaaaagtgaaggtgtcaaatcttcctgtcactgaaaaaacaagagcatgtttggaattgaattcaagtggcgatgccttgcatgatttgaagagttttgttggggatggcgagttcaagctcgataaaataaaagttggaggattttaccttgattcaaagattagttttgaattaaccagtggggcttctgcagtggttcctgatgagtatttttcgattttcaatgatgccatttcatgtatggaaattgataaattttag

SEQ ID NO: 136550 - DNA, 834 bp, Enterobacter cloacae
atggctgtaaaagcaaagcgcttccgcatcggtgtggaaggggcaacgacagacgggcgcaatattgagcgtgcctggctggaacagatggcggcgagctatgacccgcaggtgtataccgcgttgattaatctggagcacatcaagggttacacccctgatagcccattccgccgtttcgggaccgtggataagctggaggcagaggagattgcagacggcccgctgaaagggaaaatggccttgtatgcgtggatcaccccgtcagaggacctggtggcgtatacccgtaatctgcaaaagctgtttacctcgatggaagtcaataccagttttgccgataccggcaaagcctacctggttggcctggcggcgacggatgatcccgcaagcctcggtactgaaatgctgcagtttagcgccagcgccagaagtaaccccctggccggccgcaagcaaaaccctgaaaacctattttccgccgcagaagaaacgctgatcgagtgggaagaagtccaggacgaaaaaccctccctgttttcccgcgttgccgcgatgttcaccaaaaaagaacagaacgatgaagcgcgtttttctgacgtgcatcgcacggtggagctgattgctactgaacagcaaaacctgagcgaacgtactgatcactccctgtctgcgcaggatgcgcgcattgctgagctggaagcctccctgcaggaacagcagaccgcttttgctgaactggagcagcggctgagccaggaagacagccgcaaagattatcgccagcgcgcgccgggcggaaacgcaccggcaggcacactgaccaattgctga

SEQ ID NO: 136551 - DNA, 651 bp, Enterobacter cloacae
atgagcctgagtcccgcacggcagcaccgcctgcgcgtccaggctgaacaggccgcccggcagggcggcaatgttcgccacgcgacggggtatgacctgatgctgatgcagctggcggaggaccgccgccgcctgaaaggtatccagtccaccgtgaagaaagcccaaatcaaagtggaactgctgccccgttattccgcctgggtggagggggtgctggctgctgatggtgcccggcaggatgacgtggtgatgtttgtaatgctctggcgtatcgatgccggggattatgccggtgcgctggatgccgggcgtcatgcgctgcggcacggatgggtgatgcccatcggaaaccgtaacgtccagacggtgctggcagaggaaatggcagacgctgcgcaggccgctctgctggcaggtgaatctttcgatgccgggttgttactgcagacactggagctgacagacggccaggatatgccagaccagtcacgggcacgcctgcataaagcgattggcgctgtactgaccgaaaccagcccggcctccgccctgaatcacatcaatcatgcgctgcagcttgatccacgctgtggcgtcaaaaaagaaaaacagcagctggagcgcagattgcgcaatgacagccgttaa

SEQ ID NO: 136552 - DNA, 465 bp, Enterobacter cloacae
atgaagtttgttgcgcctgagcaggcgccggaacaggcggaaattatcaaaaatacgccgttctggcccgatgttgatttatcagagtttcgcagcgtgatgcggacggatggcacggtgacgtccccccgtctcggacaactcatccggtctgcgatgtcagaggtcaatgcggagctgtacgacttccgcaaacgccagcaggcgctgggatttatgacgctggccgatgtaccggcggacttgctggacggtaaaagcgaacgtattcaccactaccacaacgccgtttattgctgggcacgtgcgcaggtgaatgagcgttaccaggactacgacgccacggcctccggtgtgaaaaggggggatgagctggcggaggccagcggcgatctgtggcgtgatgctcgctgggcaattagccgggtgcaggatgcgcctcactgtacggtggagctgatctga

SEQ ID NO: 136553 - DNA, 204 bp, Enterobacter cloacae
atgaaagtgcgtgcgtaccagggtgacacggtggacgcgctttgctggcgtcattacggacgcacgcagggcgtcacggagcaggtactgcaggcaaatccggggctggctgagcacggcccgttcttaccacacgggctgcaggtggatctgccggatattgccaccacttccacggtgcagaccgtccagttatgggactga

SEQ ID NO: 136554 - DNA, 510 bp, Enterobacter cloacae
atgaatccttcaaccgttaaacgctgcctggtaggggcggtgctggcgattgccgccaccctgccgggctttcagcaacttcatacctcagtggaagggttgaagctgatagccgattacgagggctgccgcctgcagccgtatcagtgtgatgcgggggtgtggaccgatggcattggcaatacgtccggcgtggtgccggggaagaccatcacggaacggcaggccgccgggagtttcatcaccaacgttttaagggtggagaaggcgctggatcgctgtgtcctggtgagcatgccgcagaacgtctatgacgcgctggtatcgctggccttcaacgtgggaaccggcaatgcctgcggttcaaccatggtgaagtttatcaatcagaagcgctggcgcgatgcctgctatcagttgccgcgctgggtatacgtcaaaggcgtatttaatccggggctggacaaccgacgcgcgcgggagctgtcctggtgcttaaaaggagcgtaa

SEQ ID NO: 136555 - DNA, 384 bp, Enterobacter cloacae
atgaaaaagaaactgatcggtgggttattttcggtgctgtacacggcgctgataatttttagtctctttgttccaaacagtattgttccggcactggttacagccttgacctgggtagcctgcctgctgagctggggagcggtgctgctttgcatggctggatggtatgcgggcggcactcatcggggagaggcaaagcaggcgctgacgcgctttttcagtacgccaggaaaccaggtgatcagatgggcaaggtgttcactgcttgtgatttttctcgcctttacgggccacgttgtcaccctggtattttatctgctgacgctggccgcgcttaaggttctgcgtgcgcagattattgatgcggagccggtgacggtatga

SEQ ID NO: 136556 - DNA, 429 bp, Enterobacter cloacae
atgacaaaggcgctggcggtagttctggcgctggtagtgctggcgcttggctggcagtcatggcggatgaagggggccagccagaccatcgagcggcaagggcgggatctgaaaacgacaggcgaaaaactggcaaaaacgaacagccagctgatcgccctgtccatcctgtccgaaaccaataaccgggaacaggcaaggctttacgcggcggcagaaagtacaaacgcgctgctgcgaagccgtcagcgcagaattgaggagttaaaacgtgaaaatgaggatttacgccgctgggctgacactcttctgcctgctgacgttatcaggatgcgcgaacgtccagccctcgccggaggtgctgcttaccgcgaatggttgtcccagagtgacgcagtgccgcctggaaaagtcggcggcacgcactaa

SEQ ID NO: 136557 - DNA, 432 bp, Enterobacter cloacae
gtgaacaagcctcaatccttacgccgcgccctgaatagcgcggtgccatatgttcgcgataacccggataagctgcatttgttcgttgataacggatctgtggtggcgaccggcgcagcgtcgttgtcctgggagtatcgctataccctgaatgtggtgattgtggatttcagcggcgatcaggggttattgatggcgccggtggtggcctggctcatgaagaatcagccggacgccattcataacccggaactgcgggaaaagttgctttcctttgaagtcgatattttgcgcaatgatatctgtgatatcagcctgaacctgcaactgacagagcgtgtgatagtcagcgctgacggtgacgtgtccagcgtcgaagtggtgccggaaccggacgaaccggacgaaatgtgggcggtgagccgtggctga

SEQ ID NO: 136558 - DNA, 447 bp, Enterobacter cloacae
gtggctgagctgcaggaagttgacgcctggttagatgcgctcttggcgggtctggagcctgccgcacgtaagcgcatgatgcgggagctggcgcagcagctgcgccgcagccagcagaaaaatatcaggatgcagcgcaaccccgacgggacggcttacgagccgcgtcgcgtgacggccagaacgaaacagggccgcatccgtcggcagatgtttgcaaaactccgcaccacaaaatacctgaaagccctcgccagccaggacgcggcaagcgtcgagtttgagagccgtgtgcagcgcatagcccgcgtgcatcactatggcttgcgtgatcgggttagccgtaaagggccggaagtcaaatatgcagagcgccggttgctcggcatcaatgatgaatcagaagacattacgcgagacgtcttactgcgttggttgtcacagtga

SEQ ID NO: 136559 - DNA, 573 bp, Enterobacter cloacae
atgaatacgcaattaaccgaaatcatgcgccttatcaccaatctgatccgcaccggcattgtgaccgaagtggaccgggacggctggctgtgccgggtgaaaacgggcgacctcgaaaccaactggattaactggctgacctaccgtgcaggtaaatcacgcacctggtggtgcccgtctccaggggagcaggtggtgctgttcagtctgggcggcaatctggaaacagcctttgcgcttccggccatctactccaacgcctgcccgccgccgtcagactctgaaagtgcggacgtgaccgcatacgaggatggcggctggttcgaatacgaccccgccaccggacgctggattattcgcggcgtgaaaagcgtgatgattgagtcttcgcaggttgtctcctgcaaaaccggtgagtttgtgatcgaggctgacaccacccgtattaacagcaacgtgatcctgaacggcgatgtgacccacggcggcggcgcgatgacgtcaaacggcgtcgttgctgataagcataaacaccctggcgacagtggcggaacgacgggagatccattttga

SEQ ID NO: 136560 - DNA, 363 bp, Enterobacter cloacae
ttgacgctctatatcgggatgagccgcgataccggcagagccataacggaaactgaccacctgcgccagtcggtgcgtgacattttgctgaccccgcaagggagccggcttgcgcgccgggagtatggttccctgctttcagcgctcattgaccagccgcaaaacccggcgctgcgcctgcagatcatggctgcggtgtatgtggcgctgcggcgctgggagccgcggctgcaactggacaccatcacggttaacagcagcagcatggatggcgcaatggttattgagctggcaggccagcgtaatgacggcgtgcccgtgtccctttccgtatcgacaggagcagacaatggccgttattga

SEQ ID NO: 136561 - DNA, 897 bp, Enterobacter cloacae
  misc_feature (115)..(124): n is a, c, g, or t
atggccgttattgacctttcccagctgccgccgccgcaaattgtggatgtgccggattttgaaaccctgctggctgagcgcaaagctgaatttgtcgcgttatttccggcagaannnnnnnnnnccttaacgcttgaatctgagccggtggtgaaaatgctgcaggaaaatgtgtaccgggagctgctgctgcgccagcggattaacgaggcggcgaaagccgtgatggtggcctattcaggcggggatgacctggacaatttaggcgcgaataacaacgtacagcgccgggtgattacagctgcggacgacaccactacgccgccaacggaggcagtcatggaatctgacgcggattatcgccagcgaatcccggcggcctttgaggggatgagcgtagccgggccagtcggagcctatgaatatcacgcgcttagctcggatggtcgggtggcggacgcgtcggcgttcagcccgtcaccggcggaagtcgtggtgactattctggcccgcgacggcgatggtactgcgccggaagacttactgcaggtcgtcggtgaggccctgaatgatgaggctgtgcggccggtggcggatcgggtgagtgtccgatctgctgagattgtcccctatgaaattgatgcggttctttatgtctatcccggaccggcaaaggaacccatcctggcggccgcgaaagcgcagggtgcggcgtacatcaacgagcagcgtcgcctggggcgtgacgtgcggctgtctgcgatctacgccgctttgcatgttcagggcgtccagcgtgttgagctgatgaagcccctggcggacatggtgttagataaaacgcaggcgtcatattgcaccgattttaaagcagaaattggtggctctgatgactag

SEQ ID NO: 136562 - DNA, 606 bp, Enterobacter cloacae
atgactagcagcctgttaccaccggggtcgtctgcgctggagcgcaggctggcgcaagcctgttcaggtatcagtgatttatccgtcccgctgcgtgacctgtggaatccgtggaaatgccctgtgaaattcctgccttatctggcgtgggcgttttctgtcgaccgctgggaagaaacatggtcggaaaaagagaagcgccaggcggtcagtgatgctttctggatccaccaacgcaagggaaccgtcgctgccgtgcggcgcgtgattgaaacgctgggctatagcatgacgctccaggaatggtgggaagtggccgaccctgccgggacattccgccttgagattgacctcaatgatattggtatcactgagtcaatgattaaagagctggagcggattattggtgatgcaaagccggtcagtcgccatatatcgcagatgacactcggagtcagtagtcatggcgctgctaatgtcgggatatcaatatttgatggtgaggtaatagatatatatccgccaggttatgaaccggatgacagtatttattttgatggtcaggcgagtttcgacggcagttattattacaccgggaaaagttaa

SEQ ID NO: 136563 - DNA, 2421 bp, Enterobacter cloacae
atgagcaaaatcagtgaaaccccacgctgggaaaatgaaatccacgcgctgacccgcggtgaaaaagtggaaggcggcagaggtggtgcagccaatatccaggcatcccagctgggaaaccgaacggcattccttaaaaatgagctggaggcattaggaacgctgatcaaatcaggcgatatgccgtttgccagcgaggaagccgccgccgccgccatcaatgaggggaaaatccccgatggtgccgtgttctctgtacgatcatccgatccgcgtgtttgggttgctgagtataaaaatgtcggaggcgaaccggttaagacgggacgtctgatttataacagcctggctgttgccgcgaccgtaatggcgggtgttgatgacccagacggtacgataacgggtatcgcctcgacgtttagcggccagctgttccgcgttatcaccgatgacagcaacgctccgtccgaggtgatttacattaacgataacggcgaagccaggttcatcatgactctggcaagtgggcaggcactggatacggtgcgggccctggccgagcaggccagtgcagatgcgcttcccctgaaagggacgattcgccgggccgatattggcaatcttttgctggcgctggttgatgaaatcggccttatcccctggcaggttgacggggcgggcggttttggttcaggcgtggcttatatcagcaaggaggggattcgcgccggcgtcctgcaaatcatgagcacaccggacgctattttaaggctggtcggcgagcatgggatttacagcgacctgattaaaaaagacggctccgcgaatttcccccgatacgcgctgggtaatggcgtatatctgaccagcacgccagacgcgattattcgtctgactgaccgtaacggccttttttacgacattattgataaatatggcgtcccggcatggttgaaaaagggcaatggtaatggtggcggtggagaggaaatgacggaagccgcgtatattcgccagcagaatgcggtaaacctgtctgttatggaacaatctggccggcgcattatgacgcggcttaaatttccgtcagacgcatataatcattttattatgcagtgccagtcgctcggtatggggtttatgtgctttcctgccgtctcaaaggccccgaaatacggcaatctgatgctcggcaattccgtgcgcccggcgagcgcgtccaaaaatgaatttgcccccctaggcgacgcagctttccagccgctcaaatccgtggttcagagtgtggatggggcaacgatcctgacagatgcagagcagcaggcgttaggccggtacgcaggaaacgaaggggaaagccctattgtcggtgctgtaaatggttttcgccgccacttcctcgaaaaaaacgctttcagcgccgataactcacgcctttttgtggcatccgctgtcggcctgtccggtcagtcaattgcgtctctgctggatgatgagaaatattatcagcgttttgttgactgcgtgacaaaagcaaaagccctggcggacagcgaggggaagagctattccgttacgttgctggcatttatgcagggcgagcgcgactaccaggacggcacatcaaaagccgtttacaaggggctgctggggcagttgcgcactaaaatgctggcaactatccgcgccattaccggacaagccgacgatccggtgtggctcatgtatcagactggctatgtttacaccccgaaccctgataattcgccgattaatgcagtgacgctgccgattggtgaggctcagtacgagttttgccaggaaaacaaaaactgcttgatggtggggccaaattatcagctcccggataaacagggtcacctcatgactaacggtagccggtggatgggatgctatttcgccaaagttgcggacagggtacttaaccagcgccgcccgtttcagccgctggctccgcgtgattttcatgtcattggcaatgcgatttataacagcttcctggttgaacatccgccgctaaagtggcagcgcccgttccgggtaggttcgaggattgacatagccaataagggctttcgtgttttccacaacatccaggctgacgccgccgggatcggtacggaactgactattgccagcgtggagatcgtcgccgacacaatagtgaaaattgtctgcactacgcctcccgtcgggacggtgcgcgtcctctatggctccaaacagtcagagggccaggggatgctgactgacagcgatgattatgtgcctgacgaggtatacgaatacgatccgcaattcacgcaatggcctgaggaaaatatcgccgaattaatcggtaaaccatacccgatggagaactggtgcatagccttctcccggacatttacgcaggggtaa

SEQ ID NO: 136564 - DNA, 780 bp, Enterobacter cloacae
gtgcatagccttctcccggacatttacgcaggggtaaacataatgagcacaggatttttgttaggcaacatcagcgatatttcagcgttcgcgaccggttttttactgcctgttgacggcgcggtttacgccaatattttcggtgctgacagcagcccggcccgcaatctgatcaacggtcggccggatgcgacggtcattggctcgccggttgttaatgaccggagcgttaccctgaccagcatggaaagctatattgataccggcgtgaaacagaccggtgaaatgacgatcatcacgctggggcagccagccgggacaaccagcaattttatccactggtctaactatggctcgccagttacaaatggcgggtctggattaacctccattgattttgcgcagcagtcaaatgcgacgggcaacccgacgttgtcgctggggtacaccctcgataattttgcgaccaggctatcactgtcctatggcattacagcaggtgccgacacggttaaaaggcgagctattgcgtcggtattcagccagtcagcgatgacaacgcgtttgcgtgacctggtgaacaaaaaaagccagcagaatgccattccggctaatggcgtcctgcttcaggccgggaatatcctgctgggatcacattacacggcggcgacagcatcaaaaggtgacttgtactttgcggcgatttatccgcgggcgttaactgatgccgagattgacgcggtgtatgtgcctattaaggcgttttttggattgcagtag

SEQ ID NO: 136565 - DNA, 1077 bp, Enterobacter cloacae
gtgagcgataaaaaattctgtgccatcctcacgcgcgccggtgaggaagcgatgacccgtgcggcagtcactggggagccggtgggattctctgtgatggccgtaggggatggtggcggcgtatcggctatacctgaccccctacaaaccgggttaatcaacgaggtatggcgtgcccccctgaatcgcgtggtgatagcagaccagcaggccaacgttattcgcgcggaaatgattatgctgccgcaggtcggcggattctggctaagagaggctgcactgtatgacgacgagggggtttgtctcgccgtcgcgaacatggcgccgacctataagccgctactggcagagggggcaggcaggttgcaatccgtcaatatgtggattgccgtcagtaataccgccagcgtcaatctaatcactgacccctgcatcattctggcgacagtgagcgaggtcgaaagagcgaagaatgatgtgaaggattatacagataagattgtaggccagcttgatacggacattcagcaggtgattgctgatgcgataacggaggcaaagcgtaatttctgggaggacgataaccctgtcggcaccacgcgattttttaatcagaacgtcaacccgaatgaaaaatggccatggtcagaatgggtgtacaccggcgagaataaaacaattcgtgtaggcaaagcggacggctcaaatgtgggcactactggcggcagcgataccgtcacgctccagaaggccaacctgcccgccgttcagattgatgtgagtggcgaaaccagcgaacaggcagagcagaaactgacgaccacgcgcggcggtgttcacaatcatggtggggtggccggtaaagatgacccctgggaaatcggcggcgatgtgcgtcagctctttaaccctaaagagctgggcgtgacagatgatgccggagagcacgaccatgaagtcacagtaccgccgcataaacatacgacaagcggaaaaaccgccaacctcggcgccggtcaatcattcagcgtggtggaagcgcacaccttgctgatgtgctggagccgcgttgcctga

SEQ ID NO: 136566 - DNA, 1173 bp, Enterobacter cloacae
atggcgcaagactatcaccacggcgtgcgtgttgttgaagttaacgacggcacccgctctatcacgacggtgagcacggcgattgtgggcatggtatgcaccggcgatgatgccgatgcctctgtgttcccgctcaataagccggttctgcttaccgatgtactgaccgccagcggcaaagcaggcgagtccggcacgctggcccgctcactggacgccatcgccgaccaggcaaaacccgtcaccgttgtggtgcgtgttgcccagggcgaaaccgaagcggaaaccacctccaatattatcggcggtgtaaccgctgacggtaagaaaacgggcatcaaagcgctgctttcggcgcagtcgcagctgggcgtgaagccgcgcattctgggcgtgccgggccatgacacgcaggctgtttccactgagctgttaagcgtggcacagagcctgcgcggttttgcgtatctgtctgcctacggttgtaaaactgtggaagaagcgattgcctaccgcgaaaatttcagtcagcgagaagggatgttgatctggcctgatttcatcaactttgacacggtgctgcaggcggatgcgactgcttacgccactgcccgcgcgatgggtctacgtgccaaaatcgacgagcagaccggctggcacaaaaccctgtctaacgtgggcgtcaacggcgtaaccggcttgtctgcggatgtgttctgggatctgcaggacccggcaaccgatgccggactgctgaaccagaacgacgtcaccaccttgatccgcaaggatggtttccgcttctggggttcccgctgcctcagcgatgacccgttattccagtttgaaaactacacccgtaccgcgcaggtgctggcagacaccatggcggaggcgcatatgtgggccgtggacatgccgcttaacccttcgctggctcgcgacattatcgaaggtatccgcgccaaaatgcgcagcctggtaaatcagggctacctcatcggcggagattgctggattgatgacagtgtgaatgacaaagacacgctgaaagccgggaaactctggatcgactacgactatacgccagtgcctccactggaaaacctgatgctgcgccagcgcatcactgaccgttacctggtggatttcaccacccgcgtaagcgcataa

SEQ ID NO: 136567 - DNA, 300 bp, Enterobacter cloacae
atgagtgagaaaacagaagcaacggtgaaactggatagcccgattaagcgcggtgataccacgattacggaaattgtgctgcgtaagccgcaatccggcgcgctgcgcggtacgcgactgcaggcggtgatggagatggatgtggcctctatgatgaccgtgatcccacgcatctccacaccaacgctgaccccgcaggaaatggcggacctcgacccggcagacctggccgcgatgtctgtcgaggtagtcctttttttgttgccgaagtcggcacttgccgatttgccgacagcctga

SEQ ID NO: 136568 - DNA, 2628 bp, Enterobacter cloacae
atgagtgataaaaacctgcgcctgcaggtggttctgaatgcggttgataaactcacccgccctttaaaaaatgcgctggctggctcgaaggagctggcctccggcatccggcagacccgtgatcagcttaaacggcttaacgacgcggggagccagttaaaatcttttgatcaactctcacagagcctgaaccggaccagcaacgagctggaccaggcgcggctgcgtgcgcagatgatgacgcgcgaactggcagcgctcgaatcccccacgaaaaaacagacgcaggcgcttgaggcgcaatggcgcgccgtatcacgcctggaacaaaagcagcagcaggaaacgcggcagatggcagcaaccagggcggagctgtaccgccttggcatctctgcgggcggcggtgcccgtgaaacagcccgcattacccgcgaaacggatcgctataaccagcagctggcagagcaggagcggcgcttgcgggacgtgggcgagcgccagcgcaagctgaatgcgatcagggccaaagctgacaagatgcgcgacgtgcgtaacaacctggcggggaacggtgccgggatgatggctgccggggtgacaacgggcgcgacgctaacggcgcccattcgcgcttactcggaatcagagaacgcggctaaccagctggcaggctccatgatggggccgggcggaaaggtagcgccggagtttgcgaagctaaacaagctggcaatcgccctgggtgaccggctgcccggcaccacggcagactttcagaacatgatgaccatgttacgccgtcagggcatgtctgcgcaggtcatcctgggcgggctgggtgagtcggcggcgtacctcggcgtacaactgcagatggcaccaacggatgccgcagagtttgccgcaaaactgcaggatgccacgcagaccaccgaaaaggacatgatgagcctgatggatgtgatccagcggggttattacgcgggcgttgaccccggcaatatgctgcagggtttttcgaacattggtagtgcaatggatattatccgtcagaagggattgggggcaacgaaggtatttgcaccattgctggtgatggcggatcagatggggatggctggcgagtcagcagggaatgcctaccgtaaaatattccaggctgtcatggataccaaaaaagttaataaagccaatgcctcaattaaaggatcaggggtcaaattagactttactgatggaaaaggggaatttggtggactggataaactattttcccagcttgataagttaaacaaattaaatacagagcaaaggcttgcgacgcttaaagtggtatttggtgacgatgccgaaacgctaaaggtattgaataacatgattaccaaagggatgtctggttatcgtgaaacagtagcgaagctggagaatcaggcaaccctgcgcgagcgcgtcgaagcgtctcttaataccctgggcaacaaatgggaagccgctggcggctcctttaccaacgccatggcaagcatcggcgaaaccgtcgcaccggtacttaaagatattgctgactggctgggtaatctggcgtcagcactggatggttttgttaagcggcatccgcaactaacggcagcgctgtttaagattgtggcggtgtttgcggttgtcgctactgctgcaggcgtgttgtcgctggctctggcgtccattctgggaccgatggcggtgctgcgggtgagtgctggggttctgggaattaagtttgcctccgcttttggtctgataaagcaggtgattggtggtgcgggccaggcggtcctctggttaggtcggttgatgatggctaatcccattctggcgatagttggcctgattgcgatgggagccatctatatctggcagaactgggaaacgctggggccgaagtttaaagcactgtgggatgccatcacgtcaggggtgtcagtagcctgggctgtgatcaagcagaccataagcagcaaatgggatgaaattctgagtgatgttgccgcgctgcccgcaaaatttaaagcggtgggcggggcgatcattgacggcatcctgagcggtatcaatgagaaatgggaaacgcttaagagcaagctggcatcggtcaaaagctacctgccggactggatgaccggcggcgataattcgcagggcgcctcaccgcagaaaaagaccccaggatttttcgcggggatgtatgacagcggtggttatattccacgtgggcaggtgggtattgctggcgagaatggcccggagctgattaacggtccggcctatgtgaccagccgcaggaggacggccgcgctggcgtccgttgtcgccggaatgatggggggagcaatgccagcagaggccgccccgcttcatccgatgagcctgccggcggcctcatatcgccctgcagctgagaaaccagcaggtacgcggccggtgttccactttgaaacccaggctcaaattatcatccaggcgctgccggggcagagtgcgcaggatattgcgcaggaggtagcgcgacagattgatgagcgcgagcgtcgtatgagggctaaggcccgcagcaatttcagtgatcaaggggggtacgattcatga

SEQ ID NO: 136569 - DNA, 486 bp, Enterobacter cloacae
atgatgatggtcctgggcttgtttgtgtttcagctgcgcacggttccctatcagcaactgcagtatcagcggaactggcgccatgtgaccaacaaccgcgttaatcgccgtccgacaacgcaatttttggggccagataacgatcagctgacgctctccggcgtcctcatgccggaagtgaccggcggccggttgtcgttgctggcgctggagctgatggcagagcaggggaaggcgtggccgctgatcgagggtggtgggactatctacggcatgtatgtgattgagagccttaaccagacgaaaacggaatttttcgccagtggagaagccaggaaaatagagttttcgttggggcttaaacgggtggatgagtccctgtctgaaatgttcggcagtctgagtgatcagcttagcagtctgcaggattctgccgccgccgcagtagggaacatcagatccacggtaggagggttgctgcagtga

SEQ ID NO: 136570 - DNA, 1098 bp, Enterobacter cloacae
gtgagcgagatggctgatttactcaacctcggaagcaagaccccggcctttcggatcgtgattgaaggcaaagatgccacgcagacgctggataaacgtctgctgggtatgacactgaccgacaaccgcggatttgaagctgaccagcttgatctggagctggacgacgccgacggcctggtaattatgccgcgtcgtggcgcagtgatttctctggcgctgggatggaaaggcgagccgctgtactcaaaaggtaagtttaccgttgatgaaatagagcatagcggcagcccggacaggctgacaatccgtgcccgtagtgctgatttcagggaaacgctgaatgtccggcgtgagaagtcctggcacaaaacgacggtgggcgatgtggtgaaagacattgccgcacggcacagccttaaagttgctataggaaatgatgttgctgcgatggcgctggatcacctggaccagaccaatgaaagcgacgccagctttttaatgaagctggcgcggcagtatggcgcgattgcctcagtcaaggacggtaatctgctgtttatccggcaggggcaggggaaaacagcaagtggtaaaccgttgccggtcatcactattacccgtaaggacggagacagtcaccggtttagcctggctgacaggggagcatatacgggtgttatcgctcactggctgcataccagggaaccggaaaagaaagaaactgcaaaggtgaagcgccgccggaggacgacaaaacccaaagagccggaagcaaagcagggggattacctggtcggaacggatgagaacgtgctggttctgaaccgtacctatgcgaaccgcagtaatgcagaacgggcagcaaaaatgaactgggagcggctgcagcgtggtgtggcgtcattctctctccagctggcagaaggccgcgcggatctctatacggaaatgccagttaaggttagtggctttaaacagcccattgatgatgcggaatggaccatcacaacattgatgcacacggtgaacccggatagcgggtttacaaccagtatcgaactggaagtgaagattgatgatttagaaatgagctga

SEQ ID NO: 136571 - DNA, 219 bp, Enterobacter cloacae
atgatgaattgtccaaagtgcggccacgcggcgcatacacggagtagctttcgggtaacggatcagacaaaagagcgttactgtcagtgccagaacattaattgcggaaccaccttcatcactcatgaaaccgtagtgcgttacatcatgacacctggagtcattgataatgccccgccgcaccccactgccgccgggcaggggcatatgaatttctga

SEQ ID NO: 136572 - DNA, 1665 bp, Enterobacter cloacae
atgtgttctatttttggcgtactggatattaaaactgacgcaggcgagctgcgtaaaaaggcgctggagctttcccgcctgatgcgccaccgcggtccggactggtctggcgtatatgccagcgacaaagcgattctggcgcacgagcgcctgtcgattgtcgacgtcaacgccggggcccagccgctgtacaacgccgaaaaaacccatgcgctggccgttaacggcgagatctacaaccaccaggcgctgcgcgcggagtatggcgatcgctaccagttccagaccggttccgactgcgaagtgatcctcgcgctgtatcaggaaaaaggcccggagttcctcgacgacctgcagggaatgttcgccttcgccctgtacgacagcgaaaaagacgcgtacttaattggccgcgaccatatcggcattatcccgctatatatgggccatgacgaacacggcaacttctatgtcgcctccgaaatgaaagcgctagtgccggtatgccgcaccattaaagagttcccggcgggcagctacctgtggagcaaagacggcgaaattcgccagtactatcagcgcgactggtttgattacgacgcggtgaaagacaacgttaccgataagaacgagctgcgtcaggcgctggaagagtcggtgaaaagccacctgatgtccgacgtgccttacggcgtgctgctctccggcggtcttgattcatcggtcatctcggctatcaccaagaaattcgccgcccgtcgcgtcgaagatcaggagcgtagcgaagcctggtggccgcagctgcactctttcgcggtcggtctggaaggctctcctgacctgaaagcggcgcaggaggtggccaaccacctcggcaccgtgcaccacgaaattcactttaccgtccaggaagggctggatgccatccgcgacgttatctatcacatcgaaacctacgatgtgaccactattcgcgcttcgacgccgatgtacctgatgtcgcggaaaattaaagccatgggcatcaaaatggtgctttccggcgaaggttcggacgaagtgttcggcggctacctctacttccataaggcgccgaacgccaaagaactgcacgaagagacggtgcgtaagctgcaggcgctgcatatgtttgactgcgcccgcgccaacaaagcgatgtccgcctggggcgtggaggcccgcgtgccgttcctcgacaagaagttcctcgacgtcgcgatgcgcattaacccgcaggataagatgtgcggcaacggcaaaatggaaaaacacattctgcgcgaatgctttgaatcctacctgccggccagcgtcgcctggcgccagaaggagcagttctctgacggcgtcggctacagctggatcgataccctgaaagaagtggccgccaaacagatcagcgaccagcaactggaaaccgcaagcttccgcttcccgtacaacacgccgacctccaaagaaggctatctgtaccgcgagatcttcgaagagctgttcccgctgccgagcgcggcggagtgcgtccctggcggtccgtcggtggcctgctcttcagcgaaagccattgagtgggatgaagcgttcaaaaccatgaacgatccatcaggccgcgcggtcggtgtccaccagtcggcctacaaataa

SEQ ID NO: 136573 - DNA, 753 bp, Enterobacter cloacae
atgaccattcaaaacataatttgtgatattgacggcgtactgatgcacgataacgtcgccgttcccggcgcagccgagtttatcaagcgcatcctcgataaaggcatgccgctggtaatgctgaccaactacccgtcgcaaaccggccaggatctggcgaaccgtttcgccaccgctggaattgatgttccggatagcgccttttacacctcagcaatggccaccgccgattttctgcgtcgccaggaaggcaaaaaagcctacgtggtgggagaaggggcgctgatccacgagctgtacaaagccggctttaccattaccgatgtgaacccggattttgtcatcgtcggggaaactcgctcctttaactgggaaatgatgcataaggccgccttcttcgtcgccaacggcgcccgcttcattgccactaacccggatacgcacggtcgcggcttctaccctgcctgcggcgcgctgtgcgccgggatcgagaagatctccggccgtaagccgttttacgtcggcaaacccagcccgtggatcatccgttcagcactgaataaaatgcaagctcactccgagcagacggtgatcgtcggcgataacctgcgcaccgatatactggccggtttccaggcggggctggagactattctggtgctctccggcgtctccaccctcgacgatatcgacagcatgccgttccgcccgtcgtggatttacccttccgtcgcggaaatcgatattttctga

SEQ ID NO: 136574 - DNA, 1221 bp, Enterobacter cloacae
atgacagcaggcggacaagctcaaattggtaacgttgacctcgtaaaacaactgaacagcgcggccgtgtaccgcctgattgaccagcatgggcccatctcgcgcattcagatagccgaacaaagccagcttgcccctgccagcgtgaccaaaatcacgcgtcagcttattgagcgcggcctgatcaaagaagtcgatcagcaggcctccaccggtggccgccgcgctatctctatcatcgcagaaacccgcaacttcaatgccatcggcgtgcggcttggccgctatgacgccactctgaccctgtatgatttaagcagcaagcccctggaagaggagcacttcccgctgcccgagcgcacccaggaaacgctggaacacgccctgctgaatatcatcgccacctttatcgaaaactgtcagcgcaaaattcgcgagctgatcgctatctcagtgatcctgccgggcctcgtcgacccggaaagcggcgtgatccgctatatgccgcacattgcggtggaaaactggggcctggtcggggcgctggagaaacgcttcaatgttacctgctttgttggccacgatatccgcagcctggcgctggccgagcactattttggcgcaagccaggattgcgaagactccattctggtgcgcgtgcaccgcggtaccggggcggggattatctccaacgggcgcatttttatcggccgcaacggcaacgtcggcgaaattggccatattcaggtcgacccgctgggcgaacgctgccactgcggcaacttcggctgtctggagaccgtcgcggccaatgccgccattgaacagcgggttcgccacctgctggagcagggctaccagagccgtctgacgccggatgactgcacgatcaaaactatctgcaaagcggccaacaagggcgatgccctggcctgcgaggtgattgagtacgtggggcgccacctcgggaaaacgatcgccatcgccattaacctgttcaacccacaaaaaatcgtcgtcgccggcgaaatagtggaagctgaaaaggtccttcttccggccatcgaaggctgcattaacgcccaggcgcttaaggcgtttcgtaagaacctgccggtggtgcgctccaccctcgatcaccgctctgcaatcggcgccttcgcgctggtcaaacgcgccatgcttaatggcacgctgctgcagcgtttgcttgagagctaa

SEQ ID NO: 136575 - DNA, 708 bp, Enterobacter cloacae
gtgcgtaaaccggacgcggcgctggtcgatttcctgtgcgacaacgccgatgtgatcaccaaagtgaccctcgcccctgagcgcgttgagccagaagtgatccgcaaactggtcgccgccgggatcgttgtctccgcgggccactccaacgctacgctgaaagaggcgaaagtcggcttccgtgcgggcattaccttcgccacccacctgtataatgcgatgccgtacattaccggccgcgaaccgggtcttgccggggcgatttttgacgagccggatgtctactgcggtatcatcgtcgacgggatgcacgtcgattacgccaacgtgcgcaacgccaagcgcctgaaaggcgacaagctgtgcctggtcaccgacgccaccgcgccggcgggggcgaatattgaccagttcatttttgccgggaaaacaatatactaccgcaatgggctgtgcgtagatgaaaacggcaccctcagcggatcttccctgaccatgattgaaggggtgcgtaatctggttgagcattgcggcgtggcactggacgaagtattgcgcatggcgacgctctatcctgcgcgcgctatcggcgtggacaagcagctcggcagcattgcgccgggcatggtcgctaacctgaccgcctttacacgcgattataaaatcaccaagaccatcgttaatggtaacgaggtcgtcactgagtaa

SEQ ID NO: 136576 - DNA, 414 bp, Enterobacter cloacae
  misc_feature (398)..(407): n is a, c, g, or t
atgtatgcattaacccagggccgggtttataccggtcatgaaattctcgatgaccatgcggttgttatcgctaatggctttatcgaacgtctttgtccgctggcagatttgccgtctgacatcgagcagcgctcagtcaacggcgcaataatcgcccccggttttatcgacgtccagctcaacggctgcggcggcgtgcagtttaacgacagcccagaggcggtcactgtcgaaacgctggagatcatgcagaaggccaacgaacgctcaggctgcaccagcttcctgccgacgctgattacctccagcgacgatctgatgaagcaaggcgtgcgcgtgatgcgcgaatatctgcaaaaacatccgaaccaggcgctgggcctgcatctcgaagggcnnnnnnnnnntggctga

SEQ ID NO: 136577 - DNA, 801 bp, Enterobacter cloacae
atgagactgattcccctggtaaccgctgagcaggtcggtaaatgggctgcccgccatatcgttaaccgcattaatgcatttaaaccaaccgcggaccgtccgttcgtcctgggtctgccaaccggtggtaccccgctgaccgcctacaaggcgctggttgaaatgcataaagcaggccaggttagcttcaagcacgtcgtcacctttaacatggatgaatacgttggcctgccgaaagagcatccggaaagctatcatagctttatgcaccgtaatttctttgaccacgttgatattccggcagaaaatatcaacctgctgaatggtaacgcgccggacatcgatgcggaatgccgtcgctatgaagaaaaaattcgttcctacggtaaaatccacctgttcatgggcggcgtgggcaacgatggtcatatcgcgtttaacgaaccggcctcttctctggcgtcccgcacccgtattaagaccctgacccatgaaacccgcgtagcgaactcccgcttcttcgacggcgatgtggatctggtgccgaaatatgcgctgaccgtcggcgtgggcaccctgctggacgcagaagaagtgatgattctggtgctgggtcatcagaaagcgctggcgctgcaggcggcggtagaaggtaacgtcaaccacatgtggaccattacctgtctgcaactgcatccgaaggcggtgatcgtctgcgacgaaccgtccaccatggagctgaaagtgaagacgctaaaatatttcaacgaattagaagctgaaaatattaaaggtctgtaa

SEQ ID NO: 136578 - DNA, 1890 bp, Enterobacter cloacae
  misc_feature (695)..(730): n is a, c, g, or t
atgaatattttaggtttctttcagcgactgggtagggcgttgcagctccctatcgcagtgctgccggtcgcggcattgctgctgcgtttcgggcaaccagacctgttgaatgtacccttcatcgcgcaagcgggtggggcgatcttcgataatctggcgctgatcttcgcaattggtgtggcatcaagctggtctaaggataacgccggttctgcggcgctggccggtgcggtagggtatttcgtgatgaccaaagcgatggtcaccatcaatccggaaatcaatatgggcgtgctggccggtatcattaccggtctggtggcaggggcggtatacaaccgctgggccggcatcaagctgccggacttcctgagcttcttcggcggcaaacgcttcgtgccgatcgccaccggcttcttctgtctgatcctcgcggcgatcttcggctacgtctggccgccggtgcagcacgctatccactctggcggcgaatggatcgtctccgcaggggcgctgggttccggtatctttggtttcatcaaccgtctgctgatcccaaccggtctgcatcaggtgctgaacaccatcgcctggttccagattggtgagttcactaacgccgctggcgctgtgttccacggcgacatcaaccgcttctacgccggcgacggcaccgcggggatgttcatgtccgnnnnnnnnnnnnnnnnnnnnnnnnnnnnnnnnnnnnccgtggccatcaccgcgttcctgactggggtaaccgagccgctggaattcctgttcatgttcctggctccgctgctgtacctcctgcatgcggtgctgaccggtatcagcctgttcatcgcaacggcgctcgggatccatgcgggcttctccttctccgcaggtgcaattgactacgtgctgatgtacagcctgccggccgccagcaaaaacgtctggatgctgctggtgatgggcgtggtgttcttcttcgtctacttcctgctgttcagcgcggtgatccgcatgttcaacctgaaaacgccgggtcgtgaagacaaagccgctgacgtggtaacggaagaagccaacagcaacactgaagaggggctgacccagctggcgaccagctatatcgccgcggtgggcggaacggacaacctgaaagccattgacgcctgtatcacccgtctgcgtctgaccgtgggcgattcggcgaaggttaacgacgccgcctgtaaacgtctcggcgcgtccggggtggtgaaactgaataagcaaaccatccaggttatcgtcggtgcgaaagcagagtctatcggcgatgagatgaaaaaagtggttacccgcggcccggtagcggcagcggcagccgcaccggctggcaacgtcgccaccgcagcgcccgcggctaaaccgcaggcggtagcgaacgcgaagaccgttgagtcgctggtttcgccgattaccggtgacgtggtggccctcgagcaggtgccggacgaagccttcgccagcaaagccgttggcgacgggatcgcggtgaaaccgaccagcaacatcgtggtggccccggccgccggtaccgtggtgaaaattttcaacactaaccacgcgttctgcctcgaaaccaacaacggtgcggaaatcgtcgttcacatgggtatcgacaccgtggcgctggaaggcaagggcttcaaacgtctggttgaagagggcacggacgtgaaggcgggtgagccgattctggaaatggatctggacttcctcaacgccaacgcgcgctcaatgatcagtccggtcgtctgcagcaacagcgatgactacagcgcgctggtgatactggcgagcggtaaggtcgttgctggccagacgccgctgtatgagattaaaggcaagtaa

SEQ ID NO: 136579 - DNA, 1668 bp, Enterobacter cloacae
atgagtgaggcagaagcccgcccgactaactttatccgtcagattattgatgaagatctggctaccggtaaacataccaccgttcacactcgcttcccgcctgagccgaacggttatctgcacattggccatgcaaaatccatctgcctgaacttcggcatcgcccaggattatcagggccaatgcaacctgcgtttcgatgacaccaacccggtgaaagaagatatcgaatacgttgagtcgattaaaaacgacgtgcagtggttaggtttccactggtccggggacgtatgctactcgtctgattatttcgatcagctgcatcagtatgcggttgagctgatcaacaaaggtctggcctatgttgatgaactctctcctgatgaaattcgcgaataccgcggcaccctgaaagcgccgggtaaaaacagcccgtatcgcgaccgcagcgtggaagagaacctggcgctgtttgaaaaaatgcgcagcggcggcttcgaagagggcaaagcctgcctgcgcgcgaagatcgatatggcgtcgccgtttatcgtgatgcgcgatccggtgctgtaccgcattaagttcgctgagcatcatcagactggcaacaagtggtgcatctacccgatgtacgacttcacccactgcatcagcgatgcgctggaaggcattacccactcgctgtgtaccctggagttccaggacaaccgccgcctgtacgattgggtgctggacaacatcagcatcccggtgcatccgcgtcagtacgaattctcgcgcctgaatctcgaatacaccgtgatgtccaagcgtaagctgaaccagctggtgactgagaagcacgtggaaggctgggacgacccgcgtatgccgaccatctccggtctgcgtcgtcgcggctacaccgccgaatccatccgtgagttctgcaagcgcatcggcgtgaccaagcaggacaataccatcgagatggcgtcgctggagtcctgcattcgtgaagatctgaacgaaaacgccccgcgcgcgatggcggtgatcgatccggtgaaactggttatcgagaactatccgcagggcgaaagcgaaatggtggtgatgccgaaccatccgaacaagccggaaatgggcagtcgtgaagtgccgttcagcgccgaaatctggatcgatcgcgcggacttccgcgaagaagccaacaaacagtacaagcgtctggtgctgggtaaagaagtgcgtctgcgcaacgcctacgtcatcaaagcggaacgcgtggagaaagatgccgaaggcaatattaccaccatcttctgcacctacgatgccgacaccctgagcaaagacccggccgacggccgcaaggtcaaaggcgtgatccattgggtaagcgcggcgcatgcgctgccggtagagatccgtctctacgatcgtctgttcagcgtgccaaacccgggcgcggcggaagatttcctcgcagtgatcaacccggaatcgctggtgatcaaacaggggtacgcggagccgagcctggcgcaggccgaagccggtaaagcttaccagtttgagcgtgaaggctatttctgcctcgacagccgctatgcaaccgcaaccagtctggtgttcaaccgcaccgtcgggctgcgtgatacctgggcgaaagcgggcgaataa

SEQ ID NO: 136580 - DNA, 309 bp, Enterobacter cloacae
atgtggggcggtaaaaaagaccgcgaaaccactgtagatagactatttttcgtggcgcgaattatcaatgtttttcgtgaggcaaagcttaagattatgacaaagcgcacatattttatgtcgttttgttacagtcttatctctgatgattttgttatggaagtcattgcaaaatcagggaaaaacgcaatcattgaaagcgattacattggttttttgtatgtgacaggaaacatcagaagcgctatttattaccacgcagaaacagaattaattcgcatcgcgaaaatgaaaagtttaattagctga

SEQ ID NO: 136581 - DNA, 1404 bp, Enterobacter cloacae
atgcgtacgtttagtggcaaacgtagtacgctggcgctggctattgccgccgtcaccgcgatgtcgggctgggttgtggctccacaggccagcgcagcaggctttatcgatgattcaaccttaaccgggggtatctattactggcagcgtgagcgtgaccgtaaagatgtgaccgacggcgacaaatacaaaaccaacctttcccactctacctggaacgccaacctggacttccagtccggctatgccgccgatatgtttggccttgatattgccgcgtttaccgcgattgaaatggcggagaacggcgatagcggccacccgaacgaaattgccttctcgtcacgtaacaaagcctatgacgaagactactccggcgataagagcggcatcagcctgtataaagccgcagcgaaattcaaatatggtccggcgtgggcacgtgcgggctatatccagccaaccggccagactctgctggccccgcactggagttttatgccaggtacctatcagggggcggaggccggggctaacttcgactatggcacggcgggcgcgttaagtttctcctatatgtggacgaacgagtataaagcgccatggcatatcgagatggacgatttctatcagaacgataagaagaccaaagtcgattatctccactccgtcggcgctaaatatgatttcaaaaatgacctggtgctggaggcggcatttggtcaggctcagggctatatcgatcagtactttgctaaagccagctacaagtttgacgtcgccggcgcgccgctgagcaccagctaccagttctacggcacccgcgataaggtcagcaacggcggggtcaacgacatctatgatggcaccgcatggctgcaggcgttaacctttggttataaggtggcggatgtcctggatctgcgtctcgagggaacctgggtgaaggctgatggccagcagggctacttcctgcagcgtatgaccccgacctacgcctcttccaatggtcgtctcgatatctggtgggataaccgctccgactttaacgccaacggcgaaaaagcggtcttctttggcgcgatgtatgacatgaaaaactgggatatgccgggctgggcgttcggcgcgtcttatgtctacgcctgggatgcgaagccgggccgaatgtcctctccggatgcgtactatgaccctgactatcgcctgaaagagtcggcctatagcctggatgcaatgtataccgtacaggaagggcgggcgaagggcaccctgttcaaactgcactttacccaatacgacaaccattccgatattccgagctggagcggcggctacggcaacatcttccaggatgagcgcgacgtgaagttcatggttatcgccccgttcactattttctga

SEQ ID NO: 136582 - DNA, 333 bp, Enterobacter cloacae
atgaaaaaaatgctgcttattgccatgatggcagcgggcctggtggcctgcaccacgtcgccggcgccgaaagaagacaccaaactgaaagatgcctatagcgcctgtattaatacggcggaagggaatccggacaagattgaagcctgccagagcgtactgaatgtgctgaaaaaggataaacagcaccagcagttcgccaaccaggagagcgttcgcgtcctggattaccaacagtgtattcaggccacccgcaccggcaacgatcaggcggtgaaagcgcgctgcgatcagatctggaaggagatccgcagcaataatacgacccattaa

SEQ ID NO: 136583 - DNA, 516 bp, Enterobacter cloacae
atgggcgcctctggcgcccttcccgctcacgcccctggggtgactttcctcatccccgctttgtccggagagttgatatggaacttcaccagcggggcgatctctgaccgaatcggtcgtcgtccggtgctgatgggcattaccgtgctggccctgctcaccacctggccggtgatgcactggctcaccgtcgcgcccgatttcacccgtatgacgctggtcctgctatggttctcgttcttctttggcatgtataacggcgcgatggtcgcggcgcttaccgaagtgatgccggtacacgtccgcaccgtgggcttttcgctggcctttagtctcgctactgccattttcggcgacctgacgccagctatttccaccgccctggtcgagctcaccggcgataaaagcccgccgggctggtggctaatgtgcgccgcgctgtgcggattcattgccaccgcgctactgttcgtgcggctgagccgcggctatcagccggcggagagtcagcgctaa

SEQ ID NO: 136584 - DNA, 453 bp, Enterobacter cloacae
atgactgacaacaataccgcattaaagaaggctggcctgaaagtcacacttcctcgactaaaaatccttgaagtgctgcaggaaccggataaccatcatgtcagtgcggaagacttatataaacgcctgatcgacatgggcgaagagatcggtctggcgaccgtttaccgcgtcctcaaccagtttgatgacgccggcatcgtgactcgtcataatttcgaaggcggaaaatccgttttcgaactgacccagcagcatcaccacgatcacctgatctgcctcgactgcggcaaagtgatcgaattcagcgacgactcgatcgaattacgccagcgtgaaattgcctcccgccacggcatccgcctgaccaaccacagtctgtatctgtacggtcactgtgcggaaggggattgccgcgaggacgaacacgcccacgacgcggtggaaaaataa

SEQ ID NO: 136585 - DNA, 531 bp, Enterobacter cloacae
atggcaatcatcggcatcttttttggcagcgacaccggcaacaccgaaaatattgcaaaaatgattcaaaagcagcttggtaaagatgttgctgatgttcacgacattgccaaaagcagcaaagaagacctggaagcccacgacatcctgctgctcggtatcccgacctggtactacggtgaagcgcagtgtgactgggatgacttcttcccgacgctggaagaggtcgacttcaatggcaaactggtggcgctgttcggctgcggcgaccaggaagattacgcagaatacttctgcgacgcgctgggcaccatccgcgacatcattgagccgcgcggcgcgaccatcgtcggtcactggccaacggcgggatatcattttgaagcttccaaaggcctggcggatgacgaccacttcgtcggcctcgccatcgatgaagaccgccagccggagctgaccaacgagcgcgttgagaaatgggtgaagcaggttgccgaagagctgcacctcgaagaaatcaaaaacgcctga

SEQ ID NO: 136586 - DNA, 294 bp, Enterobacter cloacae
atggcaaaagaacaaacggaccgtacgacattagatttgttcgcaaacgagcgtcgcccgggaagaccgaaaaccaatccgctgtcgcgcgatgaacaactgcgcatcaacaaacgtaaccagctgaaacgcgataaggttcgcgggctgaagcgcgtggagttaaaactcaacgccgatgcggtcgatgcgctcaacgagctggcggaagcgcgtaatatgagccgcagcgatctcattgaagagatgctgatgacccagttaaccgccctgcgcagccagggaaaagtctaa

SEQ ID NO: 136587 - DNA, 774 bp, Enterobacter cloacae
atgaaattaaatagccgagcgcaatctgcacagaatccgcacaaccactccccgatcgtgctggtccacggtctgtttggcagcctggacaacctgggcatcctcgcccgcgacctgatcgccgaccatgatattgtgcaggtcgatatgcgcaaccacggtttgtcgccgcggtcgccagagatgacctaccccgccatggcgcaggatctgcttgatacgctcgacgcgcaccagatcgagcgcgccacctttatcggccattcgatgggcgggaaagcggtaatggcgcttaccgccctggcgcctgaacgcatcagcggtctggtggcgatcgatatcgcgccggtggattatcacgttcgccgccatgatgagatcttcgccgctatccgcgccgtcagcgaatccgccgccagcacccgccagcaggcggcgcaggtgatgcgcgagcacctgcaggaagaaggcgtgattcagttcctgctgaaatcattcgtcgacggcgactggcgcttcaacgtgccggtgctgtgggaccagtatccgcatatcgtcggctgggaaaccatcccggcctggccgcacccgacgcagtttattcccggcggcaactcgccctatgtgaccgacgcctaccgcgacgcgctgctggcccagttcccgcaggcccgggcccacgtcatcgccggcgccggacactgggtccatgctgagaaacccgaggcggtgttacgcgccatccgccgctatctgacgagcatcgccgcctga

SEQ ID NO: 136588 - DNA, 693 bp, Enterobacter cloacae
atgttggacattctgccatccggctgcaagacccagaagttttctgagttttaccgccatcctggtttgacgctatccgcggttgggatttgtacttataatcccaacgatttgtattcagaaaagatatcgcactggattaagatgaaaacaattgaagttgatgatgaactctatcgctatattgccagccacactctgcatatcggcgagagcgcatccgacattttacggcgtatgctaaaattttccgccgtttcccaaccggctacaccggtcagcaaagccgcgccgacgctggcgccagcgcctgtcgctgaggtgaaacccgctaacccggtgaaagataaagtccgcgccatgcgcgagatgctgttatctgatgaatacgccgagcagaagcgcgcggtgaaccgttttatgctggtgttgacgaccctctactccctggacagtaaagcatttgccgaggccaccgagtctctgcacggccgcacgcgcgtttacttcgcggaagatgcgcgtacgctgctgaaaagcggtaatcagaccaaaccgaaacaggttcctggtacaccgtggtgggtgatcaccaataccaataccggccgtaaatgcagcatgattgagcacatcatgcagtcgatgcagttccctgcggagctgattgaaaaggtttgcggcacgatctag

SEQ ID NO: 136589 - DNA, 1641 bp, Enterobacter cloacae
atggcaatcgataaacgtgcggggcagcctgcgcaacagagtgatttgattaacgtcgcccaactgactgctcagtactacgtgctgaagcctgaagtcggtaatgcggagcatgcggtaaaattcggcacctctggccatcgcggtagcgcggcgcgccacaacttcaacgaaccgcatatcctggccatcgcccaggccattgcggaagatcgtgcgaaaaacgggatcaccggtccgtgctatgtcggcaaagatacccacgccctctccgagccggcgtttatttcggtgctggaagtgttaaccgccaacggcgtcgacgtgatcgtgcaggaaaacaacggcttcaccccgacgccggcggtctccaacgcgattctggtgcataacaaaaaaggcggtccgctggcggacggcattgtgatcaccccgtcacacaacccgccggaagatggtggtatcaagtacaatccgccaaacggcggcccggctgataccaacgtcaccaaagtggtggaaaaccgcgccaacgaactgctggccgcgggcctgcagggcgtgaaacgcatttctctggacgcggcgctggcttctggccacgttaaagaacaggatctggtgcagccgttcatcgaagggctggcggatatcgtcgatatggccgcaatccagaaagccggcctgacgctgggcgtcgatccgctgggcgggtccggtatcgaatactggaaacgcattggcgagcactacaagctcaatctgaccattgttaacgatcaggtggatcagaccttccgctttatgcacctcgataaagacggcgccatccgcatggattgctcctcagagtgtgcgatggccggcctgctggcgctgcgcgataagttcgatctggcgtttgctaacgacccggattacgaccgccacgggattgtgaccccggcggggttgatgaacccgaaccactacctggcggtagcgatcaactacctgttccagcatcgtccgcagtggggcaaagaggtggcggtgggtaaaacgctggtctcctccgcgatgattgaccgcgtggtgaacgatctgggccgcaagctggtggaagtgccggtgggctttaagtggtttgtcgacggcctgttcgatggcagcttcggcttcggcggcgaagagagcgccggggcctccttcctgcgcttcgacggcacgccgtggtccaccgataaagacggcatcatcatgtgcctgctggcggcggaaatcaccgcggtgaccgggaaaaacccgcaggagcattacaacgaactggcggaacgcttcggtgcgccgagctataaccgtctgcaggcttccgcgacctccgcgcagaaagcggcgctgtccaagctctctccggaaatggtcagcgctgacaccctggcgggggatccgatcactgcccgtctgaccgcggcgccgggcaacggggcggcgattggcggcctcaaggtgatgaccgacaacggctggttcgcggcgcgtccgtcaggcaccgaagacgcctacaagatctactgcgaaagcttcctcggcgaagagcatcgcaagctgattgaaaaagaagcggtagagattgtcagcgaagtgctgaagaacgcttaa

SEQ ID NO: 136590 - DNA, 438 bp, Enterobacter cloacae
atgaaaatacaacggaagtccctgtttttgttctgggcgtggatggatctctttttcgtcctgcaattcttatggtggaatattgcccaccgccgcctccctttttacgacgatctactcgcttatctccagctgctgcacacctggggctccgcggcggtctggctgtacccgctgaatgttctgctgattatcagcatcccgctatcgatgatcttttttttccaccagagccgctatgcgctgtggctggcctgggggcaggcgccgctcaggctgctgtttatgcagccttcgctatcgctgggcctgtggctgattcaggctgccggcgtccggcatttagcgatcctggcaggctttctgctgctctctgaagggctgaaaatcgccagcctctggtactgcagaggcgggattcagggcataaagcgatag

SEQ ID NO: 136591 - DNA, 678 bp, Enterobacter cloacae
gtgattaacgttctgattatcgaagacgaacacgctatccgacgctttctgcgcaccgcgctggaagccgacggcatgcgcgtatttgaagcggaaaccctgcagcgtgggctgattgaagccgccacccgtaagcccgacctcgcgatcctcgatctcggcctgccggatggtgacggcattgattttattcgcgacctgcgtcagtggagccagatgccgattatcgtcctgtcagcgcgtagcgaagagcatgacaaaattgccgccctggatgccggcgccgatgactacttaagtaaaccctttggcatcggcgagctgcaggcccgcctgcgcgtcgcgctgcgtcgccacggcgcggcgcaggccgatgagccggtggtgcgcttcgctgacctggaggtcaatatccccgcccgccgcatcctgcgcggcagcgaagagatccacctgacgcctatcgagtttcgcctgctggcggcgctgttgaataatcccggcaaagtgcttacccagcgccagctgctgaatcaggtgtgggggcctaacgccgtggagcacagccactatctgcggatctatatgggtcatctgcgacaaaagctggaggccgatccggcacggccgcagcatttgctgaccgaaaccgggattggctatcgctttatgccctga

SEQ ID NO: 136592 - DNA, 2157 bp, Enterobacter cloacae
gtgctggtggacctcccccctgacgatctgcgccagcggctcaatgagggcaaagtctacatcggcggccaggccgagcgcgctatcgaaaactttttccgcaagggcaatctgattgcgctgcgcgagctggccctgcgccgcaccgccgaccgcgtcgatgagcagatgcgcgcctggcgcgaccgccagggccaggagaaagtctggcacacccgcgatgcgatcctgctctgtatcgggcacaacaccggcagcgaaaagctggtgcgcgccgccgcccggctcgccgcccgcctgggcagcgtctggcatgcggtgtatgtcgagaccccttccctgcaccggctaccggaaggccggcggcgggctattctcgccgcgctgcgtctggcccaggagctgggggccgaaaccgccaccctctccgacccgtcggaagagaaagcggtcctccattacgcccgcgaacataacctcggcaaaatcgtcattggccgccaaagcaagcgccgctggtgggatcgcagcggcttcgccgatcgtctggctcgccatgcgccggacctcgatctggtggtgatcgccctcgatgagaaacccttcccccttgccgcacgcgccagcgacagccgtccggcgctggagaaatggcgcctgcagctgcagggctgcgcggtggcggtggcgctatgcgccatcattaccctggtggccatgcagtggttgatggctttcgaagccgccaacctggtgatgctctatctgctgggggtggtgatcatcgccctggtctatggccgctggccgtcggtgctggcgacggtgatcaacgtcatcagcttcgatctcttttttgtcgccccgcgcgggacgctggcggtgtcggatgtccagtatctgctcaccttcggcgtgatgctcaccgtgggcctgcttatcggcaacctcaccgccggcgtgcgctaccaggcgcgggtggcgcgctaccgtgaacgccgtacccgccatctgtatgagatgtctaaagcgctggcggtgggtcgcagccagcaggatatcgccaccaccagcgagcgatttatcgcctccacctttcaggcccgcagccagctgctgctcccggacgcccagggaaaactgctgcccttaacccaccagccagggctgaccccgtgggatgatgccatcgcccgctggagctttgataagggccaacctgccggcgccggcacagataccctgcccggcgtgccgtatcagatcttgcccctgaagagcgccgcccgcacctggggactactggtggtggaaccggagaatctgcgccaattgatgatcccggagcagcagcggctgctggagacctttactctgctggtggccagcgccctggagcgcctcaccctgaccgccagcgaagagcaggcccggctgaccagcgagcgggaaagcctgcgtaactcgctgctcgccgccctgtcgcacgatctgcgtactccgctgaccgtgctgtttggccaggcggaaattctgaccctcgatctggccagcgaaggttcaaaacatgccccgcaggccaacgaaatccgccagcatgtgctcaacaccacccggctggtgaacaacctgttggatatggcgcggatccagtccggcggctttaatctgcataaggagtggctgacgctggaggaagtggttggcagcgcgctgcgcatgctcgagccaagcctcggcggccagcatattcagctggatttacccgatcccctccagctggtgcatgtcgacgggccgctgttcgagcgggtgctgatcaacctgctggaaaatgcccataagtatgccggcgcccgggcgagcatcggcatccgcgccgaggcggacgcccggcagctgtcgctggaggtatgggataacggtccagggatcccggcaggccaggaacagactatctttgataaattcgcccgcggcaacaaagagtcggcgatccctggcgtcgggctgggccttgccatctgtcaggccatcgtcgacgtccacggcgggaccatctccgccagcaaccggcccgagggcggcgcctcattccgtgttacactgccgggagaaacgccccctgaactggaagagctacctgaggaattgtga

SEQ ID NO: 136593 - DNA, 576 bp, Enterobacter cloacae
atgtcattgattcgtccggcacttgtgctatttattctgttaacgctgctcaccggcggcgtctatcctctgctaaccaccagcctgggacaatggtggtttaactcacaggccaacggctcgctgatccgcctgaacggtgaagtgcgcggctcggcgctgattggccagaacttcaccgccgcaggctatttccagggccgcccgtcggccaccgcggagacggcggataatcccatggcctctggcggcagcaacctcgccgccagcaacccggcgctggataaagcggtgagcgagcgcgtgcaggccctgcgcgccgccaaccccgacgccgacccgcgggtgccggtcgaactggtcaccacctcggcgagcggtctcgataacaacctgactccggccgccgcgctgtggcaggtgccccgggtggctcaagcgcgccagctgagcgttgagcaggtaacccagttggtgaatcaggccacacaaaccccgctgctgagcttccttggccagccggtggtcaatatactgcaactcaatatggcgctggatgccctgaaggataagtaa

SEQ ID NO: 136594 - DNA, 240 bp, Enterobacter cloacae
atgctgaacgtgatgggcctgcattcgccctcatcagcgatcctcagcgccgttatcttcaacgcgctgatcatcgtctttctgatcccgctggccctgaaaggcgtcagctatcgcccgctctccgcctcggcgatgctgcgccgcaacctgtggatctacggcctcggcggtctgctggtgccctttatcggtattaaagccatcgacctgctgctgaccctgagcggtctggtgtga

SEQ ID NO: 136595 - DNA, 885 bp, Enterobacter cloacae
gtggtcggcgccgggcctgccggtctggccttcaccgtaaacgctgccgcccgcggtcatcacgtcacgttgtttgatgcgctcccggagatcggcggtcagtttaatatcgccaaacagatccccggcaaagaggagtttcacgagacgctgcgttactaccgcaccatgctcgatcttcatggtgtcgatctacgcctgaacacccgcgtcacggcagacgatctgctggcgttcgatgagacgatcctcgccaccggtatcgccccgcgcctgccggcgatcgacgggatcgatcatccaaaagtgctgagctaccttgatgtcttgcgcgataaagcgccggttggcgcgaagggggcgattatcggctgcggcggcatcggcttcgacaccgcgatgtttttaagccagtcgggcgcggccaccagccaggatatcggcgagttctgccgcgaatggggtatcgataccagcctgcaaacggcgggagggctgagtgctgaaggcccgcagctgagtaaaagcccgcgacagattgtgatgctgcagcgcaaagccagcaaaccgggcgaagggctcggcaaaaccaccggctggatccaccgcgcgacgctgctggcgcgcggggtgaaaatgatcccggcggtcagctatgaaaagatcgatgatgaagggttacatgtcactatcggcggcgagcgccaactgctggcggtcgatcaggtggtgatctgcgccggtcaggagccgcgccgcgagctggcggatccgctgcgcgcggcggggaaaacggtgcatctcatcggcggttgcgacgtggcggcggagctggatgcgcgccgggcgattgcccagggcactaaactggcgctggcgatttag

SEQ ID NO: 136596 - DNA, 1131 bp, Enterobacter cloacae
atgagccaggcagagttaaacggtgagttattcacattagagcggttcccacctaacgctgaagaagaagcgcttcaggcatgggaagcggcggatgaatatctgctgcaacaggtgaatgacgtcgacggcctgacgctcatcttcaacgacggctttggcgcgctcgcctgcgcgctggcggagcgcaacccggtcagtatcaacgactcctttatttccgagctggcgacccgccacaacctgcggatgaacggtatcgatgaagagagcgtgcgctttcaggatagcctgagcccgctaccggccgcgccggcgctggtgctgattaaggtgccaaaacagctggcgctgctggaacagcagctgcgcgccctgcgcgaagtagttacgccggaaacccgcatcatcgccgcggcgaaagcccgtgatgtgcacaactcgacgctggcgctgtttgaaaaaatcctcggcaccaccaccacctcgctggcgtggaaaaaagcgcgtttgatccactgcgttttcaccgctcctgagcttgccgatgcgccgcaaacctacagctggaagctggacggcacgccgtggaccatccataaccacgccaacgtttttgcccgcagcgggctggatatcggcgcgcgtttcttcctgcagcatttaccgtctgatctagaaggcgagatcgccgatctcggctgcggcaacggggtgattggcctgcaggcgctggcgcaaaacccgaacgcgcgggtcatgttcaccgatgagtcgcacatggcggtggcttccagccggttgaacgtcgagcgcaatctgccggacgatatcgcacgctgtgaattcatggtcaacaactcgctctccggcattgagcccgaccgctttacggcgatcctgtgtaatccgccgttccatcagcagcacgccattaccgaccatatcgcctggcagatgtttaacgatgcccgccgcagcctgaaatacggcggcgagctgtacgtcgtcggcaaccgccacctcgattacttccgtaagctgaagcgtgcgtttggtaattgcacgacgattgcgacgaacaataagtttgtcattttgaaagcaacgaaggtgcgtaagcagcgctga

SEQ ID NO: 136597 - DNA, 132 bp, Enterobacter cloacae
atgccggcgatgccgttgtcggccctgcatgaggcgggagagcggctggtaggttatctgcagcagctgatgcccggcgctcgcgcgtcgataacgctgctgcgagccgatgacgagggcgatctacgctga

SEQ ID NO: 136598 - DNA, 552 bp, Enterobacter cloacae
atgcgtagcgtaacgccgtcaatcgaatctgcggtcagccgcctggcgccgggctttcgggcattaagtattgtggtggagagcgcgccggtggccgatcccgccgtcgcggagcaggcgctggccgaggcctgcctggcggtgcagcaggatgatgtgccctgggcgcaagcgcacctggcggcatgggatgaagcgttcagcgccttcggcgcgaaggcgaaacgtaccccctgttcggcgcaggcgctgcgcaagcgggtgctgaaagaggggagcctgccggccatcgatccggtggtggatatctacaacgcgatcagcattcgctatgccgtcccggtcggtggggaaaatctggccgcctaccgtggcgaaccgcggctggccattgcccgcggcgatgagccattcgatacgctaaaatcggcagagccggtagtggaatatccggagccgggcgaagtcatctggcgggatgatataggcgtaacctgccgatgccggcgatgccgttgtcggccctgcatgaggcgggagagcggctggtag

SEQ ID NO: 136599 - DNA, 603 bp, Enterobacter cloacae
atgaacgtaaaagtcaatataacgaccgattcaggatctgatgtcgaccaggtaagtcgcgccgtcgccacgcggctgaaggcctaccgtaaagcgaaaaaaatgtcgctggacgagctgtcgcgccgggccagcatcagcaaaggtatgctggtcgagatggaaaaagaggccgccaatcccagcattgcgatcctctgcaaactcgccgccgcgctgggcgtctcggtggcggatattgtcaatgtgtcaagcgaacccgcgttgcatattattcccgccgagcagatccccaccctctggcaaggcccgctggggggcagcgccaggctcctcgccggcaccgccgggccgaatatgattgagctgtggcgctgggagatgcagcccggcgaagcctttgcctcgcctggccacccggcaacaaccttcgagctgctgcacgtggaagccggcgcgctgacgctgacgcttggcgagacctgccgcacggtggcggccggggaatcggcggtggcccgcaccgaaatagagcacggttaccgcaatgagggtaccgcgccgctggtctttaccatgaccgtggctgaactgccctcctga

SEQ ID NO: 136600 - DNA, 501 bp, Enterobacter cloacae
atgacaaaactcatttatttacagggctatcctgaatcgctgctggcgcaggtgaccacgttaatcgagcaagaccgcctcggcgaggtgctgcaaaagcgctatccgcaagggcacgacgttaacagcgataaagcgctgtatcagtacacccaggacttgaaaaaccgctttctgcgcggcgcggcgccgatcaacaaagtgatgtatgacagtaagatccacgtgctgaacaatgcgctcggcctgcataccgccatttcccgcgtgcagggcggtaagctgaaagctaaagcggaaattcgcgtggcgacggtatttcgcgacgcgccggaagcctttctgcggatgatcgtggttcatgaactggcgcatctgaaagagaaggatcacaacaaggctttttatcagctgtgctgccatatggagccgcagtaccaccagctggagttcgacacccgcctgtggctgacgcacctttcgttaaatcgttctgcgtag

SEQ ID NO: 136601 - DNA, 990 bp, Enterobacter cloacae
atgatacgtttcgcagttgttggcacaaactggatcaccaagcagtttgtcgatgccgcccatgaaaccggcaaatataaacttaccgccatctactcccgcagcctcgaacaggcgcaagccttcgccaaagactatccggtcgagcatctgtttacctcgctcgatgaactggcacagagccctgacgttgacgcggtctatattgccagcccgaactcgctgcactttccgcagacccggctgttcctgagccataagaagcacgtcatttgcgaaaagccgctggcgtcgaacctgcaggaagtcgaggcggcgatagcgctggcgaaagaaaataacgtggtgctgtttgaagcctttaaaaccgccagtctgcctaactttctcctactgaaagaaacgctcgctaaagtgggcaaactacgcaaagcctttatcaactactgtcagtactcctcgcgctatcagcgctaccttgacggcgaaaaccccaacacctttaacccggcgttctctaacggttcgattatggatatcggcttctattgcctggcgtccgctgtggcgctgtggggcgagccgcaggccgttcttgccaccgccagcctgctggacagcggcgtagacgcccagggcaccgtggtgctgagctatggcgacttcgacgtgacgctgcatcactccaaagttagcgattccgcgatccccagtgaaattcagggcgaagacggcgcgttagtgatcgaaaaaatctccgaatgtcagaagctggcgtttgtgccgcgcggcggtaaagcccaggacctgacgcagccccagcacattaataccatgctgtatgaggcggagacctttgcgcggctggtggagacacaggatgtggatcacccgggcctggcggtgagccggatcaccgccaaactgtccagcgaaattcgtcgccagaccggggtgatcttcccggccgatacgcagccgctggcgtaa

SEQ ID NO: 136602 - DNA, 972 bp, Enterobacter cloacae
atgaatactgtcggcacgccgttgctatggggtggattcgctgtcgttgtcgcgatcatgttggcaatcgacctgctgcttcagggacgacgcggttcgcatagcatgaccatgaagcaggccgctggctggtcaatcctctgggtcacgctttctctgctgttcaacgccgccttctggtggtatctggtgcaaacccagggccgggccgtcgccgatccgcaggccttagccttcctcaccggttatctgattgaaaaagcgctggcggtcgataacgtcttcgtctggttgatgctgttcagctatttcgccgtaccgcctgctctgcagcgccgggtgttggtgtatggcgtactgggcgcgatcgttctgcgtaccattatgatcttcgccggcagctggctgatttcgcagttcgactggctgctgtacgtctttggcgccttcctgctgtttaccggcgtgaagatggcgctggcgaaagaggacgactccggcatcggcgataagccgctggtgcgctggatccgcagccatctgcggatgaccgataaaatcgagagcgagcgcttcttcacccgtaaaaacggggtgctgttcgccaccccgctgctgctggtgctgattctggtggaactgagcgacgtgattttcgccgtcgacagtatcccggcaatcttcgcggtcaccaccgatccgtttatcgtgctgacctcgaacctgttcgccatcctcggcctgcgcgccatgtacttcctgctggcgggggtcgctgagcgcttctcgatgctcaaatacggtctgtcggtgatcctggtgtttattggcgtgaagatgctgatcgtcgacttctaccatatcccggttgccatctcgctgggcgtggtgggcggcatcctggccgtcacgctgctgattaacgcctgggtcaacaggcagcacgacaagcagcgcaaactgccagagtaa

SEQ ID NO: 136603 - DNA, 1248 bp, Enterobacter cloacae
atgacaacacgcactccctcatcagggtggctctcccgcctggcgcaaggcagcctggtgaaacaaattttaatcggcctggtgcttggcgtactgttggcgctggtctctaagcctgcggctatcgccgtcggtctgctggggaccctgttcgtcggcgcgttaaaagcggtagcgccggtgctggtattgatgcttgtcatggcctcgatcgccaaccatcagcacggacaaaaaaccagtatacgccccattctgtttctctatctgctgggcacctttagcgcggcgctgaccgcggtgttgttcagttttctctttccctcgaccctgcacttaaccaccgccgccgacagcatcacgccgccgtcggggattgttgaggtgctgcgcggcctgctgatgagcatggtgtccaacccgatcgacgctctgctgaacgccaactatatcggcattctggtgtgggcggtggggcttggcttcgccctgcgtcatggtaacgacaccaccaaaaacctgatcaacgacgtctcccacgcggtgacctttatcgttaaagtggtgatccgctttgcgccgctggggatcttcggcctggtatcttccaccctggcgaccaccggtttcgagaccctgtggggctatgcccagctgctgctggtgctggtgggctgtatgctgctggtagcgctggtgattaacccgctgctggtgttctggaagatccgccgcaacccctatccgctggtgctcacctgcctgcgcgaaagcggcgtttacgcgttcttcacccgcagttccgccgccaacattccagtgaatatggcgctgtgcgagaagctgaatctggatcgcgatacctattcggtctctattccactgggggcgaccatcaatatggcaggcgcggcaatcaccatcaccgtgctgacgctggcggcggtgcatacgctgaatattccggtggatctgccgacggcgctgctgctgagcgtggtcgcttcgctgtgcgcctgcggcgcctccggcgtggcgggcggctcgctgctgctgatcccgctggcctgtaatatgtttgggatcccgaacgatgtggcgatgcaagtggttgccgttggctttattatcggcgtgctgcaggactcctgcgaaaccgcgctgaactcctccaccgacgccctgtttaccgccgcggcctgcatggcggaagacgaccagctggcgaaaaacgccctgcgcggataa

SEQ ID NO: 136604 - DNA, 555 bp, Enterobacter cloacae
atgaccgcgtattggctggcccagggggtcggcgtcatcgcctttcttatcggcattaccacctttatcaaccgcgatgaacgccgtttcaggctacagctggcggtctatagcgctattatcggcgttcattttttcctgatgggcgccgggccggctggaatgagcgccgggctcaatgcgcttcgcacggtcatttccttacgcacccgtagcctgtgggtgatgacagtctttatcctcctgacgttgattctcggcctgggtaaactgcagcatgccatggagctgctgccgatcattggcaccgtcgccagcacctgggcgctgtttcgctgcaaagggctaaccgtccgctgcgtgatgtggtgctccaccgcctgctgggtcacgcataatctgtggttgggttccattggcgggacgctgatagaaggcagtttcctgatcgtcaacgggctgaatatcattcgcttccgccggatgcaaaagcgcggtatcgatccgtttaaggttgaaaacgcagtacaggaagagagcccctccgcccgatag

SEQ ID NO: 136605 - DNA, 1488 bp, Enterobacter cloacae
atgcaatacatcaaaatccattcgcaggataacgtcgcggtcgcgctgacggatatcgctgccggtagcgtggtgacgattgataatgactcggtcaccctcggccaggatatcgttcgcggccacaagtttgcactgcgcgctatcgcgaaaggggaaaacgtcgttaagtacgggttgccgattggccatgcgctggcggatatcgcgccgggcgagcatgttcatgcgcacaatacgcgcaccaatctcagcgaccttgacgcgtatcgctatcaaccggacctggttgcccaaccgccacagcctgcggatcgcgaagtacagatttatcgtcgcgccaacggtgacgtcggcgtgcgcaatgagctgtggatcctgccgaccgtcggctgcgtcaacgcgatggccagacaaatgcagaaccgtttcctgaaagagacgtatggcgctgaggatatcgatggggtacatctcttcagccacacctatggctgctcgcagcttggggacgatcacatcaacactcgcaccatgctgcaaaatatggttcgtcacccgaacgccggggcggtgctggtggttggccttggctgtgaaaacaaccaggtggaggcctttcgcgagacgctgggcgagtttgacccgcagcgcgtgcactttatggtttgccagcatcaggacgatgaagtggaggcgggggttgagcatctgcatcagctgtatgaagtgatgcgtcaggataaacgccagccgggcaagctcagcgagctgaagtttggcctcgagtgcgggggatcggacggcctgtcgggcattaccgctaatccgatgctaggccgcttctcagactatgtgatcgccaacggcggcactaccgtgctgaccgaagtgccggagatgttcggcgctgaacagttgctgatgagccactgccgcgacgaagcgaccttcgacaagctggtgaccatggtcaatgactttaagcagtactttattgctcacgaccagcctatttacgaaaacccctcgccgggtaataaagccggagggatcactaccctcgaagataagtcgctgggctgtactcagaaagcgggctccagccaggtggtggatgttctgcgctacggcgagcgcctgaaggttcatggtctgaatttactgagcgcgccgggcaacgacgcggtcgccaccagcgcgctggccggcgccggctgccatatggtgctgttcagcaccggtcgcggcacgccgtacggcggctttgtgccaacggtgaagatcgccaccaacagcgagctggcggcgaagaaaaagcactggatcgactttgatgccgggcagctgctccacggcaaaacgatgccgcagctgctggaagagtttgtggatgccattgtagccttcgccaacggtaaaccgacctgtaatgagcagaatgacttccgcgagctggccatctttaaaagcggtgttaccctgtaa

SEQ ID NO: 136606 - DNA, 1413 bp, Enterobacter cloacae
atgacatcgtttatgactgaagattttctacttgataccgagtttgcccgccgtctataccatgattacgccaaagatcagccgattttcgactaccactgccaccttccgccgcagcaggttgccgaaaactatcgctttaaaaacctgtatgacatctggctgaaaggcgatcactataaatggcgcgcaatgcgcactaacggcgtgccggagcgtctgtgtaccggtgatgcgtccgatcgcgagaaatttgacgcctgggcggccacggttccgcacactattggcaacccgttataccactggacccatttagagctgcgtcgaccttttggtattacaggtaagctgttgtcgccatccaccgccgatgagatctgggaccagtgtaatgatttgctggctcaggatgccttctccgcccgcggaatcatgaagcagatgaatgtgaagatggtcggtaccaccgacgatccgattgattctcttgagcaccacgcggctgtcgccaaagacaactcctttgacatcaaagtgctgccgagctggcgcccggataaagccttcaacatcgagttggcgaccttcaatgattatatggctaagctgggcgaggtatccgataccgatattcgccgcttcgctgacctgcaaagcgccctgaccaaacgtctggatcattttgccgcacacggctgcaaagtctccgatcatgcgctggacgtggtgctgtttgccgaagcgaccgacgccgagctggatgacattctggcgcgccgcctggctggcgagacccttagcgaacacgaagtggcgcagttcaaaaccgcggtgctggtattcctcggcgcagagtatgcccgtcgcggctgggtccagcagtaccacattggcgcgctgcgtaacaacaacctccgtcagttcaaactgttagggccagacgtcggcttcgactcgatcaacgatcgtccgatggcggaagagctgtctaagctgctgagcaagcagaacgaagaaaacctgctgccgaaaacgattctctactgcctgaacccgcgtgataacgaagtgctgggcaccatgatcggtaacttccagggtgaaggcatgccaggcaagatgcagttcggctccggctggtggttcaacgatcagaaagacggtatggagcggcagatgacccagctggcgcagctcgggctgctgagccgcttcgtcgggatgttgaccgacagtcgcagcttcctctcctacacgcgccacgaatacttccgccgcattctgtgccagatgatcggccgttgggtggctgccggcgaagcgcctgcggatatcgcgctgctgggcgagatggtgaaaaacatttgctttaacaatgcgcgtgactatttcgccattgaactgaactaa

SEQ ID NO: 136607 - DNA, 1302 bp, Enterobacter cloacae
atgcgtaaaattaaagggttacgttggtacatgatcgcgctggtgacgctgggcaccgtgctgggctacctgacccgtaacaccgtagcggcggccgcgccgacgctgatggaagagttacacatttcgacccaacagtactcctatatcattgcagcctattccgctgcctataccgttatgcagcccgtcgcggggtatgtccttgatattctggggaccaaaattggctatgccttcttcgccatcgcctgggcggtattctgcggctcaacggcgctggccggcagctggggtggactggcgctggcccgtggcgcagtcggcgcagcggaggccgcaatgatccccgccggcctgaaggccagctcagagtggttcccggcaaaagagcgctctatcgcggtgggctacttcaacgtgggttcctctattggcgccatgatcgcgccgccgttggtggtatgggcgattgtcatgcacagctggcagatggcgttcatcatctccggggtattgagcttcgcctgggccatcgcctggcttatcttctacaaacacccgcgcgaccagaaaaaattatctgacgaagaacgtgactacatcattggcggtcaggagtctcagcatcagaccaataacgcgaagaaaatgtcgccgtggcaaatcctgcgcaaccgtcagttctggggtatcgccctgccgcgcttcctcgccgagccggcctgggggacctttaacgcctggatcccgctgttcatgttcaaagtttacggttttaacctgaaagagatcgccatgttcgcctggatgccgatgctgttcgccgacctcggctgcatcgtcggcggatatctgccgccgctgttccagcgctggtttggcgtcaacctgatcgtgtcgcgtaaaatggtggtcaccatgggcgccctgctgatgattggcccggggatgatcggcctgttcaccagcccgtacgtggcgattgccctgctgtgcatcggcgggttcgctcaccaggcgctgtccggggcgctgattaccctctcttccgacgtctttggccgtaacgaagtcgctaccgccaacggtctgaccgggatggccgcctggctggcgagcaccatgttcgccctggtcgtcggcgcgctggcggataccatcggctttagcccgctgtttgcggtactggccgtctttgacctgctgggcgcgctggttatctggacggtgctgaaaaacaaaccggctgacgatgactcgacgccgcttagcagccgcaaaccggtcacgcagagttag

SEQ ID NO: 136608 - DNA, 777 bp, Enterobacter cloacae
atggaaatcattgaaccacgccgtctatatcagcagcttgccgctgagctgaagacgcgcatcgaacaaggtgtctaccttgtaggggataagctgcccgccgagcgcttcatcgccgatgaaaaaaacgtcagccgcaccgtggttcgtgaagccattatcatgctggaagtggaagggtatgtcgaagtccgcaaagggtcgggtatccacgttatctccaaccatccgaaataccagcaggtggccgatgaaagccttgagttcgccaactatggcccctttgaactgctgcaggcgcggcagctaattgaaagcaatattgccgaattcgcggcgactcaggtgaccaaacaggacatcatgaagctgatggaaattcaggagaaagcgcgtaacgagaaatgtttccgcgactccgagtgggacctgcagtttcacgtccaggtggcgctggcgacgcagaacagcgcgctggcggcgatcgtggaaaagatgtggacccagcgcgtgcataacccctactggaaaaagctgcatgagcatatcgacctgcgtacggtcgataactggtgcgacgaccacgatcagatcctgaaagctctgctgcgaaaagatcccaacgccgccaagctggcgatgtggcagcatctggaaaataccaagcaaatgttgttcaacgaaaccagcgatgactttgaatttaatgccgatcgctacttatttgccgaaaacccagtcgttcatctcgataccgcagtcaacggcgcgaaataa

SEQ ID NO: 136609 - DNA, 663 bp, Enterobacter cloacae
atggaactatttacccagttattgaatgccttgtgggctcaggattacgaaacgctcgcgaatccctccatgataggcatgctgtattttgtcttgtttatgattttgttccttgagaacgggttattgcctgccgcgtttttaccgggggatagtctgctcgtgctcgtgggcgtgctgatcgccaaaggggcgatgggttttccggaaaccttgctgctgctcaccgccgccgccagcctcggctgctggctaagctatattcaggggcgttggctgggtaatacgcggatcgtgcaaaactggctgtcacacttgccttcgcactatcaccagcgtgcgcatcacttgtttcataagcatgggctctccgcgctgctgatcggccgctttatcgccttcgtacgcacgctgctgcccaccatcgccgggctttccggccttaataacgcccgttttcagtttttcaactggatgagcggcctgctgtgggtgctcatcctgacctcgcttggctatctgctgggtaaaaccccggtattcctcaagtatgaagatcagctgatgtcctgcctgatgctcctgccggttgccctgttggtcttcggactgatcggctcgctggtggtactgtggaagaaaaaatacagaagccggggctaa

SEQ ID NO: 136610 - DNA, 387 bp, Enterobacter cloacae
atgatggtcatgaaacgcccttccctgcgccagttcagctggctgctgggtggttctcttctgctcggcgccctgttctggctttggctggcggtgcagcagcaggaggccacgctggcgatacgcccggttggccagggtatcggaatgccggacggtttctccgtctggcatcatctcgatgccaacggcatccgctttaaaagcatcacgccgcagaaggatggtctgctgattaagttcgattccaccgcccagggcgcggcggcgaaagaagttctcggccgcgctctgccacatggttatattattgcccttctggaggacgataactcgcccaccgcctggctatcccgcctgcgcgacgcgccgcatcgcctcgggtaa

SEQ ID NO: 136611 - DNA, 369 bp, Enterobacter cloacae
atgaaacaccgcatcgctctgcttctggtcctgacttcacttagcgccagcgccctagccgcctctccctgccaggaaaaagagcaggatattcaacgagagatcagctacgccgaaaagcatcataatcaaagtcgcattgatgggctaaataccgcgctacgtcaggttcgggaaaactgtagcgacagtaaacttaaagccgatcatcagcaaaaaattgccaaacagcgggaagagatcgctgaacgtcagcgcgatctgcaggaagcccggaagaaaggcgatgcggacaaaattaacaaacgccagcataaactcaatgaagcgcaacaggagttaaaaacgctggagtctcgggattactaa

SEQ ID NO: 136612 - DNA, 306 bp, Enterobacter cloacae
atggctaaagagaatgtgactgacgaccttcgtgcagaactgaaaacgctggcggataccctggaggaagtactaaattcctcggcggacaagtcgaaagaagagatgggtaaactgcgcagtaaagccgagagcgcgctgaaagagagccgcgctcgtttgggtgaaaccagcgaagcgattcttcgtcaaactcgtgagaccgccgcgcgagcggatgattatgttcgcgaaaatccgtggactggggtaggaattggcgccgccgtcgggctggtgctgggtgtcctgctgtcgcgtcgctga

SEQ ID NO: 136613 - DNA, 399 bp, Enterobacter cloacae
atggcgaatactcaacacacgcagggaccgggtcagcgcgttttctccattggtcagcgcatcgtcacgctgctggtcgaaatggtggaaacgcggctgcgtctggtcgtcgtggagctggaggaggagaaagccaacctcttccagctgctgatcatgaccggactgacgctgctgtttgccgcgtttggcctcatgagtctgctggtgctggttatctgggccgttgacgctcagtaccgcctgcacgtgatgatcgccaccaccgttgtgctgctccttgccgccgcgatcgtgggtatcctaaccctacgtaaggcgcgccgatccacgctgctgcgtctaacgcgtaaagagctggagaacgaccgtgcccttctggaggaggataaatcgtga

SEQ ID NO: 136614 - DNA, 297 bp, Enterobacter cloacae
gtgaatggccgacaggagcgtgaacggcacaaggcgcagctgctgcgccagatccagcagcaacggctggagctcagcgcctgccgccgtcactggcacgaggcgactgcgcccctcgaccgcggctggcatacgctgctgagtttacgttcgtggctgatggttggcagcggtctgatggccgtatggtccgtacgacatccgcattttttaatgcgctggaccaaacgcggactcggactgtggagcacctggcgcctggtgcgcgggatcctgcgccagtcggcagttcgctag

SEQ ID NO: 136615 - DNA, 369 bp, Enterobacter cloacae
atggactggtatctcaaggtattaaaaaactatataggatttggcggccgtgcgcggcgcaaagagtactggatgtttattctggtcaacctcatcctgaccggcgtattgagcatcatcgataaaatgctgggctggcagcgggctggcggcgaaggcattctgaccactatctatggcgtactggtctttttaccgtggtgggcggtgcaatttcgccgtctgcatgacaccgatcgttcggcctggtggctattgctgctgttgatcccggtcatcggctggctggtgatcctgatctttaactgccagcgcggcaccgaaggcaataatcgcttcgggcccgatccgaaacccttttcctactaa

SEQ ID NO: 136616 - DNA, 897 bp, Enterobacter cloacae
atggccaaagagagagcattaacgctggaagcgttacgcgtgatggatgcgatcgaccggcgcggaagcttcgctgccgcggctgatgagctgggacgcgtgccttccgccctgagctacaccatgcaaaaactggaggaggaactggacgtggtgctgtttgaccgctcaggtcatcgcacgaagttcactaacgttggaagaatgctgctggagcgcgggcgcgtgctgcttgaagcggcggataaactcaccaccgatgctgaagccctgtcgcgtggttgggaaacccacctgacgatcgttaccgaagcgctggtgcccactccggatctgtttccgctgattgagaaactggcgactaaatcaaatacccagctgtcgattatcactgaggtgctggccggcgcctgggagcggctggagcaggggcgggcggatatcgttgtcgcaccggatatgcattttcgttcctcttcggagattaactcgcgcaaactctattcggtgctcagcgtgtacgtcgcggcgccggatcacccgatccatcaggagccggagccgctctctgaggttacccgcgtgaaataccgcggcgtcgcggtggcggataccgcgcgcgagcggcccgtcctcaccgttcaactgctggataaacagccgcgtttaacggtgagtacgatagaagataaacgtcaggcgctactggccggactgggcgtggcgactatgccctatccgctggtggagaaggatattgccgaaggtcgcctgcgggtcgtcagcccggaatacaccaatgaaattgacattatcatggcctggcgacgggacagtatgggcgaagcgaagtcctggtgtctgcgtgagatccccaagctgtttgccggcagatag

SEQ ID NO: 136617 - DNA, 702 bp, Enterobacter cloacae
atgattactacccgaacagccaaacaatgcggacaagcagacttcggctggctgcaggcccgctacaccttctcctttggccactacttcgacccgaaattactgggcttcgcatccttgcgcgtcctcaaccaggaagtgctggcgcccggcgcttccttccaggccagaacgtacccaaaagtcgatatcctgaacctgattctggaaggtgaagcggagtatcgcgacagcgacggcaaccacgtgcaggccaaagccggtgaagcgctgctgatcgccacccagcctggcgtgagctatagcgagcataatctgagtaaagagcagtcgttaacgcgaatgcaactttggcttgatgcctgcccgcagcgggaaaacccgctgcagcagaaaatcaatgtcgcagacgcgacgctgcagctgctggcctctccggagggcggggataacagcctccagcttcgccaacaagcctgggtctaccatatcgcgctggagaaaggtgagcagatcaacgtgcaattacatggtccacgcgcctacctgcagtcgattcacggctccgtccatgccgtcgcacaggaacagcaaaagcaggctctcacctgcggtgacggcgcatttattcgtgacgaagctaacattaccctcgtcgccgatacgccgctgcgcgctttgctgatagatttaccggtgtaa

SEQ ID NO: 136618 - DNA, 168 bp, Enterobacter cloacae
gtgagtaagaagaaaaacagaaaaaaggcgtcaccaacgccgttagccccggtgcaaccgcaagtcgccggggccgccagctttggttatgatgagatgcttagcgaactggaagccattgttgccgaagcggagatccgcctgcgggatgaagaaagtctcgcctga

SEQ ID NO: 136619 - DNA, 411 bp, Enterobacter cloacae
atgaaattgataacccgtattgcctttgccacgctgttgaccaccggtttctctatcacggctcaggccgcagacgttaaagcggcgccagcaccggcgcaggatcctattgttcagcacttaaaacttaccaacgatcaggtcgcgaaaattaaaagcctgcatcagcagttggagagtaatgtccagcagatttcccaacaggaaattaaagacggggctctgataaacgtgattgattccggtaaatgggatgaaaaagcggtcaacgatcagctggcggccttcagcaagattgatcagcaggtgcgttattaccgcgtgaagtactattttgaggtgaataaggtactgacgccggagcagcgcacgcaggtgaaaaaagatcttgccgacgcgctgagtgaataa

SEQ ID NO: 136620 - DNA, 465 bp, Enterobacter cloacae
atgttattacgttttcgcgtattaccgctggtttttgtcatctcgctgttaagcggctgcggcctggcttctaaagccttttattccgcgggagacaaattatttcaacccggagatgacgccgtcgcttcgatgcagacgtattcagtggctcagttcctgcagccgtttactctcaacccggcgaaggccagcagcgattatctgggtaaatgggtcaaggtacgcggggtgattgtcgacattcgtcggaagagcggtatcgccggcagctactattttatcgtgaccatgcgagatgaacagaataaaacggataaacgtcttacctttaattttggctcgcataacagcgcagacgtagaggctttaagcaacggcagcgtcgccacgatcgtcggccaggttcatcaggtgcaagattccacgatcccgacgctacagaatcctaaggtggttaaataa

SEQ ID NO: 136621 - DNA, 459 bp, Enterobacter cloacae
ttgtcgcaattatgcccctgtggcagcgcactggagtatagctcatgttgccagcgatatctgtccggcgctgagcttgcgccgggcccgtcacagcttatgcgctcccgttatagcgcgttcgtcatgaaagacgctgactatctaatcaaaacctggcacccgtcctgtcaggcgcagcaatttcgcgccgaactggagaaagggttttcccagaccgaatggctgggcttaaccctgttcgccagtgatgaggggcgagctccaaatgaaggttttgtcagctttgtcgcccgctttaatgacaataaccgccctggcgccattattgaacgttccagattcttaaaagaaaatggacagtggtactatatcgacgggacacgaccgctgattggccgtaacgacccctgcccctgcggctcaggtaaaaaatttaaaaaatgctgcggccagtaa

SEQ ID NO: 136622 - DNA, 903 bp, Enterobacter cloacae
atgagaaagcttaaaattggtctggcgctaggtgcgggagccgctcgcggatggtcgcacattggcgtcatcaacgccctccagcgggccggtattgagattgatatcgtagccggttgttctatcggttcgctggtaggggcggcgtatgcctgtaaccgactcccggcactcgaatcatgggtctgctcattcagcaactgggatgtcctgaagctgatggatctctcctggcgcagggggggactgctgcggggggaaaaagtattcaatcattaccgccgcattatgcccgtcaccgagattgaacgctgcgagcgccggtttgccgctgttgccaccaatttaagcaccggtagggagctgtggtttaccgaaggcgatctacatttagccattcgcgcctcctgcagtatgccggggttaatgtcgccagtaaggcataatggttactggctggtcgatggcgcggtggtcaatccggttcctgtgtcgctcacccgggcaatgggagcggatattgtgattgccgtcgacctgcaacatgatgcccatcttatgcagcaggatttgttctcccttgaaacgccgcggcaggaagcggaagagaaggaggggccatggcatactcgtctgcgcgcgcgcttgacgcgaatgagttcccgccgtacggccgtgacgccgacggcgatggagatcatgaccacctctatccaggtactggaaaaccgtcttaaacgcaatcgtatggcgggtgacccgccggatatcctgttgcagccatactgtccgcaagtttcgacgcttgattttcatcgcgccggagaggcgattgctgcggggcaactggcggtagaaaagaaaatggatgaattattacccttagtgcgtacagccgtttga

SEQ ID NO: 136623 - DNA, 1014 bp, Enterobacter cloacae
atgacgcagccattggcgggaaaacagattctgatagttgaagacgaacccgttttccgctcactcttgcatggatggctgacctcgctgggagcaacaaccttccaggcggaagatggcaaggatgccctgcataaaatgacggaggtgcatccggacctgatgatttgcgacatttctatgccgagaatgaacggtctggagctggtggaaacgctgcgtaaccgcggcgaacagttaccgatcctgatgatctccgccaccgaaaacatggcggatatagctaaagcgttgcgacttggcgtccaggacgtgctgttaaagccagtaaaagatttcgatcgcctgcgcgagaccgtttacgcctgtctctatcccgcgatgttcagttcgcgcgtggaagaggaagagcgtttatttgaggactgggatgcgctggtcagtaatcccatcgccgcttcaagactattgcaggaattacagccgccggtgcaacaggaaatgtcgcactgccgcgttcattatcgacaactggtgtcggcagacaagcccggtctggtactcgatatcgcgccgctttcggaaaatgatttggctttctattgtctggatgtcacacgcgcaggcgataatggcgtgttggcagcattattgctgcgcgcgttgtttaatggtctgctgcaggagcaactggcgcaccagggacaacggctaccagaaatgggaagtttgttaaaacaggtgaatcaactgctgcgtcaggcaaatcttccgggccagttccctctgttagtagggtattaccacagcgggctgaaaaatttaattctggtgtcagcgggacttaatggcacgctgaatacaggggagcatcaaattcagattagtaatggcgttcctttggggacgctgggtgatgcttatcttaaccaaattagccaacgctgcacctcgtggcagtgccaaatttggggggctggcggtcgtttacgcttaatgttgtctgcggaatga

SEQ ID NO: 136624 - DNA, 903 bp, Enterobacter cloacae
atggctgcccttaattctaaagtcagaaaagcggttatcccggttgcgggattaggcaccaggatgctgccggccaccaaagcgattccaaaagaaatgctgccgctggtagataagccgttaattcagtacgttgttaatgaatgtatcgctgcaggaattactgaaattgttctggtaacgcactcgtcgaaaaactctatcgaaaaccatttcgataccagttttgagctggaagcgatgctggaaaaacgtgtaaaacgccagctgctggaagaagtgcagtctatttgcccgccgcacgtgactattatgcaagttcgtcagggcctggcgaaaggtctgggtcacgcggtgctgtgcgcccatccggtagtgggagatgagccggtcgcggttattctgccagacgttattctggatgaatatgaatccgatctgagccgcgataacctcgctgagatgatctctcgcttcgatgagactggtgccagccagattatggttgaacctgtcgaagacgtaaccgcttatggcgtggttgactgcaaaggcgaatccctgaagccgggcgaaagcgtaccgatggtgggcgtggttgagaagccaaaagctgacgttgcgccgtccaacctggcggtggtggggcgttatgtcctcagcgccgatatctggccgctgctggcgaaaacccctccgggcgctggtgatgaaattcagctgactgacgccattgatatgctgatcgagaaagaaacggttgaagcttatcatatgaaaggcaagagccatgactgcggtaataagcttggctacatgcaggcgtttgtcgaatatggtattcgtcacaaaacgctgggcgacgattttaaagcctggctggaaacggcggtagcgaagtaa

SEQ ID NO: 136625 - DNA, 408 bp, Enterobacter cloacae
atgagcgaagcacttaaaattttgaacaacatccgtactcttcgtgcgcaggcaagagaatgcaccctggaaacgctcgaagaaatgctggaaaaattagaagtcgtcgttaacgagcgccgtgaagaagaaaacgctgccgcggcagaaattgaagagcgtacgcgtaagctgcagcaataccgtgaaatgctgattgctgacggtattgatccgaatgaactgctgagcaccatggctgccgttaaagccggtaccaaaaccaagcgtgctgcacgtccggctaaatatagctatgttgacgaaaatggtgaaaccaaaacctggaccggtcagggccgtaccccggctgtgatcaaaaaagcaatggatgagcaaggtaaatcactggacgatttcctgatctaa

SEQ ID NO: 136626 - DNA, 528 bp, Enterobacter cloacae
atgcgtaccgtcgtttataccgctgagattgatgaccgctttggcgccggaaaagtcagttcgcgtatcgggctctcctcgccggcccgattgtataatccacagacctcgttatttgacgatattgcggcggagcaccagctaaagccgattcactgcgtgctggtggatgaaagccagtttctgacgcgtgaacaggttcatgagctgtccgaagttgtcgatacgctggatattccggtgctttgctatgggttgcggacggactttcgtggtgagctctttaccggcagccagtatttactggcctggtcagataagctggttgagctgaaaacgatctgcttctgcggccgcaaggccagcatggtattgcgcctcgatcaggaggggcgtccttataatgagggtgagcaggtcgtcatcggcggtaatgagcggtacgtatcggtctgccgtaagcattataaagaggcgctgagcgtcggttcgttaaccaaggtacaaaaccagcaccgtccctgctga

SEQ ID NO: 136627 - DNA, 957 bp, Enterobacter cloacae
atggatatccgtaaacgtatctacaagttcccgaaaatgggcgtcaaagccaagatggtggcgatcactaccacttccggtaccggttctgaagttacgccgttcgccgtggtgaccgatgacgcgaccggtcagaaatacccgctggcagactacgcgctgaccccggatatggccattgtcgatgccaacctggtgatggatatgccgaaatcgctgtgtgcgttcggtggtctggatgcggtgactcacgccctggaagcttacgtttccgtactggcttctgagttctctgacggccaggcgctgcaggcgctgaaactgctgaaagagtacctgccggcttcctatcacgaaggttccaagaacccggttgcccgtgagcgcgtacacagtgccgcgactatcgccggtatcgcgttcgctaacgccttcctcggcgtgtgtcactcgatggcgcacaaactgggttcccagttccatattccgcacggtctggccaacgccctgctgatctgcaacgttatccgctataacgcgaatgacaacccgaccaagcagaccgcgttcagccagtacgaccgtccgcaggctcgtcgtcgttacgctgaaatcgccgatcacctgggcctctccgcaccaggcgaccgcaccgcagcgaaaatcgagaaactgctggcatggctggaaagcattaaagctgagctgggtattccgaaatctatccgcgaagctggcgttcaggaagctgacttcctggcccacgttgataaactgtctgaagatgcattcgatgaccagtgcaccggcgctaacccgcgctacccgctgatctccgaactgaaacagatcctgctggatacctactacggccgcgaattcgtcgaaggcgaagccggtgcgaaagccgaagttgctccggtaaaggctgagaaaaaagcgaaaaaatccgcttaa

SEQ ID NO: 136628 - DNA, 198 bp, Enterobacter cloacae
atgaccgtccgcctctaccatgacgccatggtggccgaagtgtgttcgagtcagcagatctttcgcttcaaagcgcgatatgattatcctaataaaaagttgcatcaacgcgacgaaaagcatcaaattaaccagtttttggccgactggctgcgttactgtttagcacatggagcgatggcgattccggtttgttag

SEQ ID NO: 136629 - DNA, 828 bp, Enterobacter cloacae
ttggaaagcctgttaaacctacctctggctggtgaggccagagtcaggatattacaaattactgatactcacctgtttgctgaaaagcatgaaacgttgttaggcatcaatacctgggatagctatcaggccgtactgtcggccattcatgcctcacagcgtccatgcgatctgattgtcgcaacaggcgatctggcgcaggaccactcctccgcggcctatcagcattttgctgagggcatcgcgagttttgctgcaccctgcgtctggctaccgggcaaccatgatttccagccggcgatgtacagcaccctgcaggaggcgggcatttcccctgccaagcgcgtgtttctcggcgattgctggcagatcctgctgctcgacagccaggtgtttggcgttccccatggcgagctgagcgacttccagctggagtggctcgaacataagctggcggaggcgccggagcgctataccttactcctgctgcaccatcatccgctgccggccggctgcagctggctggatcagcatagtctgcgcaatgccggcgcgctggacagcgcgttgagcgcctggccgcgggtgaagcatcttttgtgcggccatattcatcaggaactggatctcgactggaatggccggcgcatgatggcgacgccgtcgacctgcgtccagtttaaaccgcactgtgccaatttcactctggatacggtgtcaccgggctggcgctggctggagcttcaccctgacgggacgctgaccaccgaagtgtgccgcctggaaggcgccgcgtttcatccggatattgcttcagaaggctactga

SEQ ID NO: 136630 - DNA, 576 bp, Enterobacter cloacae
atggcgacgctcctttatctgcacggctttaacagctctccgcgctcggcgaaggcgacggcgttaaagacctggctggcgcagcactatcctgagatcaccatggtggtgccggagttgccgccttacccggcggaaacggcggagctgttggagtccatcgtgctggagcacggaggcgagccgctcggggtcgtagggtcgtcgctgggcggctactacgcgacctggctttcgcagtgctttatgctgccggcggtggtggttaacccggcggtgcggccgtttgaactactaaacaattttctcggccacaatgagaatccatacaccgggcagcaatatgtgctagagtctcgccatatttacgatctcaaagtcatgcaaatcgacccgctcgaagcgccggatttactctggctgctgcagcagaccggggatgaagtgcttgattaccgccaggccgttcattactacgcctcttgccggcagacggtagaggagggcggtaatcacgcatttgtcggctttgacgatcatttcactcagattatcgaatttctcggcctgcgctaa

SEQ ID NO: 136631 - DNA, 1896 bp, Enterobacter cloacae
atgacgcaatcttcatataatgctgatgccattgaggtactcaccgggctagagccggtgcgccgccgtccgggcatgtataccgacaccactcgtcctaaccatcttggtcaggaagttattgataacagtgtggatgaagcgctggcaggccacgccaaacgcgtggaagttatccttcatgccgaccagtccctggaggtcattgacgatggtcgtgggatgccggtcgacatccacccggaagagggcgtgccggcggttgagctgatcctctgccggctgcatgcgggcggtaagttttccaataaaaactatcagttttccggcggcctgcacggggtggggatctcggtggtcaacgccctgtcaaaacgcgtggaggtcaacgtgcgtcgcgacggtcaggtctacagcatcgcctttgaaaatggtgaaaaagtggaagacctgcacgtcaccggcacctgcggcaaacgcaataccgggaccagcgtccatttctggccggacgaaagcttcttcgacagcccgcgcttttccgtttcacgtctgacccacctgttaaaagcgaaagcggtgctgtgcccgggcgtggaaattgttttccgcgaccaggtgaacaacagcgagcagagctggtgctatgccgatggcctgaacgattacctgagcgaagcggtgaacggcctgccgctgctgccggaaaaaccattcgtcggcgccttctccggcgagacggaggcggtggactgggcgctgctgtggctgccggaaggcggcgaactgctgaccgaaagctacgtgaacctgatcccgactatgcagggcgggacgcacgttaacggtctgcgtcaggggctgctcgacgcgatgcgtgagttctgcgagtaccgtaatatcctgccgcgcggcgtgaagctgtcagcggaagatatctgggatcgctgcgcctacgtgctgtcggtgaagatgcaggatccgcagttcgccgggcaaaccaaagagcgcctgtcgtcgcgccagtgcgcggcgttcgtctccggcgtggtgaaggacgccttcagcctgtggctgaatcagaacgtgcaggccgcggagctgctggcggagatggccatctccagcgcccagcgccgtctgcgcgcggccaaaaaagtggtgcgcaaaaagctgaccagcggtccggcgctgccgggtaagctggcggactgtaccgcccaggatctgaaccgtaccgagctgttccttgtcgagggggattcggcgggcggctcagccaagcaggcgcgcgatcgcgaatatcaggcgatcatgccgctgaagggcaagatccttaatacctgggaagtctcctccgatgaagtgttagcttcgcaagaagtgcacgacatttcggtggcgattggtattgacccggacagcgatgatttaagccagctgcgctacggtaaaatttgtattctggcggatgcggactccgatggtctgcacattgccaccctgctgtgcgcgctgttcgtaagacatttccgtaccctcgtgaaagaggggcacgtctatgtggcgctaccgccgctgtaccgtatcgacctcggtaaagaggtttactacgcgctaacggaagaagaaaaaaccggcgtgctggagcagctaaagcgcaagaagggcaagccaaacgtccagcgctttaaagggctcggtgagatgaacccgatgcagctgcgcgaaaccacccttgacccgaatacccgccgcctggtgcagctggtgataagcgatgaggatgagcagcagaccacggcgataatggatatgctgctggccaaaaagcgttcggaagatcgtcgcaactggctgcaggagaagggcgatatggcggatctggaagtgtaa

SEQ ID NO: 136632 - DNA, 315 bp, Enterobacter cloacae
atgttaacagtgattgcagaaatccgtacccgcccgggccagcaccaccgccaggcggttctcgatcagttcgcgaaaattattccgaccgttttgcaggaggccggctgccacggctatgccccgctggtggatcatgccgccggcgtcagcttccagaccacagcgcccgactctatcgtcatggtcgagcagtgggaaagcgtcgcgcatcttgaagcacacctgcaaaccccgcacatgaaagcctggtcggaagcggtcaaaggcgatgtgctggagaccagcatccgtattctgcaggctggcgtttaa

SEQ ID NO: 136633 - DNA, 582 bp, Enterobacter cloacae
atgagcaacatcctgattatcaatggggcgaaaaagttcgcgcactctaatggtcaactgaacgacaccctgaccgaggtcgcggagagttatctgcgcgacgccgggcacgatgttaaaagcgttcgcgccgaaagcgagtacgacgtaaaagaagaagtacagaatttcctgtgggccgatgtggtgatctggcagatgccgggctggtggatgggcgctccgtggacggtgaaaaaatatatggatgacgtctttaccgaaggccacggctcgctgtacgccagcgatggccgtacccgctccgacgccagcaaaaaatatggctccggcggcctggtgcaggggaaaaaatatatgctttctctgacctggaacgcgccgatggaagccttcaccgacaaagaccagttcttccacggcgtcggcgttgacggcgtttacctgccgttccataaagccaatcagttcctcggcatggaggcattgccaacctttatcgccaacgacgtgattaaaatgcctgatgtcccacggtatatcgcagaatatcgcaagcatctggcggaaatttttggttaa

SEQ ID NO: 136634 - DNA, 1350 bp, Enterobacter cloacae
atgaaacgacttgcccgcctgagcctgcgcctgcgcctgacgctgctgtttgccgtactgaccaccgccgcctgggggatggccagcgttatcgcctggcagcagaccagcaaaaagctggataagctgttcgatacccagcagctgctgttcgctcgccgcctgagcgtcatgcatttcgatgaactgcgcgccccgcccgccttgctcggggaaaagaaaaaggtacgccacgggcacatcgacgacgacgcgctggcgttcgccatcttcacccgcgacggcaaaatggtgcttaatgacggcgagaacggagaggatattcagtggaattcgcagcgcgagggattcagcgatggctatctgcgtgacgacgatgacgagtggcgtttcctgtggttaaccaccgccgacggccgctaccgcatcgccgtcggccaggagtgggattaccggcgcgaaatggcgatggatatcgtgacctcgcagctcaccccgtggatggttgccctgccgctgatgttcgtgctgctcatcgtgctgttaagccgcgagctggcgccattgaaaaatctggcgcgcacgctgcgcctgcgcgcgccggactcggcggattcgctcagcgtggagaagatccccgccgaagttcgcccgctggtcgaagcgctgaatcagctgttccgacgcactcacgacgccatgctgcgcgagcgtcggtttacctctgatgccgcccatgagctacgcagcccgctggcggcgctgaaggtgcagaccgaagtcgctcaactctccctggacgatcccgaagggcgtgagaaagcgttggatcagctccaccaggggatcgatcgcgccacccgactggtggatcagctgctgacgctgtcgcggctggactcgctcgcccaactggatgatgtgcagcaggtcgccatcgccgatctgctgcagtcggcagtgatggagatgtatcacccggcgcagcagtccgggattgagctgcgcctgcatcttaatgccagccatatcgtccgcaccggccagccgctgctgctcagtctgctggtgcgcaatctgctggataacgccgtacgctatagccctcgcggcagccaggtcgatatcacgctcaacgcccgcgagttccgggtgcgcgataacggcccaggcattagcccgcaggcgctctcgcgcattggcgagcgtttttatcgtccgccggggcaggaggcgccgggcagcggcctgggcttgtcgatcgttaggcgcatcgcctcgctgcacggcatgcaggttgattttgccaacgcgcgcgacggcggcttcgaggcccgcgtgtactggtag

SEQ ID NO: 136635 - DNA, 660 bp, Enterobacter cloacae
atgcgcatattactggtggaagatgacaagcttatcggcgacggcatcaaagccgggctgagcaaaatgggctttagcattgactggtttaccaccgggctggagggcaaaaatgccttatacagcgccccctacgacgccgcaatccttgacctcaccctacccggcatcgatggcctcgatattctgcgcgaatggcgcgataaaggccgccatgagccggtgctgatcctcaccgcccgcgatgccctcagccagcgggtggagggcctgcgcctgggcgccgatgactacctgtgcaaacctttcgccctgattgaggtggcagcgcgtctcgaagcgttgatccgccgcgcgcacggccagagcagcagcgaactgcgccacggcaaggtgatcctcgatccgaaccgcttaaccgccagcctcgacggcgaaagcctggcgctgaagccgaaggagttcgccctgctggaactgcttatgcgcaacgccgggcgcgtattgccgcgtaagcttatcgaggaaaagctctacacctgggacgacgaggtctccagcaacgccgtggaagttcacgtccatcatctgcgccgcaagctcggcagcgactttatccgtaccgtccacggcatcggctataccctgggtgacgcatga

SEQ ID NO: 136636 - DNA, 396 bp, Enterobacter cloacae
atgaaaaaaattgctgcgatgaccgcgattattgctttggtttccatgccggtactggccgccgggcagggaggattcaccggaccgtcgactaccactaccacccaggccggcggcttcaccgggccgagcggcgcggtgaccaccgtggcgaacgccaagtcgctgcgtgatgacacctgggtgaccctgcgcggtaaaatcgtcgagcgcatctctgatgacctgtataaattccaggatgcttccggggtgatcaatgtcgatatcgaccacaagcgctggaacggcgtgaccgtcggcccgcaggacacagtagaaattcagggggaagtcgataaggactggaactcggtagaaatcgacgttaaacagatccgtaaaatcgcgccataa

SEQ ID NO: 136637 - DNA, 870 bp, Enterobacter cloacae
atgaacgatattaaggccagcccggcgtatgtcgggcgcttccagcgcgtctgtaggtacattgcgcgccatcttgatgagccgctgtcgctggagacgctgagcgcgatagcgcacagttcgccttaccattttcaccggcaatttagcgcctataccggcattccattgtaccggtatattcagtggttgcgtctgcgacgcgcctgttggcgcctggcgttcaacccccgcgataaagtcattgatattgcccttgatgccggatttcagaatgcggagtcgttcagtcgtgccttccgtaccgcgtttgaccaaagcccgacccaattccgtcaacaaccggactgggccgagtggcatcgacgcgtaccgaaacatacgctacaggagcaaacgtcgatggacgtcaacattatttcgtgcccctccacccggatagccgtactgcaacatcgcggtagcccggaccttgtcaacgccaccgccgcgcgttttatcgcctggcgtaagacgagcggactatcgcccgtcgccaccagcgatacctgggggatcgcctgggacgatccgcagaccaccccgcaggaggcatttcgttttgatatctgcggtacggtcgatcggccggttggtgaaaacgcctttggcgtgattaacggcgaaatccccggcggacgctgcgccgtcgtgcgccatcacggctcgctggacacgctggcgaacagcgtttggtttctctatcgcgactggttacccgcttcaggcgagacgttacgggattttccggtgtacttccgttacctcaattttgtccatgaggtggctgagcatgaactgcaaaccgatatttatctgccgctggcctga
